United States Patent Application Publication US 2023/0026259 A1 - sequence listing, part 57

SEQ ID NO: 152981 - DNA, 1345 bp, Homo sapiens
  Payload ID: 10091
  Gene Symbol: MPST
  Gene Name: mercaptopyruvate sulfurtransferase
  Uniprot ID: P25325
  ENST ID: ENST00000401419
  CDS Start-End: 165-1058
gcgcgggggccgcgcgggcctgggctgggcggagcgggcgtacccccacggcccggccagtggaaggcgcgggcagcagcggctccgagtggccgcggcggtgggctgtgccggagtctcctccctttggtccgctgcaggcccgcagcccgagtgtcgccgccatggcttcgccgcagctctgccgcgcgctggtgtcggcgcaatgggtggcggaggcgctgcgggccccgcgcgctgggcagcctctgcagctgctggacgcctcctggtacctgccgaagctggggcgcgacgcgcgacgcgagttcgaggagcgccacatcccgggcgccgctttcttcgacatcgaccagtgcagcgaccgcacctcgccctacgaccacatgctgcccggggccgagcatttcgcggagtacgcaggccgcctgggcgtgggcgcggccacccacgtcgtgatctacgacgccagcgaccagggcctctactccgccccgcgcgtctggtggatgttccgcgccttcggccaccacgccgtgtcactgcttgatggcggcctccgccactggctgcgccagaacctcccgctcagctccggcaagagccaacctgctcccgccgagttccgcgctcagctcgaccccgccttcatcaagacctacgaggacatcaaggagaacctggaatcccggcgcttccaggtggtggactcccgagccactggcaggttccgcggcaccgagcccgagccccgagacggcattgaacctggccacatcccaggtaccgtgaacatccccttcacagacttcctgagccaggaggggctggagaagagccctgaggagatccgccatctgttccaggagaagaaagtggacctgtctaagccactggtggccacgtgtggctctggcgtcacagcctgccacgtggcactaggggcctacctctgcggcaagccagacgtgcccatctacgatggctcctgggtggagtggtacatgcgcgcccggcccgaggatgtcatctcagagggccgggggaagacccactgaagctgggcaggacacaggcgagctcaggtgatgccggccaccagcaatgcctggcctggtagctccgcttctgctttcaccaagagagtgtttcttcactcaactcaggtggcatttggggtgacatctcaaaggccaggaattccgttgacttgttggctgccagtaggggcgggaggaaaggcggaggcgagccctggaggagggaggccacaactccgagctgcccacctggtgctgagctggggccccgcctcctttctgttttatttttgaggaaataaaat

SEQ ID NO: 152982 - DNA, 1329 bp, Homo sapiens
  Payload ID: 10091
  Gene Symbol: MPST
  Gene Name: mercaptopyruvate sulfurtransferase
  ENST ID: ENST00000404393
  CDS Start-End: 28-702
caggcccgcagcccgagtgtcgccgccatggcttcgccgcagctctgccgcgcgctggtgtcggcgcaatgggtggcggaggcgctgcgggccccgcgcgctgggcagcctctgcagctgctggacgcctcctggtacctgccgaagctggggcgcgacgcgcgacgcgagttcgaggagcgccacatcccgggcgccgctttcttcgacatcgaccagtgcagcgaccgcacctcgccctacgaccacatgctgcccggggccgagcatttcgcggagtacgcaggccgcctgggcgtgggcgcggccacccacgtcgtgatctacgacgccagcgaccagggcctctactccgccccgcgcgtctggtggatgttccgcgccttcggccaccacgccgtgtcactgcttgatggcggcctccgccactggctgcgccagaacctcccgctcagctccggcaagagccaacctgctcccgccgagttccgcgctcagctcgaccccgccttcatcaagacctacgaggacatcaaggagaacctggaatcccggcgcttccaggtggtggactcccgagccactggcaggttccgcggcaccgagcccgagccccgagacgggtctggctctaccgcccaggctggagtgcagtggcacaatcatggctcactgcagcctcaacctcctgggctcaggtgaccctccccgctcagcctgaccttgcctttaaaggccactgcatgaggcattgaacctggccacatcccaggtaccgtgaacatccccttcacagacttcctgagccaggaggggctggagaagagccctgaggagatccgccatctgttccaggagaagaaagtggacctgtctaagccactggtggccacgtgtggctctggcgtcacagcctgccacgtggcactaggggcctacctctgcggcaagccagacgtgcccatctacgatggctcctgggtggagtggtacatgcgcgcccggcccgaggatgtcatctcagagggccgggggaagacccactgaagctgggcaggacacaggcgagctcaggtgatgccggccaccagcaatgcctggcctggtagctccgcttctgctttcaccaagagagtgtttcttcactcaactcaggtggcatttggggtgacatctcaaaggccaggaattccgttgacttgttggctgccagtaggggcgggaggaaaggcggaggcgagccctggaggagggaggccacaactccgagctgcccacctggtgctgagctggggccccgcctcctttctgttttatttttgaggaaat

SEQ ID NO: 152983 - DNA, 1331 bp, Homo sapiens
  Payload ID: 10091
  Gene Symbol: MPST
  Gene Name: mercaptopyruvate sulfurtransferase
  Uniprot ID: P25325
  ENST ID: ENST00000429360
  CDS Start-End: 70-1023
gctgcaggttggtggcgggaggaggggacagctgcgggcgcggggagggggcgccgcgccgcgggggccatggcggagccaggaagccgggagtccgagacccgggcccgcagcccgagtgtcgccgccatggcttcgccgcagctctgccgcgcgctggtgtcggcgcaatgggtggcggaggcgctgcgggccccgcgcgctgggcagcctctgcagctgctggacgcctcctggtacctgccgaagctggggcgcgacgcgcgacgcgagttcgaggagcgccacatcccgggcgccgctttcttcgacatcgaccagtgcagcgaccgcacctcgccctacgaccacatgctgcccggggccgagcatttcgcggagtacgcaggccgcctgggcgtgggcgcggccacccacgtcgtgatctacgacgccagcgaccagggcctctactccgccccgcgcgtctggtggatgttccgcgccttcggccaccacgccgtgtcactgcttgatggcggcctccgccactggctgcgccagaacctcccgctcagctccggcaagagccaacctgctcccgccgagttccgcgctcagctcgaccccgccttcatcaagacctacgaggacatcaaggagaacctggaatcccggcgcttccaggtggtggactcccgagccactggcaggttccgcggcaccgagcccgagccccgagacggcattgaacctggccacatcccaggtaccgtgaacatccccttcacagacttcctgagccaggaggggctggagaagagccctgaggagatccgccatctgttccaggagaagaaagtggacctgtctaagccactggtggccacgtgtggctctggcgtcacagcctgccacgtggcactaggggcctacctctgcggcaagccagacgtgcccatctacgatggctcctgggtggagtggtacatgcgcgcccggcccgaggatgtcatctcagagggccgggggaagacccactgaagctgggcaggacacaggcgagctcaggtgatgccggccaccagcaatgcctggcctggtagctccgcttctgctttcaccaagagagtgtttcttcactcaactcaggtggcatttggggtgacatctcaaaggccaggaattccgttgacttgttggctgccagtaggggcgggaggaaaggcggaggcgagccctggaggagggaggccacaactccgagctgcccacctggtgctgagctggggccccgcctcctttctgttttatttttgaggaaataaaataaccaagtgctaaatcttgta

SEQ ID NO: 152984 - DNA, 698 bp, Homo sapiens
  Payload ID: 10091
  Gene Symbol: MPST
  Gene Name: mercaptopyruvate sulfurtransferase
  ENST ID: ENST00000628507
  CDS Start-End: 24-698
cccgcagcccgagtgtcgccgccatggcttcgccgcagctctgccgcgcgctggtgtcggcgcaatgggtggcggaggcgctgcgggccccgcgcgctgggcagcctctgcagctgctggacgcctcctggtacctgccgaagctggggcgcgacgcgcgacgcgagttcgaggagcgccacatcccgggcgccgctttcttcgacatcgaccagtgcagcgaccgcacctcgccctacgaccacatgctgcccggggccgagcatttcgcggagtacgcaggccgcctgggcgtgggcgcggccacccacgtcgtgatctacgacgccagcgaccagggcctctactccgccccgcgcgtctggtggatgttccgcgccttcggccaccacgccgtgtcactgcttgatggcggcctccgccactggctgcgccagaacctcccgctcagctccggcaagagccaacctgctcccgccgagttccgcgctcagctcgaccccgccttcatcaagacctacgaggacatcaaggagaacctggaatcccggcgcttccaggtggtggactcccgagccactggcaggttccgcggcaccgagcccgagccccgagacgggtctggctctaccgcccaggctggagtgcagtggcacaatcatggctcactgcagcctcaacctcctgggctcaggtga

SEQ ID NO: 152985 - DNA, 846 bp, Homo sapiens
  Payload ID: 10092
  Gene Symbol: MANF
  Gene Name: mesencephalic astrocyte-derived neurotrophic factor
  ENST ID: ENST00000446668
  CDS Start-End: 1-214
ggccacgcaggggctggcggtggcgctggctctgagcgtgctgccgggcagccgggcgctgcggccgggcgactgcgaagtttgtatttcttatctgggaagattttaccaggacctcaaagacagagatgtcacattctcaccagccactattgaaaacgaacttataaagttctgccgggaagcaagaggcaaagagaatcggttggtttgaaccctggtgacacttaaattcatttggtggctgtcagcttggactgagcatgtgttaagagtccagggtttacactggctgaatctgactaccagtacaggcagggcaccgaaaaatgccgctgtgggccagtgctactatatcggggccacagatgatgcagccaccaaaatcatcaatgaggtatcaaagcctctggcccaccacatccctgtggagaagatctgtgagaagcttaagaagaaggacagccagatatgtgagcttaagtatgacaagcagatcgacctgagcacagtggacctgaagaagctccgagttaaagagctgaagaagattctggatgactggggggagacatgcaaaggctgtgcagaaaagtctgactacatccggaagataaatgaactgatgcctaaatatgcccccaaggcagccagtgcacggaccgatttgtagtctgctcaatctctgttgcacctgagggggaaaaaacagttcaactgcttactcccaaaacagcctttttgtaatttattttttaagtgggctcctgacaatactgtatcagatgtgaagcctggagctttcctgatgatgctggccctacagtacccccatgaggggattcc

SEQ ID NO: 152986 - DNA, 1153 bp, Homo sapiens
  Payload ID: 10092
  Gene Symbol: MANF
  Gene Name: mesencephalic astrocyte-derived neurotrophic factor
  ENST ID: ENST00000528157
  CDS Start-End: 288-845
cttccgtcgctgctgtagtcgcttcctgcggccagcccgggttcaatcagcggccgacaactgtctagggctcagacaccaccagccaatgagggagggcagcgtggagccgcccgtctgggctcgcggctcctggaccaatggggaagtggcatgtgggagggcgccggggggccccccgccaatggggagctacggcgcgcggccgggacttggaggcggtgcggcgcggcgggtgcggttcagtcggtcggcggcggcagcggaggaggaggaggaggaggaggatgaggaggatgaggaggatgtgggccacgcaggggctggcggtggcgctggctctgagcgtgctgccgggcagccgggcgctgcggccgggcgactgcgaagtttgtatttcttatctgggaagattttaccaggacctcaaagacagagatgtcacattctcaccagccactattgaaaacgaacttataaagttctgccgggaagcaagaggcaaagagaatcggttgtgctactatatcggggccacagatgatgcagccaccaaaatcatcaatgaggtatcaaagcctctggcccaccacatccctgtggagaagatctgtgagaagcttaagaagaaggacagccagatatgtgagcttaagtatgacaagcagatcgacctgagcacagtggacctgaagaagctccgagttaaagagctgaagaagattctggatgactggggggagacatgcaaaggctgtgcagaaaagtctgactacatccggaagataaatgaactgatgcctaaatatgcccccaaggcagccagtgcacggaccgatttgtagtctgctcaatctctgttgcacctgagggggaaaaaacagttcaactgcttactcccaaaacagcctttttgtaatttattttttaagtgggctcctgacaatactgtatcagatgtgaagcctggagctttcctgatgatgctggccctacagtacccccatgaggggattcccttccttctgttgctggtgtactctaggacttcaaagtgtgtctgggatttttttattaaagaaaaaaaatttctagctgtccttgcagaattatagtgaataccaaaatggggttttgccccaggaggctccta

SEQ ID NO: 152987 - DNA, 2707 bp, Homo sapiens
  Payload ID: 10093
  Gene Symbol: MEOX1
  Gene Name: mesenchyme homeobox 1
  Uniprot ID: P50221
  ENST ID: ENST00000318579
  CDS Start-End: 421-1185
gatttaaaagtgtgtcccagcagccctggtccagccctctgcaggcatttgctctgggctccaggacgaactcctcgtcagctggtgcgtctgggttgggacagtgaaaatgtttagtgtcattggcgacaaatacacatacaggggatcccagtaggtaggctggtgcattggaggggcaggagcaagcccgacataggtgtgtgcacacacataggagtagctggccacatgtgtgtgtactttaaggagagactttagttttgggtttttttttttttttggttcctggggtaaattttctgttgaacatttttccctcctatttagttttttttcttttgcatttttaaaaatttgaacataaaaagtataaagaatcaaatctttgaaaggaccgaggcgtgcagcggacagcagatggatcccgcggccagcagctgcatgaggagcctccagcccccagcccctgtctggggctgccttcgaaacccccactcggaaggcaatggggcctcagggctaccccactacccgcccaccccgttctccttccaccagaaaccagacttcctggcgacagcgacggcagcgtaccctgacttctcagcctcctgcctggcagccaccccacacagcctgccccaggaggagcacatcttcactgagcagcaccccgctttcccacagtcccccaactggcacttccctgtctcagacgcccggcgcaggcccaactcaggcccggcagggggttccaaggaaatggggaccagcagcctgggcctggtggacaccacaggaggcccaggcgatgactacggggtgcttgggagcactgccaatgagacagagaagaaatcatccaggcggagaaaggagagttcagacaaccaggagaacagagggaagccggagggcagcagcaaagcccgcaaggagaggacggccttcaccaaggagcagctgcgagagctggaggcagagtttgcccatcataactacctgactcggctccgcagatatgagattgcggtaaacctggacctctctgagcgccaggtcaaagtgtggttccagaaccgaaggatgaagtggaagcgtgtgaagggaggtcagcccatctcccccaatgggcaggaccctgaggatggggactccacagcctctccaagttcagagtgagattctgcatggaggaaaaatgactaaggactgagccccctacccaactacccccaccccaatcccaccttcaccctcttccttccccagccagggcagcctctccacatctttccctgactcttggatatgaaactgcccagcattcctgggagtcttaggattttctaggaagttctgtccagcctcttagcagcctcttccctagggcctttgctcccacactctcatggaatcagacagagatcctaccgggccggatgaatctggaaacagcttcagagatactgcttctcagcgtctcttggctgccacccatgcctcctcctaccgctgttctcctaggtcagccaggcctcctcctggtctggacaccacctggcctggtgggagaggagctttggaaccagctggcgactcggaaagtaaatgcttcaaaaggaaggaaatgacagagacacacgcccttgcccaccttcctctgtaggctgcacatctgaggctttggggccccttagttgtcccgaaaccccaagaaaaatcagaatgaggagagtcaaggacagcaactcagctgctgcaagccagaaacacatccctgtctccaaatttgttggctaagtggagacacttctgagaactgactagagaagacagaaaaatagcccgatgtaggtttcggtgtccccatataggcccgtccacacaggcttgactgggtggacaagaatgaacccatgacagcacctgctgcttcaaaatcaaaatcaatttagggatacagcaggggctgttgggctgtgctccagagaaaaggagcagctactccttttaaatccacgatttctggattgaaaacctgtccagatgctgagttgttgggctgaacaactaggagctgaaaacaacgtagaggctggaaagtgtcccctgcattctggaggggaggggagataataaggagggctgctgggtgagggcctggagatgtggaaccctggagtggaaggttctccagtgacagtgtcctgtgactgcaaaaggggacaagaaaatccctcttcctccatgggatggatttaagctcttgctgtgtgttctacaaatgctgttattgtgggaggaaatgctaggtttttgtgtgtggactgcccagacctcagccaggtcttctggagatgacatttgaggactgatggccaaagagcatgggggactgaagccctggctgcctcagcgctctgtctcccaacaccagctggtgttgcagagggaggtcaacgtgagtttggatctcttgtacgcagatgtaatcattcacatgtaaaaataaccccacctccccaccccaaaaagggcaagagctgtggaaaatgattgccaaatgagatggctggttagagcatgattttttctaaagcatacttcatatattttcttaagattacatcaagctaattgtgcgagctcaattcactttgtaagaaaactctcggagaaataaaatcaataaaaagcaaag

SEQ ID NO: 152988 - DNA, 2129 bp, Homo sapiens
  Payload ID: 10093
  Gene Symbol: MEOX1
  Gene Name: mesenchyme homeobox 1
  Uniprot ID: P50221
  ENST ID: ENST00000329168
  CDS Start-End: 30-584
aaaggaccgaggcgtgcagcggacagcagatggatcccgcggccagcagctgcatgaggagcctccagcccccagcccctgtctggggctgccttcgaaacccccactcggaaggcaatggggcctcagggctaccccactacccgcccaccccgttctccttccaccagaaaccagacttcctggcgacagcgacggcagcgtaccctgacttctcagcctcctgcctggcagccaccccacacagcctgccccaggaggagcacatcttcactgagcagcaccccgctttcccacagtcccccaactggcacttccctgtctcagacgcccggcgcaggcccaactcaggcccggcagggggttccaaggaaatggggaccagcagcctgggcctggtggacaccacaggaggcccaggcgatgactacggggtgcttgggagcactgccaatgagacagagaagaaatcatccaggcggagaaaggagagttcaggtcaaagtgtggttccagaaccgaaggatgaagtggaagcgtgtgaagggaggtcagcccatctcccccaatgggcaggaccctgaggatggggactccacagcctctccaagttcagagtgagattctgcatggaggaaaaatgactaaggactgagccccctacccaactacccccaccccaatcccaccttcaccctcttccttccccagccagggcagcctctccacatctttccctgactcttggatatgaaactgcccagcattcctgggagtcttaggattttctaggaagttctgtccagcctcttagcagcctcttccctagggcctttgctcccacactctcatggaatcagacagagatcctaccgggccggatgaatctggaaacagcttcagagatactgcttctcagcgtctcttggctgccacccatgcctcctcctaccgctgttctcctaggtcagccaggcctcctcctggtctggacaccacctggcctggtgggagaggagctttggaaccagctggcgactcggaaagtaaatgcttcaaaaggaaggaaatgacagagacacacgcccttgcccaccttcctctgtaggctgcacatctgaggctttggggccccttagttgtcccgaaaccccaagaaaaatcagaatgaggagagtcaaggacagcaactcagctgctgcaagccagaaacacatccctgtctccaaatttgttggctaagtggagacacttctgagaactgactagagaagacagaaaaatagcccgatgtaggtttcggtgtccccatataggcccgtccacacaggcttgactgggtggacaagaatgaacccatgacagcacctgctgcttcaaaatcaaaatcaatttagggatacagcaggggctgttgggctgtgctccagagaaaaggagcagctactccttttaaatccacgatttctggattgaaaacctgtccagatgctgagttgttgggctgaacaactaggagctgaaaacaacgtagaggctggaaagtgtcccctgcattctggaggggaggggagataataaggagggctgctgggtgagggcctggagatgtggaaccctggagtggaaggttctccagtgacagtgtcctgtgactgcaaaaggggacaagaaaatccctcttcctccatgggatggatttaagctcttgctgtgtgttctacaaatgctgttattgtgggaggaaatgctaggtttttgtgtgtggactgcccagacctcagccaggtcttctggagatgacatttgaggactgatggccaaagagcatgggggactgaagccctggctgcctcagcgctctgtctcccaacaccagctggtgttgcagagggaggtcaacgtgagtttggatctcttgtacgcagatgtaatcattcacatgtaaaaataaccccacctccccaccccaaaaagggcaagagctgtggaaaatgattgccaaatgagatggctggttagagcatgattttttctaaagcatacttcatatattttcttaagattacatcaagctaattgtgcgagctcaattcactttgtaagaaaactctcggagaaataaaatc

SEQ ID NO: 152989 - DNA, 1206 bp, Homo sapiens
  Payload ID: 10093
  Gene Symbol: MEOX1
  Gene Name: mesenchyme homeobox 1
  Uniprot ID: P50221
  ENST ID: ENST00000393661
  CDS Start-End: 257-676
agccctctgcaggcatttgctctgggctccaggacgaactcctcgtcagctgaaaccagacttcctggcgacagcgacggcagcgtaccctgacttctcagcctcctgcctggcagccaccccacacagcctgccccaggaggagcacatcttcactgagcagcaccccgctttcccacagtcccccaactggcacttccctgtctcagacgcccggcgcaggcccaactcaggcccggcagggggttccaaggaaatggggaccagcagcctgggcctggtggacaccacaggaggcccaggcgatgactacggggtgcttgggagcactgccaatgagacagagaagaaatcatccaggcggagaaaggagagttcagacaaccaggagaacagagggaagccggagggcagcagcaaagcccgcaaggagaggacggccttcaccaaggagcagctgcgagagctggaggcagagtttgcccatcataactacctgactcggctccgcagatatgagattgcggtaaacctggacctctctgagcgccaggtcaaagtgtggttccagaaccgaaggatgaagtggaagcgtgtgaagggaggtcagcccatctcccccaatgggcaggaccctgaggatggggactccacagcctctccaagttcagagtgagattctgcatggaggaaaaatgactaaggactgagccccctacccaactacccccaccccaatcccaccttcaccctcttccttccccagccagggcagcctctccacatctttccctgactcttggatatgaaactgcccagcattcctgggagtcttaggattttctaggaagttctgtccagcctcttagcagcctcttccctagggcctttgctcccacactctcatggaatcagacagagatcctaccgggccggatgaatctggaaacagcttcagagatactgcttctcagcgtctcttggctgccacccatgcctcctcctaccgctgttctcctaggtcagccaggcctcctcctggtctggacaccacctggcctggtgggagaggagctttggaaccagctggcgactcggaaagtaaatgcttcaaaaggaaggaaatgacagagacacacgcccttgcccaccttcctctgtaggctgcacatctgaggctttggggccccttagttgtcccgaaac

SEQ ID NO: 152990 - DNA, 1152 bp, Homo sapiens
  Payload ID: 10093
  Gene Symbol: MEOX1
  Gene Name: mesenchyme homeobox 1
  ENST ID: ENST00000549132
  CDS Start-End: 118-621
aaaggaccgaggcgtgcagcggacagcagatggatcccgcggccagcagctgcatgaggagcctccagcccccagcccctgtctggggctgccttcgaaacccccactcggaaggcaatggggcctcagggctaccccactacccgcccaccccgttctccttccaccagaaaccagacttcctggcgacagcgacggcagcgtaccctgacttctcagcctcctgcctggcagccaccccacacagcctgccccaggaggagcacatcttcactgagcagcaccccgctttcccacagtcccccaactggcacttccctgtctcagacgcccggcgcaggcccaactcaggcccggcagggggttccaaggaaatggggaccagcagcctgggcctggtggacaccacaggaggcccaggcgatgactacggggtgcttgggagcactgccaatgagacagagaagaaatcatccaggcggagaaaggagagttcaggtcaaagtgtggttccagaaccgaaggatgaagtggaagcgtgtgaagggaggtcagcccatctcccccaatgggcaggaccctgaggatggggactccacagcctctccaagttcagagtgagattctgcatggaggaaaaatgactaaggactgagccccctacccaactacccccaccccaatcccaccttcaccctcttccttccccagccagggcagcctctccacatctttccctgactcttggatatgaaactgcccagcattcctgggagtcttaggattttctaggaagttctgtccagcctcttagcagcctcttccctagggcctttgctcccacactctcatggaatcagacagagatcctaccgggccggatgaatctggaaacagcttcagagatactgcttctcagcgtctcttggctgccacccatgcctcctcctaccgctgttctcctaggtcagccaggcctcctcctggtctggacaccacctggcctggtgggagaggagctttggaaccagctggcgactcggaaagtaaatgcttcaaaaggaaggaaatgacagagacacacgcccttgcccaccttcctctgtaggctgcacatctgaggctttggggccccttagttgtcccgaaacc

SEQ ID NO: 152991 - DNA, 2500 bp, Homo sapiens
  Payload ID: 10094
  Gene Symbol: MEOX2
  Gene Name: mesenchyme homeobox 2
  Uniprot ID: P50222
  ENST ID: ENST00000262041
  CDS Start-End: 411-1325
ctgggagcgcgtggcgcaggctgagcgggagttttggagggagtttgcatgtggtcaactctgggctcctaagccagcccccagctcacgttacactctatttataacttctcagagccatttccccctgaaagcagttctctgggaccaccttcttttggcttcaacctctcccactcttgacatctgagtagctcagggaagctcttccaggtccgactgttcatatgtaaaggagactggccgctggggctcaggaccgggattatccgagctctgcagaagtgcaccgctattgctttgggaggttaaaaaaaaaatcacacggtttccagtgaaaaagtgacagagggtggtggcctttggaaccgccgtgaagtcttctgcctggaacccgaaacttgcatgctatggaacacccgctctttggctgcctgcgcagccctcacgccacggcgcaaggcttgcacccgttctcccaatcctctctcgccctccatggaagatctgaccatatgtcttaccccgagctctctacttcttcctcatcttgcataatcgcgggataccccaacgaagagggcatgtttgccagccagcatcacagggggcaccaccaccaccaccaccaccaccaccatcaccaccatcagcagcagcagcaccaggctctgcaaaccaactggcacctcccgcagatgtcttccccaccgagtgcggctcggcacagcctctgcctccagcccgactctggagggcccccagagttggggagcagcccgcccgtcctgtgctccaactcttccagcttgggctccagcaccccgactggggccgcgtgcgcgccgggggactacggccgccaggcactgtcacctgcggaggcggagaagcgaagcggcggcaagaggaaaagcgacagctcagactcccaggaaggaaattacaagtcagaagtcaacagcaaacccaggaaagaaaggacagcatttaccaaagagcaaatcagagaacttgaagcagaatttgcccatcataattatctcaccagactgaggcgatacgagatagcagtgaatctggatctcactgaaagacaggtgaaagtctggttccaaaacaggcggatgaagtggaagagggtaaagggtggacagcaaggagctgcggctcgggaaaaggaactggtgaatgtgaaaaagggaacacttctcccatcagagctgtcgggaattggtgcagccaccctccagcaaacaggggactctatagcaaatgaagacagtcacgacagtgaccacagctcagagcatgcgcacttatgatataaacagaggaccagctccattctcaggaaagaaatgttgtgatggcaagccttacccaaatatcgtttacacagagagatgactatggcagtgatgtttaatattattaaatccaggcatttcgaatctgtttttcatgatttatagagggtttacacaaagtgccacttattaaagagcttccacagtgaagatggagaaggtgaacttgctttgaatattccagatgtgtttggtcgtgcgtatggcagtgagcaggtatgtgtttgcttttgcttgcactgaaaattaaattgctatcaagagcaaactatgaacggttttttattcaagatgtctccagagtgaagatgccgaggatgaacttgcattgaacattccagatgtgtgagatcatgtgtattacagtgggcaggtatttgcttttgcttgcactgaaaattaaattgctatcaagaataaaccatgaaacattttatcctgaacagccacagtgcctgaattcactcaagtggataaaaagtgtattttaactctgtatatattacccttaagtcattttcctgtcttcactaatttagcaatgcattcatattagctgatgaaaataggcactcacaatgacaaccagagccagtttcttgtcttttttatacattttgtcatcccagagacaatcagtatgtgcttacctgtgttcaagtagagaaaaatacagtagagtctgataggacatattcttgtaccacagacaaaacaaatcttatgttgcatttactatcaactgctgctaatacgttattataaaacttacctagctcctgaattcttcctatcttatagcttaaaacaattaggatcataggcaaatcagttaccttgcagaaagagctttgtatgacagacattgtcttattttatttctgtaaaatattagctgtatgaatatgatttaattaacaagaaaacatttcttcctgattgacaacagtgttagacaaggtgcaaagcgaaactggttgctcaagttgatagaaaacaaaattctgaatatcttcaaattaaattcggtaaaaacacattattttttcatatgtgatgtattcatgcagaacaactatctttgtattttgtttttaaaatgtgtttaataaatgatcctttgtaaataa

SEQ ID NO: 152992 - DNA, 2374 bp, Homo sapiens
  Payload ID: 10095
  Gene Symbol: MEDAG
  Gene Name: mesenteric estrogen-dependent adipogenesis
  Uniprot ID: Q5VYS4
  ENST ID: ENST00000380482
  CDS Start-End: 326-1237
ctggggtcgtggccgtgggccggcaggggcgaggcgggcgtccagagggcggataaaaggggccgcgctgcgccggggccgctttctccgcgcggtgcctgcagggctcccagcgagtggcagcttgggaggggccgcccgggcggtcagactggcacctgagcggccaccgcgtcccggccaggcgggcagaccgaccccctcctcacctcgcgcgcggctgacgcaggcagggcgcccggcccctcctggggaccatcaggtgccggctgggggctgtaggcaccggacggaagcaggcggtgtgaggaccgacgacgcgggcatggcgggggcggcctgcgagccggtggccaggccgagcctgacctccatctcgtctggggagcttcgcagcctgtggacctgcgactgcgagctggccctgctgccgctggctcagctgctgcgcctgcagcccggtgccttccagctgagcggcgaccagctcgtggtggccaggcccggggagccggcggcggcgcgggggggcttcaacgtcttcggtgacggcctcgtgcgcctcgacgggcagctctaccgcctcagcagctacatcaagaggtatgtggaactgaccaactactgtgattataaagactacagggaaactatattgagcaaaccaatgttgttctttattaatgtacagaccaaaaaagacacctcaaaagaaaggacgtacgcgtttcttgtaaacacgaggcaccccaagataagaagacagatagagcaagggatggacatggtcatctcctcagtgattggagaaagttaccggcttcagtttgattttcaagaggcagtgaagaatttcttccccccaggaaatgaagtggttaatggagaaaatttaagctttgcatatgaattcaaagctgatgcattatttgatttcttctattggtttgggctcagtaattccgttgtaaaagtaaatggaaaagttctgaatttgtcaagtacaagtccagaaaagaaggagacgattaagttatttctggaaaaaatgagtgagcctttaatccgaaggagcagtttctctgaccgaaagttcagtgtaacttccagaggttcaatagatgatgtttttaactgcaatctgtcacccagatcatctctgacagagcctcttttggcagaattaccatttccaagtgttctggaatctgaagagacacccaaccaatttatctgattgaactgaacattgtagcagttgctcccgcactccaggcctgtgctagactataggctggggggagggtaggaggtgggaggcagatacttccacctgcgtgtcaatctccggctcctccatggcttctatggaggactcctctcttctgcttctgtggatgtgatgccctggcaggcccagggcagctgattcccctaaaacttatgattaccaggatggaaaggccttggtcccatggcactgggtggggctgggggatattctctactttgaacacttctccaaagaggcagaagggccacagagttctgccaccctgaacatttttctcagttccctgggagtttttgtggcagcctttgtgggagtggtctgactggctgttgacctagcatgcttcataaatcagggtttggccctctgcttggagcatccaaccccttgaactcaaacctgtcgagcaaggggttaagagttctgttctcttgccaacctggctgggcaaaagcctgtgccatctttcactgggaggcaaatatgtttttcatcctgccatatgacacctatgagaaacgttcacagtgaggagtagccaggttgctaggacagtaaccctgccacacactgcctgaaatcggaactcccttggcctccctcttaactaagtgacccatgtagaaggaagccaggagatatggtaccgaacaatgacaggggaagggtattggacacggcagcgtcctccttattgaaaacacattatgtcagttgggaattttaaataagcttttagcaaacctaacactaaaagcaaaatagaagaaagctataccattaccataatacatttttcatctcatggctacaatggaattcttgaaaaggaaaaaaaaatcctatctacatataaaaacctgcatgaatgaatcactacatatgcttataatgaggaagagttatgggtcctgagtgtaattttttatcctttcttaaaaagtttctgtattatgcattttgataacactactgatgatccttccacttatatttgaaatgttatgtaccacatttgcacaattaaaacttttcttagcattcaacctagaattgattaaatttatgactgaggcttca

SEQ ID NO: 152993 - DNA, 450 bp, Homo sapiens
  Payload ID: 10095
  Gene Symbol: MEDAG
  Gene Name: mesenteric estrogen-dependent adipogenesis
  ENST ID: ENST00000428944
  CDS Start-End: 1-320
cggcggcgcgggggggcttcaacgtcttcggtgacggcctcgtgcgcctcgacgggcagctctaccgcctcagcagctacatcaagaggtatgtggaactgaccaactactgtgattataaagactacagggaaactatattgagcaaaccaatgttgttctttattaatgtacagaccaaaaaagacacctcaaaagaaaggacgtacgcgtttcttgtaaacacgaggcaccccaagataagaagacagatagagcaagggatggacatggtcatctcctcagtgattggagaaagttaccggcttcaggttcaatagatgatgtttttaactgcaatctgtcacccagatcatctctgacagagcctcttttggcagaattaccatttccaagtgttctggaatctgaagagacacccaaccaatttatctgattgaactgaacatt

SEQ ID NO: 152994 - DNA, 4845 bp, Homo sapiens
  Payload ID: 10096
  Gene Symbol: MESDC1
  Gene Name: mesoderm development candidate 1
  Uniprot ID: Q9H1K6
  ENST ID: ENST00000267984
  CDS Start-End: 1329-2417
gggaggttacggccgaggcggcggcggcggcgagcccgggggcgaggcgcggacgggaacaggaaaagcctccggcagcccctgcgggcggcggcgcagccacggccgcgctccgaggtgaagccgcgcgcggagaggaagcgggtgttttcccctctgcctttcggcccccgcccttcctttcagtttctgcccgctcgctcggaagttggcggttgacaaaaatggcaggagccggggcccgggccggttgccgcagcgccgcggggaccttctgagttggcccggtggcagggagactcgtgcaggggcgtccgatgcgcggggcccggggcctcgggagagctcagctgctgcgggccccagacgaggcgacagggatggacttgcgtagacagccagcgccgggccgccgggcgcgcggtctgggagggcgtgccgccgcggcgccgggccgcgctctgtgaaccggcgaggcgggaaggggccgccgtggtgctcggcacgcccgggcgtgtggcgggcgggcgagagcttgagcgcgatccgggcggccgctgtgcgcaatcagtgcaggctcccgcccgactctgactcggcgcggccgcgacagtgccggccacaccctctgccccgctgccgccggcgccgcttcccaagagctggaggcaggagatgcgcccggggcggccgcgcgtcccagagagccagccccggccgccgtcgcggggaagtgccgcctggtggggtcacggcgcctgaagcccacgtgcgccgccgagcccgaggtggcctcgagcgcggcggctgacagcacagcccgcctgagctgcctcccgcgctcctccccgaggaaaggattttgatttcaaagaaaggaaggaaggaaggacaactcccagcttccccgtcccgccctccccgctccgagggccgcgccaggccatgcccaagaaggcggcggcggcggcgaaccagcagaagggactttcctggcagcccggcgacgaggagcgcggacagtgagtttgctctgccccggttcatggttcctgcaagccctctaggaggccgaaagctgcagcccctccccttgccccgaagagccttccgcgttctctcgccctcgggcccaccccgcgccgcccgggctcccgccgccgcagcccagtgccctctgcccgcggcggtggatggcatgatggtgcggggaaggcaccgcggccttggccagctgagtcgcgacggccgccggggcggcggcagtggccgcggcagcggcggtggtagcgggctccccagcggcatgccagtgccccccgggcgcgatggctagcggcagcgccgggaagcccactggcgaggcggcttctccggctcctgcgagcgccatcggcggggccagctcgcagccgcggaagaggctggtatccgtctgcgaccactgcaagggcaagatgcagctggtggctgacctgctgctgctgtcgagcgaggcgcggcccgtgctcttcgagggccccgcctcctctggtgccggcgccgagtccttcgagcagtgccgggacaccatcatcgcgcgcaccaaggggctctccatcctcacccacgacgtgcagagccagctcaacatgggccgcttcggggaggcgggggacagcctggtggagctgggcgacctggtggtgtcgctgaccgagtgctcggcccacgcggcctatctggccgctgtggccacgccgggcgcccagcccgcgcagccgggcctggtggaccgctaccgcgtgacgcgatgccgccacgaggtggagcagggttgcgccgtgctgcgcgccacgccgctggccgacatgacgccgcagctgctgctggaggtgtcgcagggcctgtcgcgcaacctcaagttcctgacggacgcgtgcgccctggccagtgacaagtcacgggaccgcttttcgcgggagcagttcaagctgggcgtcaagtgcatgagcaccagcgcgtcggcgctgctggcctgcgtgcgcgaggtgaaggtggcgcccagtgagctggcgcgcagccgctgtgcgctcttcagcgggcccctggtgcaggcagtgagcgccctggtaggcttcgccaccgagccgcagttcctgggtcgcgcggcagctgtgagcgccgagggcaaggcggtgcagaccgccatcctgggcggcgccatgagcgtggtgtcggcctgcgtgctcctgacccagtgcctcagggatctggcgcagcaccccgacgggggcgccaagatgtcggaccacagggagaggctgaggaactcggcctgcgccgtgtctgaaggctgcaccctgctatctcaggctttaagggagaggtcttcgcccaggactttaccgccagtgaattccaattctgtgaattagcaccccacccccataccccttcttccacccccagactaaaggaagatacttactctctgcccctctccatttataccaaagaaatcataggtgaaaccccctaccctccccaacgttaaatgctcgagaggaatcttccacaaggcagggccatgcacgcaacctgcacacgcacttggagggcccaggtgtctctccaccagcccccatgcagtagggactggaagatatgtcatctgctggttgtgttatcactcccaccccctaccccagcccgtcttccggaatttctcaactaaatttcattattgggcaggaaggaggtcatgggttcatttcatttttgttttttgtgtttttaattaaaagaaaggttacctcagttttcactccttagacatggatgtagctacctttttttgtatgtcttttttttttttaagcaatcgtgttgaattaggagtatacttggtgtggaaagagtatgaatttgccatgtgatttgcaaatggggggaagctactgtgagcgtgtgtttttttaatttacactatagagtgatttttttttcccccaacgtcaagtttttaccttgcatgtactggagtatttatttcatctattaaaatgttatgtttctcagatggctttttgcaattattgttgatttttcaataattgtaattttgcatgctgcatgtcatgtatgggaagggtctgtgggaaggctatttcaatagtagtgaggcgggcccccaattcccagccctttctactatttcctcaagaaaaagtactgctcaagaagtactcccttgagcagcctggaactgaagagaggactatgtgtaacgttctattttaaaaggcaggtgacacaaatgggattgggttatgtagagtgcttgggacggttttgtctcatttttcctggaaagtgatttagctccctttgtctccacttacctttccatcatcatgaacagtggctcaggctgcttgaattctgatttgtattctgcctatcattttcagattaaatcctaatcctgtgtggtatgccagccttcccaactcagagtctctggatggaactctaaaagtactgtacatcaagtgagaatagttagcatcttttatgtacacaggtctattcagacaagatcctcatgatttcagaaaaaatatagagagggtcctagactgcttaatagaggaaagaagtatcctggaaagcttgttaagaacgttctagagccacaacatgattgtaggccaagggcttgtttttgtgaccttgatctaagataatgccatggttgattgtatgttggaagaatctttgattggaatttggagtaatattaaggtagtttgtcttttctgcagacatttttaggagtctttttgtgtgagtggtggtggagtgtatagttttgttgaacctagttaaattctgaatatcttcccactaaaagcacaacaaatctatttacagtgcctgaagcctgggagagccacatgagtaaaaactcgtacgtggtttagatttgttccatttacatttttcttgggatttgttgtgcttaaacctttgcagttcccacagatctgaaaagaaagcatttttcactgtaatacattaagagagagagaaaaaagtcatattgactattttacttgtttgaatcgctgtttttattacaatgacatgaaatacaacgtgtaaaagtctttaacctgtgttgggtaagggtaggactgtttcaccaccctgaatttgaaatttgaaaaagtcttaaagtggtagggtacttaaatttttaaaaaaatgaccatgggagcagtttttctctgttaaatcctggtaaacttcgggtttttgaagactttaaaagatgaaaatgaccttgagcatctttattcctttcctctgccccttaatgttgggatggggttcaggatgaaagggaggtgggattctaattcatgtgccagtgacaatcctgcatgcatatagaaatttttatttattgaatgtacacaagtaatgatggagtttgattatatggttcattttcatttatcctatgcagatcacaaagagtaaactgaaaggaacaaacgctaagtaaaataagggccagaaatctgtaaatttggtattagattaagaaaaaaagaattgccagttttttcctggactctttccttgcagaagcgattttcaggacaactcaagccaattaaaaaaaagaaaatcactttccctatctgtttggatgaagttaactagctagtcactaagtgaattttgaaacctcttacctaaatgatagctgctcttggtgtttctttatgctctacgtttggtcatgtaacatgcataatctctgttctctgaagttgattaaagttctaaacttaa

SEQ ID NO: 152995 - DNA, 4264 bp, Homo sapiens
  Payload ID: 10097
  Gene Symbol: MESDC2
  Gene Name: mesoderm development candidate 2
  Uniprot ID: Q14696
  ENST ID: ENST00000261758
  CDS Start-End: 88-792
aaggcggacaggaaggcgtgtgcaaggcggggtccggcccgcgcaggtcgggtaagcgcgtctagggcgctgcgcggcgcagcgaaaatggcggcttccaggtgggcgcgcaaggccgtggtcctgctttgtgcctctgacctgctgctgctgctgctactgctaccaccgcctgggtcctgcgcggccgaaggctcgcccgggacgcccgacgagtctaccccacctccccggaagaagaagaaggatattcgcgattacaatgatgcagacatggcgcgtcttctggagcaatgggagaaagatgatgacattgaagaaggagatcttccagagcacaagagaccttcagcacctgtcgacttctcaaagatagacccaagcaagcctgaaagcatattgaaaatgacgaaaaaagggaagactctcatgatgtttgtcactgtatcaggaagccctactgagaaggagacagaggaaattacgagcctctggcagggcagccttttcaatgccaactatgacgtccagaggttcattgtgggatcagaccgtgctatcttcatgcttcgcgatgggagctacgcctgggagatcaaggactttttggtcggtcaagacaggtgtgctgatgtaactctggagggccaggtgtaccccggcaaaggaggaggaagcaaagagaaaaataaaacaaagcaagacaagggcaaaaaaaagaaggaaggagatctgaaatctcggtcttccaaggaagaaaatcgagctgggaataaaagagaagacctgtgatggggcagcagtgacgcgctgtggggggacaggtggacgtggagagctctttgcccagctcctggggtgggagtggtctcaggcaactgcacaccggatgacattctagtgtcttctagaaagggtctgccacatgaccagtttgtggtcaaagaattactgcttaataggcttcaagtaagaagacagatgttttctaattaatactggacactgacaaattcatgtttactataaaatctccttacatggaaatgtgactgtgttgctttttcccatttacacttggtgagtcatcaactctactgagattccactcccctccaagcacctgctgtgattgggtggcctgctctgatcagatagcaaattctgatcagagaagactttaaaactcttgacttaattgagtaaactcttcatgccatatacatcattttcattatgttaaaggtaaaatatgctttgtgaactcagatgtctgtagccaggaagccagggtgtgtaaatccaaaatctatgcaggaaatgcggagaatagaaaatatgtcacttgaaatcctaagtagttttgaatttctttgacttgaatcttactcatcagtaagagaactcttggtgtctgtcaggttttatgtggtctgtaaagttaggggttctgttttgtttccttatttaggaaagagtactgctggtgtcgaggggttatatgttccatttaatgtgacagttttaaaggatttaagtagggaatcagagtcctttgcagagtgtgacagacgactcaataacctcatttgtttctaaacatttttctttgataaagtgcctaaatctgtgctttcgtatagagtaacatgatgtgctactgttgatgtctgattttgccgttcatgttagagcctactgtgaataagagttagaacatttatatacagatgtcatttctaagaactaaaattctttgggaaaaaccctcaattgtgattttaataaattaaaagtagcacattacatggttagaaaatgtcagtgttaaagaatggtacaaagtgaaaagtgtatccctctcttgccgccggtggtagcttgtcccagtggaagctgctgttaacaatttgtgcccccacatccccctccctgcccatccaccaaaaaaaagtacatttacttatgtaaatgtacttatggtgatgtatgtttgttttggcctcacagcatctgtttccccttaatttggtagctgctcacatttccctcgaaagaaccacaccctctgcattctcagttctctgctttggatgggacatttgccctgcagtccccccaccctccaggccatgccctctccagggtgaggcctgtgtgatctaccgtactagggtactaggccctgaaagaggcttttcttgttcctcctgcatcttgaacctggagcgggagctgttgtaggccccgcccttggagaagagaactgtctgacagtggggagagagcgccacaccctggtggcataaacgagtccctgaatcatgccgtggctgaaccaagccctgtctgtgggctttttctgttgtactcagggcagtttgatggggttactgtcctgcatagccataatggcccagtataaagcagctgttttgatgagataattgctttaattaagcaaaaggtagcaaagctttcactccgccctgtaccttctgtttccacttaggagccttcccatgtcagaatgtgcagatctgtctcattgtttcctgtgcagtgtgcccccacttcacccagtagtttctgtgtgtctgttatgtactaggtactacaaggtgccaggacggtgtagatacagcctctgctatcgtaaaactcaatgattcggtgggggaagacaaatgtcagtaatgtacaaagtaaaatggcagctgttagaagtatgaaaggggcagggtagggggaggtagaatcttccctgaccaggttaagaaaaccagaggccttctctgagggcaagaggaggagaggagaaatagagtaaggcaggcagaggaaacagtctgagctaagaccctgtggctagaagtggcagagggagaggcagcaggaaggccagcggggaggctggggcccagtgcaggcccaggttggaggagcgtagcacatggagtttggtaggagtttgggacgccctggtggatcttaattgtgatggggtgggtgtgaaaggcagtccaggttgcactggttgcacaggagaagtgatcagaagaggaccccagcaggtgtgagccgtgagctgggaggtgcttcagtagtgcaggccatagctgaaggtgtcctacatcagcagggtgatggtgaggtttgaaccactgtttcactgcatagtccctgctgatggacacttgagtgttcagattttttgctggtatattcagtgctgcagtggacattttcatacaaaatatttcggtacacttttgtttatatctgaaaggtaaattcctagcagtagaattattagagcaaacggaatttaacattttggtgtgtattgccaaattgccctcccaagtggtttagtcagcttacccttgccaacaatagatctatccttgccagccttgggcatcacatttaccagtttaatagattgtaaaaccatatcttaattggctaccctgaagccaccatactggagaggctgcgtacagtgtttcacgtagagagagggatacccaggaggcccacctgctccaaccccagctgcatgagtcttcccagcccaggcacagacatgtggataagatttaaacatttccagccccagccttcaagcaatcctagttgacactgaggggagccaacataagctgagctgagaaacagtctgcccagtctgcagattcatgagcaaaagaaatgttgggctgggtacagtggctcacgcctgtaatcccagtactttgggaggccgaggtgggtggatcagttgaggtcaggagtttgagaccagcctggccaacatggtgaagccctgtctctactaaaaattagccgagtgtggtggtgcgggcctgtaatcccagctactcaggtggctgaggcaggagaatggcttgaacccgggaggcggaggttgcagtgagccaagatcaggccactgcactccagcctggatgacgggatgagactctgtctcaaaaaaacgaaacaaaaattttttaagagaaatgtcatttgtttttgtttttgagacagggtctcactctgttgccctcactagagtgcagtaggatcacggctcactgaagtctctacctaccggctcaattgatcttcccaccacagcctcccaaatagctgggagaaatgtcctgtttttaatgaatttgtcttcctttttgtcttgtttgttttaatatctagtgatctaataaatttggatgatatcttttgactatcaattatg

SEQ ID NO: 152996 - DNA, 1392 bp, Homo sapiens
  Payload ID: 10097
  Gene Symbol: MESDC2
  Gene Name: mesoderm development candidate 2
  Uniprot ID: Q14696
  ENST ID: ENST00000422879
  CDS Start-End: 29-445
gtctagggcgctgcgcggcgcagcgaaaatggcggcttccaggtgggcgcgcaaggccgtggtcctgctttgtgcctctgacctgctgctgctgctgctactgctaccaccgcctgggtcctgcgcggccgaaggctcgcccgggacgcccgacgagtctaccccacctccccggaagaagaagaaggatattcgcgattacaatgatgcagacatggcgcgtcttctggagcaatgggagacccctgagccccttccagtgctgcctgaggtgccctctacctgtgcctgcctctcgtctgccagtttgatttggacctgtttttcccacctcagcccccatgctcttgtcaaacgtgtttggcctccagccaaacagggcctgggaggaaaagagagtcctgcttctgcctggcttccccatcggggaggggagttgaagtgacagcctcctgacagcttagaaatgtggaggacgcagcaagttctggacatggccagccatatgaatgatatcttctctttctttgaaccatctccacctgctcttatggacaccccgccttggggcaaggcaagggatgggcacaacttggaagattttggctttgtgatcctcagtgtccagtgtcacccagatgggccggaagctgcctttgaagccaacgaatgccatttgctctgaaaagcaatgatgagtctcctgagcaaaagccctatgagaggacggctgccccaccccgttccatggctccccatcgccagccccccacgcccaccaggtaccgcctagccacactgcactgtggccccttgggaagagctctgtgctcagctactgatggtgcctgacatgtgtttgtatggggcaggcagggtctcacctgagcctcactgccacctaggcagggtgatggctttgttgtagacaggggagccatgcacagcaggaaatggggcaaactgtaagggaggagacctcctaggaacctgcctacctttgagctgcccctaggacaaccagcaagtccctgcccctctctgaagcccagtgttcccatccatcaaatgatggcattgatctacaagatctccttccccactctatcactctgtggctctagaaagagttctgagaggtgaagaaatttgaccaagagtgtggagtaaatggtgcaccccagattagaactctaaacccctgaaacccacacagcactctccatcttgcagttcacagcttgagcatccgaggggcatgggaatccacgtctatactcagcccatcttggcaggcaacatgcatttatcaccaccgggaaagtgccattcaacttaggtcaccttacatacatcagcttttggcaaccgggatcttaatttaaaagacag

SEQ ID NO: 152997 - DNA, 539 bp, Homo sapiens
  Payload ID: 10097
  Gene Symbol: MESDC2
  Gene Name: mesoderm development candidate 2
  ENST ID: ENST00000559537
  CDS Start-End: 5-247
gaaaatggcggcttccaggtgggcgcgcaaggccgtggtcctgctttgtgcctctgacctgctgctgctgctgctactgctaccaccgcctgggtcctgcgcggccgaaggctcgcccgggacgcccgacgagtctaccccacctccccggaagaagaagaaggatattcgcgattacaatgatgcagacatggcgcgtcttctggagcaatgggaggccaacacctgtcctacttccactcactgaccttccctgaccaatccaggcgatgatcactccctgccctcagaagcctgccacaccactcattgggcagacccctgagccccttccagtgctgcctgaggtgccctctacctgtgcctgcctctcgtctgccagtttgatttggacctgtttttcccacctcagcccccatgctcttgtcaaacgtgtttggcctccagccaaacagggcctgggaggaaaagagagtcctgcttctgcctggcttccccatcggggaggggagttgaagtgacagcctcctgacagctta

SEQ ID NO: 152998 - DNA, 2938 bp, Homo sapiens
  Payload ID: 10097
  Gene Symbol: MESDC2
  Gene Name: mesoderm development candidate 2
  Uniprot ID: Q14696
  ENST ID: ENST00000561312
  CDS Start-End: 38-742
ggtaagcgcgtctagggcgctgcgcggcgcagcgaaaatggcggcttccaggtgggcgcgcaaggccgtggtcctgctttgtgcctctgacctgctgctgctgctgctactgctaccaccgcctgggtcctgcgcggccgaaggctcgcccgggacgcccgacgagtctaccccacctccccggaagaagaagaaggatattcgcgattacaatgatgcagacatggcgcgtcttctggagcaatgggagaaagatgatgacattgaagaaggagatcttccagagcacaagagaccttcagcacctgtcgacttctcaaagatagacccaagcaagcctgaaagcatattgaaaatgacgaaaaaagggaagactctcatgatgtttgtcactgtatcaggaagccctactgagaaggagacagaggaaattacgagcctctggcagggcagccttttcaatgccaactatgacgtccagaggttcattgtgggatcagaccgtgctatcttcatgcttcgcgatgggagctacgcctgggagatcaaggactttttggtcggtcaagacaggtgtgctgatgtaactctggagggccaggtgtaccccggcaaaggaggaggaagcaaagagaaaaataaaacaaagcaagacaagggcaaaaaaaagaaggaaggagatctgaaatctcggtcttccaaggaagaaaatcgagctgggaataaaagagaagacctgtgatggggcagcagtgacgcgctgtggggggacaggtggacgtggagagctctttgcccagctcctggggtgggagtggtctcaggcaactgcacaccggatgacattctagtgtcttctagaaagggtctgccacatgaccagtttgtggtcaaagaattactgcttaataggcttcaagtaagaagacagatgttttctaattaatactggacactgacaaattcatgtttactataaaatctccttacatggaaatgtgactgtgttgctttttcccatttacacttgacccctgagccccttccagtgctgcctgaggtgccctctacctgtgcctgcctctcgtctgccagtttgatttggacctgtttttcccacctcagcccccatgctcttgtcaaacgtgtttggcctccagccaaacagggcctgggaggaaaagagagtcctgcttctgcctggcttccccatcggggaggggagttgaagtgacagcctcctgacagcttagaaatgtggaggacgcagcaagttctggacatggccagccatatgaatgatatcttctctttctttgaaccatctccacctgctcttatggacaccccgccttggggcaaggcaagggatgggcacaacttggaagattttggctttgtgatcctcagtgtccagtgtcacccagatgggccggaagctgcctttgaagccaacgaatgccatttgctctgaaaagcaatgatgagtctcctgagcaaaagccctatgagaggacggctgccccaccccgttccatggctccccatcgccagccccccacgcccaccaggtaccgcctagccacactgcactgtggccccttgggaagagctctgtgctcagctactgatggtgcctgacatgtgtttgtatggggcaggcagggtctcacctgagcctcactgccacctaggcagggtgatggctttgttgtagacaggggagccatgcacagcaggaaatggggcaaactgtaagggaggagacctcctaggaacctgcctacctttgagctgcccctaggacaaccagcaagtccctgcccctctctgaagcccagtgttcccatccatcaaatgatggcattgatctacaagatctccttccccactctatcactctgtggctctagaaagagttctgagaggtgaagaaatttgaccaagagtgtggagtaaatggtgcaccccagattagaactctaaacccctgaaacccacacagcactctccatcttgcagttcacagcttgagcatccgaggggcatgggaatccacgtctatactcagcccatcttggcaggcaacatgcatttatcaccaccgggaaagtgccattcaacttaggtcaccttacatacatcagcttttggcaaccgggatcttaatttaaaagacagaggctccaaaatgatttcaggactgggctggaaaggatacttctcttttccttatgtcctcctttggctggtttgaagggtttgcattgcttctgatttttctcattgccccatatgatgggtttctgattttgatgttttccatagtgaggatggtgtataactaagaagcccagctttgagttaggaagattaggatccaagtcctaaccttaagcaagtggcttggctgttaaattcttggtgtcctcatcttaaatggaaataatagtacctgctgcacaggttattaatgagtaagtgagataattataacatgttgtgcaaagtgcaaggctgaacattgaatagcaaccacaatgatcattatcattattgcccgtggagcttctctgccgcccatacagcctctctgaggactctccctgcacctagtttttgtgatgataatgggtgtcatgctgacatgtccctcctggatggcttcttccagcacagccagcaagcctgtgctaggcttcaccaccgaagctgcctggccttggacaagccatgtaggttctctgggctttagttttctggaacaaataagagttttgcaagctgcaaaggactgtacaaacgctaggcatcagctagaatgttgaagaagatgcaggacccctggccagtctgaatagcaggaattgggtaggagggtgagactaagccacttttcttatgatacttttgttgaataaagggccactttccaagc

SEQ ID NO: 152999 - DNA, 3978 bp, Homo sapiens
  Payload ID: 10097
  Gene Symbol: MESDC2
  Gene Name: mesoderm development candidate 2
  Uniprot ID: Q14696
  ENST ID: ENST00000619987
  CDS Start-End: 38-742
ggtaagcgcgtctagggcgctgcgcggcgcagcgaaaatggcggcttccaggtgggcgcgcaaggccgtggtcctgctttgtgcctctgacctgctgctgctgctgctactgctaccaccgcctgggtcctgcgcggccgaaggctcgcccgggacgcccgacgagtctaccccacctccccggaagaagaagaaggatattcgcgattacaatgatgcagacatggcgcgtcttctggagcaatgggagaaagatgatgacattgaagaaggagatcttccagagcacaagagaccttcagcacctgtcgacttctcaaagatagacccaagcaagcctgaaagcatattgaaaatgacgaaaaaagggaagactctcatgatgtttgtcactgtatcaggaagccctactgagaaggagacagaggaaattacgagcctctggcagggcagccttttcaatgccaactatgacgtccagaggttcattgtgggatcagaccgtgctatcttcatgcttcgcgatgggagctacgcctgggagatcaaggactttttggtcggtcaagacaggtgtgctgatgtaactctggagggccaggtgtaccccggcaaaggaggaggaagcaaagagaaaaataaaacaaagcaagacaagggcaaaaaaaagaaggaaggagatctgaaatctcggtcttccaaggaagaaaatcgagctgggaataaaagagaagacctgtgatggggcagcagtgacgcgctgtggggggacaggtggacgtggagagctctttgcccagctcctggggtgggagtggtctcaggcaactgcacaccggatgacattctagtgtcttctagaaagggtctgccacatgaccagtttgtggtcaaagaattactgcttaataggcttcaagtaagaagacagatgttttctaattaatactggacactgacaaattcatgtttactataaaatctccttacatggaaatgtgactgtgttgctttttcccatttacacttgacccctgagccccttccagtgctgcctgaggtgccctctacctgtgcctgcctctcgtctgccagtttgatttggacctgtttttcccacctcagcccccatgctcttgtcaaacgtgtttggcctccagccaaacagggcctgggaggaaaagagagtcctgcttctgcctggcttccccatcggggaggggagttgaagtgacagcctcctgacagcttagaaatgtggaggacgcagcaagttctggacatggccagccatatgaatgatatcttctctttctttgaaccatctccacctgctcttatggacaccccgccttggggcaaggcaagggatgggcacaacttggaagattttggctttgtgatcctcagtgtccagtgtcacccagatgggccggaagctgcctttgaagccaacgaatgccatttgctctgaaaagcaatgatgagtctcctgagcaaaagccctatgagaggacggctgccccaccccgttccatggctccccatcgccagccccccacgcccaccaggtaccgcctagccacactgcactgtggccccttgggaagagctctgtgctcagctactgatggtgcctgacatgtgtttgtatggggcaggcagggtctcacctgagcctcactgccacctaggcagggtgatggctttgttgtagacaggggagccatgcacagcaggaaatggggcaaactgtaagggaggagacctcctaggaacctgcctacctttgagctgcccctaggacaaccagcaagtccctgcccctctctgaagcccagtgttcccatccatcaaatgatggcattgatctacaagatctccttccccactctatcactctgtggctctagaaagagttctgagaggtgaagaaatttgaccaagagtgtggagtaaatggtgcaccccagattagaactctaaacccctgaaacccacacagcactctccatcttgcagttcacagcttgagcatccgaggggcatgggaatccacgtctatactcagcccatcttggcaggcaacatgcatttatcaccaccgggaaagtgccattcaacttaggtcaccttacatacatcagcttttggcaaccgggatcttaatttaaaagacagaggctccaaaatgatttcaggactgggctggaaaggatacttctcttttccttatgtcctcctttggctggtttgaagggtttgcattgcttctgatttttctcattgccccatatgatgggtttctgattttgatgttttccatagtgaggatggtgtataactaagaagcccagctttgagttaggaagattaggatccaagtcctaaccttaagcaagtggcttggctgttaaattcttggtgtcctcatcttaaatggaaataatagtacctgctgcacaggttattaatgagtaagtgagataattataacatgttgtgcaaagtgcaaggctgaacattgaatagcaaccacaatgatcattatcattattgcccgtggagcttctctgccgcccatacagcctctctgaggactctccctgcacctagtttttgtgatgataatgggtgtcatgctgacatgtccctcctggatggcttcttccagcacagccagcaagcctgtgctaggcttcaccaccgaagctgcctggccttggacaagccatgtaggttctctgggctttagttttctggaacaaataagagttttgcaagctgcaaaggactgtacaaacgctaggcatcagctagaatgttgaagaagatgcaggacccctggccagtctgaatagcaggaattgggtaggagggtgagactaagccacttttcttatgatacttttgttgaataaagggccactttccaagcaaatgagtcaacaaatatagcaattttctttcagtggctggtggcaagttataataaatttgctgcagtgcaggggtggtaaacaggtggcatcttgcccatccattccagtagaccactagttgtgtgggggattcttaggttgtacccacgtttagtacaaagcatgttctcaactcagcaaaagatgacagcaccctccatgccaggcatttgccttctctggttttggggtcagtttaaaccccagttcaaacccttacctttcaacttgagacccctgtctgccccaagcttttccagcactctggtccatgggcctctggagacgtatcttccctttgatgccataagcactatggaactgtgtgagaagaaaccaattagaccagagggagagagcaaactggagaaagtgggcatggggagggatgttggtttgtgcatggtgggactggagttagcagtgcccagaggcctgtccagggattcgggaaagggcagcctctcctgtgttctgagctgacgggctctttccatgtggtgacgaacatcctgagctccctcccacacatctggccacagttggtgcccacagccttctccaagcctggacttggctcaccgcgtttacatgtctctctccaaacagaggagaggatgtaagcagagcgtaccatgccagggctcggcacacagtaggacttcgatatgtatctcttcccttgaatgttctcaaccctggttaggtaagaccagatagaaatgtggtgatggaggaaggaaggagaaagggaagagaaagagaggaggtgcgggaaggcggaggggagcatctgtcaaatcataaaaccatccaggagctcctgaaggttctagatcctgaaggttctagagaccagctccatttggcatcccctgggatttcattagaaccacagaattcctccattgcagacttcctgaatcagaatctgcatttttacaagatctgcaggtgatcatgtatacattaaagctcgagaagccccatgctagaa

SEQ ID NO: 153000 - DNA, 6884 bp, Homo sapiens
  Payload ID: 10098
  Gene Symbol: MIER2
  Gene Name: mesoderm induction early response 1, family member 2
  Uniprot ID: Q8N344
  ENST ID: ENST00000264819
  CDS Start-End: 1-1638
atggcggaggcctcctcgctggggaggcagagtcctcgcgtggtctcctgcctcgagcacagcctgtgcccaggggagccgggcttgcagacaacagcagtggtgtccatgggctctggagaccatcagttcaacctcgcagagatcctgtcacagaactacagtgttaggggggagtgcgaggaggcctcgaggtgcccagacaagcccaaggaggagctggagaaggacttcatctcccagagcaacgacatgccctttgatgagctgcttgcgctctatggctacgaggcgtcagaccccatttcagaccgggagagtgagggtggtgacgtggccccgaacctcccagacatgaccctggacaaagaacaaatagcgaaggatttgctttcaggggaagaagaggaagagacgcaatcatctgctgacgacctcaccccgtccgtgacctcccacgaggcctccgacctcttccctaaccggagtggatctcgtttcctggctgatgaagacagagagcctggctcttctgcctcctccgacaccgaggaggactctcttcctgccaacaaatgtaagaaggagatcatggtgggacctcagttccaagctgacctcagcaacctgcacttgaaccggcactgtgagaagatctacgagaacgaagaccagctgctctgggaccccagcgtcctccctgagagggaggtggaggagttcctgtacagggcggtgaagcggcgttggcacgagatggccgggcctcagctcccagagggagaagccgtgaaagacagtgagcaggcgctgtacgagttggtgaaatgcaacttcaatgtggaggaggccctgcgaaggctgcggttcaacgtgaaggtgatccgagatgggctctgtgcttggagtgaagaggagtgcaggaactttgagcacggcttccgtgtgcatggaaagaactttcacctgatccaggccaacaaggtgcgcacacggtcagtgggcgagtgtgtcgagtactactacctgtggaagaagtcggagcgctacgactacttcgcccagcagacgcggctgggccggaggaagtacgtcccgtccggaaccacggacgcagaccaggacctggatggcagcgaccccgatggccccggccgtccgcgcccggagcaagacaccctgactgggatgcgcacagatccactgagcgtggatggcacggccggtggtctcgatgagcccggagtggcctctgatggactcccgtcctcggagccagggccgtgttccttccagcagctggatgagtcccccgctgtacccctgtcccatcggcccccagccctggccgacccagcctcataccagccagctgtcactgctccggagccagacgccagcccaaggctggccgtggacttcgccctgcccaaggagctgcccctcatctccagccatgtggacctcagcggggatccggaggagactgtggccccagcacaggtggctttgtcggtcaccgagtttggactcatcggcattggggacgtgaaccccttcctggccgcccaccccacgtgcccggcccccgggctacactcggagcccctgtcacactgtaacgtgatgacctgctgactcctggccgcgggcggcgtatgcggcccagactggacttagcgctgccgctgggcccgcctctgtcagtcttcctgaccccttccccaccccccgggccttggggtagcacctccttctgcttcagaacacgtcaggactggggtgaggtggctgggccgtgagcccttgcccctgtccacacagaatggacccacggccccacccagcgccgtcagcgcccggcactgccacccgggtccgggccgctgcctgcacgtgggatccgtcgggcagccggggacagaagagaccccgccgttgggacgcagggcagagccggccacctagtcccttccagccagcagaggcgagggaaggcgtcactgccccggcggggagacgggcaggacgccctgccccgcaccagcagcctccgccggggcgccctcagctccctgcttggctctgtctctccacacccggcagggccgcgggctgccccagccctgggggtcgtgggcagctgctactcagtgccaaccccgtggggcacagagccatatacctcgctgtccggcccccaccccagcctcgccttcccaccccatcgtctccacttcaggaaaagccgcactttacacccccacctgcctcttccccctccatccctgctccccgatcctgagcggttggggtggggtccctcagcaaccccaggcgtgggtttgaggagacaggtgatttacatcccctttgctgtcctcccccggtaccaaggcagggagcctccggaggagccggccctgctggccacgcaggggccagactccagcctgtttccccagccctgcaggtcttccttctgtgggaagcttcctagcaagatggcttggagtcctggtccccctcctccctggccctctcgttcgtttctgtttctgtttacacgttggagtggggtcctccgtgggcggcggcgcgccctgccccgggtgtcgtccggcctcttgtgctcgagcccctttccgagttggactcgaccatccctcaccccaccaaggaccacactgtgaagtgataactgccttgaacccccctttgctgttttatttattaaacttgatttgaagcccggggtgccttgtggtggatcgggtgggggctggggcggcaggtgtcctcgtcatctcacttgggggcctgcatgtctcttggagggtccaggataagtcgtgagcaacacgggcgagggggtgcaccgggggcatgacgtggtgggctacgtattgttcacgtcagtaagggaattgtggccacgatgacgggatgtgaggagggcccacgtctgggtagaggtggtcggggcagcctcctagaagtgatatttaagctgaaacatgaaggagaatgggcctcctttgctgaaagtttgccgagaggcctggcaggcgtgacagcagatgcagaggacagaggcctgggtctccaggagaagctgagggcacagagggcagaggttgggcggggtggggacagtaggtcatgaggccaagttttgttcttggtgtggaagccactttaggtctgcattgtttttttgttttgttttgctttttttttttagacagggtctcacactgtcgccaggctggagtgcagtggtgcgatctcggctcactgcaacctccgcctcctgagttcacgcgattctcctgcctcagcctcccgagtagctgggattacaggcgcccgccacctgggattacgggcgcccgccaccatgcccagctactttttatattttttgtagagatggggtttctccttattgcccaggatggtctctatctcttgaccttgtgttctcccgcctcggcctcccaaagtgctgggattacaggcgtgagacatcgcgcccggctgaggtctgcattgttaatagcgccctgcagggacggtgcaggctggttgggttgcatattgtccacatcagtgagggaaatgtgggcatgcatggtgatgggatatggggagggccggcccccagctgggaggtgactgtggcttggcctcagggactattggtgaaggaccaggaccacttgcatgatgggtgtgggagagtcaggggtcttgctggtgagcctgtgccaggagctgtgagaaccagggccagccactcggcaacctgggtgtttggggatgggcatagaggagttttcattggagcgccgcagcctgctgacgttttcttcagatgtgcaaggtcttctgtcttccagcttgccctgcctccagcaggaaatcttcagtcctctcttggtttttttcctccaactgctttgaagatttttcagtaccactggttttgagcagtctgatgaggatgtgctttggtgtattgaggtgtctgatgagggtgtgctttggtgtattgaggagtctgatgagaatgtgctttggtgtattgaggtgtctgatgaggatgtgctttggtgtattgagtctgatgaggatgtgctttggtgtattgagtctgatgaggatgtgctttggtgtattgaggtgtctgatgagaatgtgctttggtgtattgagtctgatgaggatgtgctttggtgtattgaggtgactgatgagaatgtgctttggtgtattgaggtgtctgatgagggtgtgctttggtgtattgaggtgtctgatgaggatgtgctttggtgtattgaggagtctgatgaggatgtgctttggtgtattgagtccgatgaggatgtgctttggtgtattgaggtgtctgatgagaatgtgctttggtgtattgagtctgatgagaatgtgctttggtgtattgagtctgatgaggatgtgctttggtgtattgaggtgtctgatgagaatgtgctttggtgtattgagtctgatgaggatgtgctttggtgtattgaggagtctgatgaggatgtgctttggtgtattgagtctgatgaggatgtgctttggtgtattgaggtgtctgatgagaatgtgctttggtgtattgagtctgatgagaatgtgctttggtgtattgagtctgatgaggatgtgctttggtgtattgaggtgtctgatgagaatgtgctttggtgtattgaggagtctgatgaggatgtgctttggtgtattgatgaggatgtgctttggtgtattgaggtgtctgatgaggatgtgctttggtgtattgagtctgatgagaatgtgctttggtgtattgagtctgatgagaatgtgctttggtgtattgagtctgatgaggatgtgctttggtgtattgaggtgtctgatgagaatgtgctttggtgtattgaggtgtctgatgagggtgtgctttggtgtattgaggagtctgatgaggatgtgctttggtgtattgagtctgatgaggatgtgctttggtgtattgaggtgtctgatgaggatgtgctttggtgtattgagtctgatgaggatgtgctttggtgtattgagtctgaagaggatgtgctgtggtgtattgaggtgtctgatgaggatgtactttggtgtattgaggtgtctgatgaggatgtgctttggtgtattgaggagtctgatgaggatgtgctttggtgtattgagtctgatgaggatgtgctttggtgtattgaggtgtctgatgagaatgtgctttggtgtattgaggagtctgatgaggatgtgctttggtgtattgaggagtctgatgaggatgtgctttggtgtattgaggagtctgatgaggatgtgctttggtgtattgagtctgatgaggatgtgctttggtgtattgaggagtctgatgaggatgtgctttggtgtattgagtctgatgaggatgtgctttggtgtattgaggtgtctgatgagaatgtgctttggtgtattgaggtgtctgatgagggtgtgctttggtgtattgagtctgatgaggatgtgctgtggtgtattgaggtgtctgatgaggatgtgctttggtgtactgaggtgtctgatgaggatgtactttggtgtattgaggtgtctgatgaggatgtgctttggtgtattgaggagtctgatgaggatgtgctttggtgtattgaggagtctgatgaggatgtgctttggtgtattgagtctgatgaggatgtgctttggtgtattgagtctgatgaggatgtgctttggtgtattgacgaggatgtgctttggtgtattgaggtgtctgatgaggatgtgctttggtgtacacgtacagtatgtagcctttgagattggcttctttcatattcactgaaggcttcgccatgtcttttcgtggcttgatggctcatttctttttcgcgctggatgatactccatcctgggcgtgtgctgcagcttgtttatctacgtacctattgaaggacatcttagcttccaagcttcggcagttacgcgtaaagacatcttagcagcttccaagctttggcagttacacataaagacatcttagcagcttccaagcttcagcagttactcataaagctgctgtaaacgcccatgtgcaggtttttgttttgacacaacttttcagcccatttggatgaataaagaaacctgattgccggaccgtgtgatgagaccgtgtttaatgagaagctgccatttcactcccaccagcaatgagtaagcgctcctgaggcccatgtcctccccagtgtttggtggtgtcagtattttgtgtttggccattcgaataggtgtgtagtgggatcttgttttccatagcctttgaagatgtgtacattttcgtacctttctggcgctcttaagttcttcattcagactccgtgttgccaagagggataattttctttgagtctgaagtgccgtatttaatatatattgccttgtagttcctctgcagtgacattctgcctaggcttagctcttacgtggatcaaaaggccctaattcctcctcctcttttgaagtgcatttttacaggatatacggttctaagtggactgtgtttttctctgcgcatgttaaggtggttctattcatgctgttttctactgttctgatgaggaattttctcattctgttttccttactgtgaaatctcttacttctgactatatacatgattttcttttatttttggactttggccgtttgtgatgcacctgggtctagctttctaaactgagctacttcgacctgagggtgggtgcattttaacagattttgaagtcttgactgtt

SEQ ID NO: 153001 - DNA, 1748 bp, Homo sapiens
  Payload ID: 10098
  Gene Symbol: MIER2
  Gene Name: mesoderm induction early response 1, family member 2
  ENST ID: ENST00000619835
  CDS Start-End: 1-631
gcgcacacggtcagtgggcgagtgtgtcgagtactactacctgtggaagaagtcggagcgctacgactacttcgcccagcagacgcggctgggccggaggaaggacgcagaccaggacctggatggcagcgaccccgatggccccggccgtccgcgcccggagcaagacaccctgactgggatgcgcacagatccactgagcgtggatggcacggccggtggtctcgatgagcccggagtggcctctgatggactcccgtcctcggagccagggccgtgttccttccagcagctggatgagtcccccgctgtacccctgtcccatcggcccccagccctggccgacccagcctcataccagccagctgtcactgctccggagccagacgccagcccaaggctggccgtggacttcgccctgcccaaggagctgcccctcatctccagccatgtggacctcagcggggatccggaggagactgtggccccagcacaggtggctttgtcggtcaccgagtttggactcatcggcattggggacgtgaaccccttcctggccgcccaccccacgtgcccggcccccgggctacactcggagcccctgtcacactgtaacgtgatgacctgctgactcctggccgcgggcggcgtatgcggcccagactggacttagcgctgccgctgggcccgcctctgtcagtcttcctgaccccttccccaccccccgggccttggggtagcacctccttctgcttcagaacacgtcaggactggggtgaggtggctgggccgtgagcccttgcccctgtccacacagaatggacccacggccccacccagcgccgtcagcgcccggcactgccacccgggtccgggccgctgcctgcacgtgggatccgtcgggcagccggggacagaagagaccccgccgttgggacgcagggcagagccggccacctagtcccttccagccagcagaggcgagggaaggcgtcactgccccggcggggagacgggcaggacgccctgccccgcaccagcagcctccgccggggcgccctcagctccctgcttggctctgtctctccacacccggcagggccgcgggctgccccagccctgggggtcgtgggcagctgctactcagtgccaaccccgtggggcacagagccatatacctcgctgtccggcccccaccccagcctcgccttcccaccccatcgtctccacttcaggaaaagccgcactttacacccccacctgcctcttccccctccatccctgctccccgatcctgagcggttggggtggggtccctcagcaaccccaggcgtgggtttgaggagacaggtgatttacatcccctttgctgtcctcccccggtaccaaggcagggagcctccggaggagccggccctgctggccacgcaggggccagactccagcctgtttccccagccctgcaggtcttccttctgtgggaagcttcctagcaagatggcttggagtcctggtccccctcctccctggccctctcgttcgtttctgtttctgtttacacgttggagtggggtcctccgtgggcggcggcgcgccctgccccgggtgtcgtccggcctcttgtgctcgagcccctttccgagttggactcgaccatccctcaccccaccaaggaccacactgtgaagtgataactgccttgaacccccctttgctgttttatttattaaacttgatttgaagcccgg

SEQ ID NO: 153002 - DNA, 601 bp, Homo sapiens
  Payload ID: 10099
  Gene Symbol: MIER3
  Gene Name: mesoderm induction early response 1, family member 3
  ENST ID: ENST00000336942
  CDS Start-End: 166-601
gccgggcggaccgcggcggtggcggcggcggctgcgattggctcaggcgccccatccggggactgggctcggcgctgctcgttcgccctaaaggcttcttttggaagttcgagcccagttgggtctttgtcttctgaggatcatgattttgaccccactgctgagatgttggtccatgactatgatgatgaaagaactcttgaagaagaggaaatgatggatgagggtaaaaacttcagttcagaaattgaagacttagaaaaggaaggaaccatgcctctagaagatttactggcattctatggctatgaacctacaattccagcagttgcaaattccagtgcaaatagttccccaagtgaactggcagatgaactaccagacatgacactagacaaagaggaaatagcaaaagacctgttgtcaggtgatgacgaggaaactcagtcttctgcggatgatctgacgccatctgtgacttcccatgaaacttctgatttcttccctaggcctttacgatcaaatactgcatgtgatggtgataaggaatcagaggttgaagatgttgaaacagacagtggtaattcacctgaagatttga

SEQ ID NO: 153003 - DNA, 5188 bp, Homo sapiens
  Payload ID: 10099
  Gene Symbol: MIER3
  Gene Name: mesoderm induction early response 1, family member 3
  Uniprot ID: Q7Z3K6
  ENST ID: ENST00000381199
  CDS Start-End: 12-1664
aaggtaccaatatggcggaggcttcttttggaagttcgagcccagttgggtctttgtcttctgaggatcatgattttgaccccactgctgagatgttggtccatgactatgatgatgaaagaactcttgaagaagaggaaatgatggatgagggtaaaaacttcagttcagaaattgaagacttagaaaaggaaggaaccatgcctctagaagatttactggcattctatggctatgaacctacaattccagcagttgcaaattccagtgcaaatagttccccaagtgaactggcagatgaactaccagacatgacactagacaaagaggaaatagcaaaagacctgttgtcaggtgatgacgaggaaactcagtcttctgcggatgatctgacgccatctgtgacttcccatgaaacttctgatttcttccctaggcctttacgatcaaatactgcatgtgatggtgataaggaatcagaggttgaagatgttgaaacagacagtggtaattcacctgaagatttgaggaaggaaataatgattggtttacaatatcaggcagagattcccccttatcttggagagtacgatggtaatgagaaagtatatgaaaacgaagaccagttactttggtgtcctgatgtggttttggagagcaaagttaaggaataccttgttgagacttcattaaggactggcagtgaaaaaataatggataggatttctgcaggaacacacacaagggacaatgaacaggcattatatgaacttctcaagtgtaaccacaatataaaggaagcaatcgaaagatactgctgcaatggaaaggcctctcaagaaggaatgactgcatggacggaagaagaatgccgaagctttgaacatgcactcatgctttttggaaaagattttcatcttatacagaagaataaggtgagaactaggacagttgctgagtgtgtagcattctactatatgtggaagaaatctgaacgttatgattactttgctcaacagacaagatttgggaaaaaaagatataaccatcaccctggagttacggactatatggatcgtttagtagatgaaacagaagctttgggtgggacggtaaatgcttcagccttaacttctaaccggcctgagcctattcctgatcaacagctaaacattctcaactccttcactgccagtgacttgacagctttgaccaacagtgtagcaaccgtctgcgaccccacagatgtgaattgtttggatgatagctttcctccactgggcaacacaccccgtggacaagttaatcatgtgcctgttgtaacagaagagttactcaccctgcccagcaatggggaaagtgattgttttaatttatttgagactggattttatcactcggagctaaaccctatgaacatgtgcagtgaagagtcagagagaccagcaaaaagattgaaaatgggcattgccgtccctgaatcctttatgaatgaagtttctgtaaataacctgggtgtggactttgaaaatcacacacatcacatcaccagtgccaaaatggctgtttctgtggctgactttggcagtctctctgccaacgagaccaatggtttcatcagtgcccatgctctgcatcagcacgcggccctacactctgagtgacctgagtgaggatcccggaactgcgtgtgcagcaccagtaaacttgaggggagctatcaggtttgcatagtctttcactggaagtttgaacctttctcactatgacatcagtgatgtcagtatgtatagaactatatcttgatttatcaagagtattttcatttttcaatccataaatgtggaaatgaactatgatcagcagagttgggaactaagattgaactctgtggtgcagctttaagctctgcttctctcttcctcatctcccaatacctcttccccactcccttctttttctattcttttgtgttccccactgccctcactcccaattttaaaacctgtagacagaggccaccagctcaaaaccagcacagatgttctgaactgaatggtgtggcctgtttttgtgtaaattccttttgccgtaatggatgcagtggaataacaatgtttacaggtaccgatcccgatccctgctcaatgtagcatttttttggttttattttcttaataaaagcaggggtaggtttctttaaactgcacaaacatgcaaggattttttaaaaatggaaacttctctcatgttattcaactagagcacttcagtttacaaaacagcaagtccatctttatggaagccagcacaaggaactgtgtgcaaataatgaagacgcttgcttggatcctgtttcaaaattctagaccagggctaccttacacagaattggtcatgttactgccaggagatttctgtgtaacttcatttattggctacagttttggcatttgaagatgtggtactcagatggggttttgtccaccattgtcaagattgtaatcttaaaaatcataccagtcattgataatttagtttatcctgaggcagtcgacttgcagaggcacagtctacaaagcctaggatgttgccactcaatggtttacattttgggacatcttttaagttgtttgtagcactgcagttcaaagtgttaatatttagagggacttctagattttatacctaatgcagtagaaccttgaagtatatttaagcttttttgttaagcttgaacagttggcaagaataatgtgagttcctatctgaaatagaatggtacattaccacttttaagttttaaaaattgatagatgttcagatgtatctcaaactcagttttatttttattccaaatattgtgaatgagaagccattgtcctaaactttggccatttttgtgctataaacatgcatttttaagttataaggtgaatcaaacaatatgtaatacagtattaggatgtaatctttgcttttgtagtactgttaaaatagagaattatgttgtttgcaccgtcttaattaaaattcttgatttttactagttgctttgcaaaaaacaaatgtttggctgcattgctaatatttgtaagtataagttgcttcaaggttgtgctgatgagtagataggatgtagtgatcttagtagtgattgaaagggagggtatttattatacaaactgtgaactgcaatgacatccttagttttggatgatgtgtattcttgtttttctttgcagcattttaatgaagattgctttgaagtgtttacgcagtagcacattagtataaaatttagtttagcacagtggacaaaaagtagttaaattaataacttaaaatcagtctctaatttatacatctgaagtatagcattcctgtatgcacacagtaaataatgggtagcctgggctctgtgttactttcttgtatttttatccaagttgtcagcttcttattgctgtgttgttgtgctaaactttgaaccttatttcttttattaaaaatcagtacactttctataatttagtaagatactggccataatcttccattgttataaccttaattttcactctgggtttacagtggctggtctgtataaataatttacacaaagatgactgaatgctaataccagttgcacttaaatgaacatgcccattctcagtagctgatgcagtaatatattcagtttatctatgcattgctggggtcttgatataagatggaaacagtgtttcttatctaaagttttgattatcagcaagttgaatggacactttagttatttaaataaagatttttgaccaaaatccagaaaatggtatgagagaaaaataaattccagctagtttaatagatttttaaatgtcaatctgattttagcctcttagagagtgctaactagctggtaatgtttacttttaattccttgttaaaatgaggcaataatttgcaagatttttgtatataagtgtaaattcttcatatctttttagatctaattcaatattttctgactacttctgccatgtataataccatttttgtgcatgcttgatgtgacattcataaattgtaccactatgactttatccatgtaaaatagctatttattgaattttcttttaaaagctggatttactgggttttttttttctctcagtttaaacatcttaacagagaatttgttactgtttattaaaagaattgcatttggaagcaagaaaacaaccggatttgcaatcatgtgaagaaacaataatgcctttattatcaagtgttaagcacaattcttataacaaactgtgataaattctttttgtttttttttcctttgccccattattttcttatgaacaaaccaaaaattcatggtgagcagttgcagtgttggctgatatatcttttatgtacagggaatttgaaaaggacagtggattcatttagaagtgtaactggtgctgtgattatagcaatacatttgttagttgtacttcatctttttcatgctagctttttaaatgtttagttttcctcttgtcatggtcagctgctgaatttacttgaaggatgtagaatactgtttaaaaaatactaaaatttgtacaattagatcaaagaattgtgcaatcatttcctttttaatttttaaaatgttgaggctcataaatatttgagaacatcagatctaatagagcatagtgatactatttaatttaaccaaagtctctagtgaatatttcaactttgaatgtaaactaacaaataaacctgaccaccaaggagattgtttgcccagagtttcaaagcacattgtctacaaatggaaattgaaataatttataaaatattgacgttactatgttttttaaaaagttcctaattttttcactaaatggaggaaactattagttttattgttaaatatggtagatattaatattcctcttagatgaccagtgattccaattgtcccagtttgaaataagtaccctgtgagtatgagataaattagtgacaatcagaacaagtttcagtatcagatgttcaagaggaagttgctattgcattgattttaatatttgtacataaacactgatttttttgagcattattttgtatttgttgtactttaatacctggtgtacagttccagaaataaaaatctgggaatctt

SEQ ID NO: 153004 - DNA, 5198 bp, Homo sapiens
  Payload ID: 10099
  Gene Symbol: MIER3
  Gene Name: mesoderm induction early response 1, family member 3
  Uniprot ID: Q7Z3K6
  ENST ID: ENST00000381213
  CDS Start-End: 24-1673
tcgttcgccctaaaggtaccaatatggcggaggcttcttttggaagttcgagcccagttgggtctttgtcttctgaggatcatgattttgaccccactgctgagatgttggtccatgactatgatgatgaaagaactcttgaagaagaggaaatgatggatgagggtaaaaacttcagttcagaaattgaagacttagaaaaggaaggaaccatgcctctagaagatttactggcattctatggctatgaacctacaattccagcagttgcaaattccagtgcaaatagttccccaagtgaactggcagatgaactaccagacatgacactagacaaagaggaaatagcaaaagacctgttgtcaggtgatgacgaggaaactcagtcttctgcggatgatctgacgccatctgtgacttcccatgaaacttctgatttcttccctaggcctttacgatcaaatactgcatgtgatggtgataaggaatcagaggttgaagatgttgaaacagacagtggtaattcacctgaagatttgaggaaggaaataatgattggtttacaatatcaggcagagattcccccttatcttggagagtacgatggtaatgagaaagtatatgaaaacgaagaccagttactttggtgtcctgatgtggttttggagagcaaagttaaggaataccttgttgagacttcattaaggactggcagtgaaaaaataatggataggatttctgcaggaacacacacaagggacaatgaacaggcattatatgaacttctcaagtgtaaccacaatataaaggaagcaatcgaaagatactgctgcaatggaaaggcctctcaaggaatgactgcatggacggaagaagaatgccgaagctttgaacatgcactcatgctttttggaaaagattttcatcttatacagaagaataaggtgagaactaggacagttgctgagtgtgtagcattctactatatgtggaagaaatctgaacgttatgattactttgctcaacagacaagatttgggaaaaaaagatataaccatcaccctggagttacggactatatggatcgtttagtagatgaaacagaagctttgggtgggacggtaaatgcttcagccttaacttctaaccggcctgagcctattcctgatcaacagctaaacattctcaactccttcactgccagtgacttgacagctttgaccaacagtgtagcaaccgtctgcgaccccacagatgtgaattgtttggatgatagctttcctccactgggcaacacaccccgtggacaagttaatcatgtgcctgttgtaacagaagagttactcaccctgcccagcaatggggaaagtgattgttttaatttatttgagactggattttatcactcggagctaaaccctatgaacatgtgcagtgaagagtcagagagaccagcaaaaagattgaaaatgggcattgccgtccctgaatcctttatgaatgaagtttctgtaaataacctgggtgtggactttgaaaatcacacacatcacatcaccagtgccaaaatggctgtttctgtggctgactttggcagtctctctgccaacgagaccaatggtttcatcagtgcccatgctctgcatcagcacgcggccctacactctgagtgacctgagtgaggatcccggaactgcgtgtgcagcaccagtaaacttgaggggagctatcaggtttgcatagtctttcactggaagtttgaacctttctcactatgacatcagtgatgtcagtatgtatagaactatatcttgatttatcaagagtattttcatttttcaatccataaatgtggaaatgaactatgatcagcagagttgggaactaagattgaactctgtggtgcagctttaagctctgcttctctcttcctcatctcccaatacctcttccccactcccttctttttctattcttttgtgttccccactgccctcactcccaattttaaaacctgtagacagaggccaccagctcaaaaccagcacagatgttctgaactgaatggtgtggcctgtttttgtgtaaattccttttgccgtaatggatgcagtggaataacaatgtttacaggtaccgatcccgatccctgctcaatgtagcatttttttggttttattttcttaataaaagcaggggtaggtttctttaaactgcacaaacatgcaaggattttttaaaaatggaaacttctctcatgttattcaactagagcacttcagtttacaaaacagcaagtccatctttatggaagccagcacaaggaactgtgtgcaaataatgaagacgcttgcttggatcctgtttcaaaattctagaccagggctaccttacacagaattggtcatgttactgccaggagatttctgtgtaacttcatttattggctacagttttggcatttgaagatgtggtactcagatggggttttgtccaccattgtcaagattgtaatcttaaaaatcataccagtcattgataatttagtttatcctgaggcagtcgacttgcagaggcacagtctacaaagcctaggatgttgccactcaatggtttacattttgggacatcttttaagttgtttgtagcactgcagttcaaagtgttaatatttagagggacttctagattttatacctaatgcagtagaaccttgaagtatatttaagcttttttgttaagcttgaacagttggcaagaataatgtgagttcctatctgaaatagaatggtacattaccacttttaagttttaaaaattgatagatgttcagatgtatctcaaactcagttttatttttattccaaatattgtgaatgagaagccattgtcctaaactttggccatttttgtgctataaacatgcatttttaagttataaggtgaatcaaacaatatgtaatacagtattaggatgtaatctttgcttttgtagtactgttaaaatagagaattatgttgtttgcaccgtcttaattaaaattcttgatttttactagttgctttgcaaaaaacaaatgtttggctgcattgctaatatttgtaagtataagttgcttcaaggttgtgctgatgagtagataggatgtagtgatcttagtagtgattgaaagggagggtatttattatacaaactgtgaactgcaatgacatccttagttttggatgatgtgtattcttgtttttctttgcagcattttaatgaagattgctttgaagtgtttacgcagtagcacattagtataaaatttagtttagcacagtggacaaaaagtagttaaattaataacttaaaatcagtctctaatttatacatctgaagtatagcattcctgtatgcacacagtaaataatgggtagcctgggctctgtgttactttcttgtatttttatccaagttgtcagcttcttattgctgtgttgttgtgctaaactttgaaccttatttcttttattaaaaatcagtacactttctataatttagtaagatactggccataatcttccattgttataaccttaattttcactctgggtttacagtggctggtctgtataaataatttacacaaagatgactgaatgctaataccagttgcacttaaatgaacatgcccattctcagtagctgatgcagtaatatattcagtttatctatgcattgctggggtcttgatataagatggaaacagtgtttcttatctaaagttttgattatcagcaagttgaatggacactttagttatttaaataaagatttttgaccaaaatccagaaaatggtatgagagaaaaataaattccagctagtttaatagatttttaaatgtcaatctgattttagcctcttagagagtgctaactagctggtaatgtttacttttaattccttgttaaaatgaggcaataatttgcaagatttttgtatataagtgtaaattcttcatatctttttagatctaattcaatattttctgactacttctgccatgtataataccatttttgtgcatgcttgatgtgacattcataaattgtaccactatgactttatccatgtaaaatagctatttattgaattttcttttaaaagctggatttactgggttttttttttctctcagtttaaacatcttaacagagaatttgttactgtttattaaaagaattgcatttggaagcaagaaaacaaccggatttgcaatcatgtgaagaaacaataatgcctttattatcaagtgttaagcacaattcttataacaaactgtgataaattctttttgtttttttttcctttgccccattattttcttatgaacaaaccaaaaattcatggtgagcagttgcagtgttggctgatatatcttttatgtacagggaatttgaaaaggacagtggattcatttagaagtgtaactggtgctgtgattatagcaatacatttgttagttgtacttcatctttttcatgctagctttttaaatgtttagttttcctcttgtcatggtcagctgctgaatttacttgaaggatgtagaatactgtttaaaaaatactaaaatttgtacaattagatcaaagaattgtgcaatcatttcctttttaatttttaaaatgttgaggctcataaatatttgagaacatcagatctaatagagcatagtgatactatttaatttaaccaaagtctctagtgaatatttcaactttgaatgtaaactaacaaataaacctgaccaccaaggagattgtttgcccagagtttcaaagcacattgtctacaaatggaaattgaaataatttataaaatattgacgttactatgttttttaaaaagttcctaattttttcactaaatggaggaaactattagttttattgttaaatatggtagatattaatattcctcttagatgaccagtgattccaattgtcccagtttgaaataagtaccctgtgagtatgagataaattagtgacaatcagaacaagtttcagtatcagatgttcaagaggaagttgctattgcattgattttaatatttgtacataaacactgatttttttgagcattattttgtatttgttgtactttaatacctggtgtacagttccagaaataaaaatctgggaatcttt

SEQ ID NO: 153005 - DNA, 5210 bp, Homo sapiens
  Payload ID: 10099
  Gene Symbol: MIER3
  Gene Name: mesoderm induction early response 1, family member 3
  Uniprot ID: Q7Z3K6
  ENST ID: ENST00000381226
  CDS Start-End: 17-1684
ccctaaaggtaccaatatggcggaggcttcttttggaagttcgagcccagtttgttttattccagttgggtctttgtcttctgaggatcatgattttgaccccactgctgagatgttggtccatgactatgatgatgaaagaactcttgaagaagaggaaatgatggatgagggtaaaaacttcagttcagaaattgaagacttagaaaaggaaggaaccatgcctctagaagatttactggcattctatggctatgaacctacaattccagcagttgcaaattccagtgcaaatagttccccaagtgaactggcagatgaactaccagacatgacactagacaaagaggaaatagcaaaagacctgttgtcaggtgatgacgaggaaactcagtcttctgcggatgatctgacgccatctgtgacttcccatgaaacttctgatttcttccctaggcctttacgatcaaatactgcatgtgatggtgataaggaatcagaggttgaagatgttgaaacagacagtggtaattcacctgaagatttgaggaaggaaataatgattggtttacaatatcaggcagagattcccccttatcttggagagtacgatggtaatgagaaagtatatgaaaacgaagaccagttactttggtgtcctgatgtggttttggagagcaaagttaaggaataccttgttgagacttcattaaggactggcagtgaaaaaataatggataggatttctgcaggaacacacacaagggacaatgaacaggcattatatgaacttctcaagtgtaaccacaatataaaggaagcaatcgaaagatactgctgcaatggaaaggcctctcaagaaggaatgactgcatggacggaagaagaatgccgaagctttgaacatgcactcatgctttttggaaaagattttcatcttatacagaagaataaggtgagaactaggacagttgctgagtgtgtagcattctactatatgtggaagaaatctgaacgttatgattactttgctcaacagacaagatttgggaaaaaaagatataaccatcaccctggagttacggactatatggatcgtttagtagatgaaacagaagctttgggtgggacggtaaatgcttcagccttaacttctaaccggcctgagcctattcctgatcaacagctaaacattctcaactccttcactgccagtgacttgacagctttgaccaacagtgtagcaaccgtctgcgaccccacagatgtgaattgtttggatgatagctttcctccactgggcaacacaccccgtggacaagttaatcatgtgcctgttgtaacagaagagttactcaccctgcccagcaatggggaaagtgattgttttaatttatttgagactggattttatcactcggagctaaaccctatgaacatgtgcagtgaagagtcagagagaccagcaaaaagattgaaaatgggcattgccgtccctgaatcctttatgaatgaagtttctgtaaataacctgggtgtggactttgaaaatcacacacatcacatcaccagtgccaaaatggctgtttctgtggctgactttggcagtctctctgccaacgagaccaatggtttcatcagtgcccatgctctgcatcagcacgcggccctacactctgagtgacctgagtgaggatcccggaactgcgtgtgcagcaccagtaaacttgaggggagctatcaggtttgcatagtctttcactggaagtttgaacctttctcactatgacatcagtgatgtcagtatgtatagaactatatcttgatttatcaagagtattttcatttttcaatccataaatgtggaaatgaactatgatcagcagagttgggaactaagattgaactctgtggtgcagctttaagctctgcttctctcttcctcatctcccaatacctcttccccactcccttctttttctattcttttgtgttccccactgccctcactcccaattttaaaacctgtagacagaggccaccagctcaaaaccagcacagatgttctgaactgaatggtgtggcctgtttttgtgtaaattccttttgccgtaatggatgcagtggaataacaatgtttacaggtaccgatcccgatccctgctcaatgtagcatttttttggttttattttcttaataaaagcaggggtaggtttctttaaactgcacaaacatgcaaggattttttaaaaatggaaacttctctcatgttattcaactagagcacttcagtttacaaaacagcaagtccatctttatggaagccagcacaaggaactgtgtgcaaataatgaagacgcttgcttggatcctgtttcaaaattctagaccagggctaccttacacagaattggtcatgttactgccaggagatttctgtgtaacttcatttattggctacagttttggcatttgaagatgtggtactcagatggggttttgtccaccattgtcaagattgtaatcttaaaaatcataccagtcattgataatttagtttatcctgaggcagtcgacttgcagaggcacagtctacaaagcctaggatgttgccactcaatggtttacattttgggacatcttttaagttgtttgtagcactgcagttcaaagtgttaatatttagagggacttctagattttatacctaatgcagtagaaccttgaagtatatttaagcttttttgttaagcttgaacagttggcaagaataatgtgagttcctatctgaaatagaatggtacattaccacttttaagttttaaaaattgatagatgttcagatgtatctcaaactcagttttatttttattccaaatattgtgaatgagaagccattgtcctaaactttggccatttttgtgctataaacatgcatttttaagttataaggtgaatcaaacaatatgtaatacagtattaggatgtaatctttgcttttgtagtactgttaaaatagagaattatgttgtttgcaccgtcttaattaaaattcttgatttttactagttgctttgcaaaaaacaaatgtttggctgcattgctaatatttgtaagtataagttgcttcaaggttgtgctgatgagtagataggatgtagtgatcttagtagtgattgaaagggagggtatttattatacaaactgtgaactgcaatgacatccttagttttggatgatgtgtattcttgtttttctttgcagcattttaatgaagattgctttgaagtgtttacgcagtagcacattagtataaaatttagtttagcacagtggacaaaaagtagttaaattaataacttaaaatcagtctctaatttatacatctgaagtatagcattcctgtatgcacacagtaaataatgggtagcctgggctctgtgttactttcttgtatttttatccaagttgtcagcttcttattgctgtgttgttgtgctaaactttgaaccttatttcttttattaaaaatcagtacactttctataatttagtaagatactggccataatcttccattgttataaccttaattttcactctgggtttacagtggctggtctgtataaataatttacacaaagatgactgaatgctaataccagttgcacttaaatgaacatgcccattctcagtagctgatgcagtaatatattcagtttatctatgcattgctggggtcttgatataagatggaaacagtgtttcttatctaaagttttgattatcagcaagttgaatggacactttagttatttaaataaagatttttgaccaaaatccagaaaatggtatgagagaaaaataaattccagctagtttaatagatttttaaatgtcaatctgattttagcctcttagagagtgctaactagctggtaatgtttacttttaattccttgttaaaatgaggcaataatttgcaagatttttgtatataagtgtaaattcttcatatctttttagatctaattcaatattttctgactacttctgccatgtataataccatttttgtgcatgcttgatgtgacattcataaattgtaccactatgactttatccatgtaaaatagctatttattgaattttcttttaaaagctggatttactgggttttttttttctctcagtttaaacatcttaacagagaatttgttactgtttattaaaagaattgcatttggaagcaagaaaacaaccggatttgcaatcatgtgaagaaacaataatgcctttattatcaagtgttaagcacaattcttataacaaactgtgataaattctttttgtttttttttcctttgccccattattttcttatgaacaaaccaaaaattcatggtgagcagttgcagtgttggctgatatatcttttatgtacagggaatttgaaaaggacagtggattcatttagaagtgtaactggtgctgtgattatagcaatacatttgttagttgtacttcatctttttcatgctagctttttaaatgtttagttttcctcttgtcatggtcagctgctgaatttacttgaaggatgtagaatactgtttaaaaaatactaaaatttgtacaattagatcaaagaattgtgcaatcatttcctttttaatttttaaaatgttgaggctcataaatatttgagaacatcagatctaatagagcatagtgatactatttaatttaaccaaagtctctagtgaatatttcaactttgaatgtaaactaacaaataaacctgaccaccaaggagattgtttgcccagagtttcaaagcacattgtctacaaatggaaattgaaataatttataaaatattgacgttactatgttttttaaaaagttcctaattttttcactaaatggaggaaactattagttttattgttaaatatggtagatattaatattcctcttagatgaccagtgattccaattgtcccagtttgaaataagtaccctgtgagtatgagataaattagtgacaatcagaacaagtttcagtatcagatgttcaagaggaagttgctattgcattgattttaatatttgtacataaacactgatttttttgagcattattttgtatttgttgtactttaatacctggtgtacagttccagaaataaaaatctgggaatctttt

SEQ ID NO: 153006 - DNA, 2152 bp, Homo sapiens
  Payload ID: 10099
  Gene Symbol: MIER3
  Gene Name: mesoderm induction early response 1, family member 3
  Uniprot ID: Q7Z3K6
  ENST ID: ENST00000409421
  CDS Start-End: 145-1608
aagactgaattccttgtgagcagggattcttcagtaaatttcatttgtatgtccagtagcaagtagctagtagccctcagccaagcacttagaactgagtaaatgatgggaaggtggaccatcagtgcataaaaggaaggaaccatgcctctagaagatttactggcattctatggctatgaacctacaattccagcagttgcaaattccagtgcaaatagttccccaagtgaactggcagatgaactaccagacatgacactagacaaagaggaaatagcaaaagacctgttgtcaggtgatgacgaggaaactcagtcttctgcggatgatctgacgccatctgtgacttcccatgaaacttctgatttcttccctaggcctttacgatcaaatactgcatgtgatggtgataaggaatcagaggttgaagatgttgaaacagacagtggtaattcacctgaagatttgaggaaggaaataatgattggtttacaatatcaggcagagattcccccttatcttggagagtacgatggtaatgagaaagtatatgaaaacgaagaccagttactttggtgtcctgatgtggttttggagagcaaagttaaggaataccttgttgagacttcattaaggactggcagtgaaaaaataatggataggatttctgcaggaacacacacaagggacaatgaacaggcattatatgaacttctcaagtgtaaccacaatataaaggaagcaatcgaaagatactgctgcaatggaaaggcctctcaagaaggaatgactgcatggacggaagaagaatgccgaagctttgaacatgcactcatgctttttggaaaagattttcatcttatacagaagaataaggtgagaactaggacagttgctgagtgtgtagcattctactatatgtggaagaaatctgaacgttatgattactttgctcaacagacaagatttgggaaaaaaagatataaccatcaccctggagttacggactatatggatcgtttagtagatgaaacagaagctttgggtgggacggtaaatgcttcagccttaacttctaaccggcctgagcctattcctgatcaacagctaaacattctcaactccttcactgccagtgacttgacagctttgaccaacagtgtagcaaccgtctgcgaccccacagatgtgaattgtttggatgatagctttcctccactgggcaacacaccccgtggacaagttaatcatgtgcctgttgtaacagaagagttactcaccctgcccagcaatggggaaagtgattgttttaatttatttgagactggattttatcactcggagctaaaccctatgaacatgtgcagtgaagagtcagagagaccagcaaaaagattgaaaatgggcattgccgtccctgaatcctttatgaatgaagtttctgtaaataacctgggtgtggactttgaaaatcacacacatcacatcaccagtgccaaaatggctgtttctgtggctgactttggcagtctctctgccaacgagaccaatggtttcatcagtgcccatgctctgcatcagcacgcggccctacactctgagtgacctgagtgaggatcccggaactgcgtgtgcagcaccagtaaacttgaggggagctatcaggtttgcatagtctttcactggaagtttgaacctttctcactatgacatcagtgatgtcagtatgtatagaactatatcttgatttatcaagagtattttcatttttcaatccataaatgtggaaatgaactatgatcagcagagttgggaactaagattgaactctgtggtgcagctttaagctctgcttctctcttcctcatctcccaatacctcttccccactcccttctttttctattcttttgtgttccccactgccctcactcccaattttaaaacctgtagacagaggccaccagctcaaaaccagcacagatgttctgaactgaatggtgtggcctgtttttgtgtaaattccttttgccgtaatggatgcagtggaataacaatgtttacaggtaccgatcccgatccctgctcaatgtagcatttttttggttttattttcttaataaaagcaggggtaggtttctttaaactgc

SEQ ID NO: 153007 - DNA, 304 bp, Homo sapiens
  Payload ID: 10099
  Gene Symbol: MIER3
  Gene Name: mesoderm induction early response 1, family member 3
  ENST ID: ENST00000451637
  CDS Start-End: 1-134
aacctacaattccagcagttgcaaattccagtgcaaatagttccccaagtgaactggcagatgaactaccagacatgacactagacaaaatctcaggcagggagaggaatccacatcttggaacctcttcctgaggaaatagcaaaagacctgttgtcaggtgatgacgaggaaactcagtcttctgcggatgatctgacgccatctgtgacttcccatgaaacttctgatttcttccctaggcctttacgatgctcctgctctcctggttttgaaaacttatcagtgctcaaaagcaaatact

SEQ ID NO: 153008 - DNA, 219 bp, Homo sapiens
  Payload ID: 10099
  Gene Symbol: MIER3
  Gene Name: mesoderm induction early response 1, family member 3
  ENST ID: ENST00000440000
  CDS Start-End: 148-219
tgacaagaatgacagcacaaccacagcaattaccaatttagagagttacactcaacgcagcaagatgttcacactaggagaagccaaacaagagtacagaagattcaagtctgccatctcatgctaaacctggagcatatcctttgaatggaatggagaacagaggcactggcatcccttgggtctttgtcttctgaggatcatgattttgaccccact

SEQ ID NO: 153009 - DNA, 5240 bp, Homo sapiens
  Payload ID: 10099
  Gene Symbol: MIER3
  Gene Name: mesoderm induction early response 1, family member 3
  Uniprot ID: Q7Z3K6
  ENST ID: ENST00000452157
  CDS Start-End: 21-380
ttcgccctaaaggtaccaatatggcggaggcttcttttggaagttcgagcccagttgggtctttgtcttctgaggatcatgattttgaccccactgctgagatgttggtccatgactatgatgatgaaagaactcttgaagaagaggaaatgatggatgagggtaaaaacttcagttcagaaattgaagacttagaaaaggaaggaaccatgcctctagaagatttactggcattctatggctatgaacctacaattccagcagttgcaaattccagtgcaaatagttccccaagtgaactggcagatgaactaccagacatgacactagacaaaatctcaggcagggagaggaatccacatcttggaacctcttcctgaggaaatagcaaaagacctgttgtcaggtgatgacgaggaaactcagtcttctgcggatgatctgacgccatctgtgacttcccatgaaacttctgatttcttccctaggcctttacgatcaaatactgcatgtgatggtgataaggaatcagaggttgaagatgttgaaacagacagtggtaattcacctgaagatttgaggaaggaaataatgattggtttacaatatcaggcagagattcccccttatcttggagagtacgatggtaatgagaaagtatatgaaaacgaagaccagttactttggtgtcctgatgtggttttggagagcaaagttaaggaataccttgttgagacttcattaaggactggcagtgaaaaaataatggataggatttctgcaggaacacacacaagggacaatgaacaggcattatatgaacttctcaagtgtaaccacaatataaaggaagcaatcgaaagatactgctgcaatggaaaggcctctcaagaaggaatgactgcatggacggaagaagaatgccgaagctttgaacatgcactcatgctttttggaaaagattttcatcttatacagaagaataaggtgagaactaggacagttgctgagtgtgtagcattctactatatgtggaagaaatctgaacgttatgattactttgctcaacagacaagatttgggaaaaaaagatataaccatcaccctggagttacggactatatggatcgtttagtagatgaaacagaagctttgggtgggacggtaaatgcttcagccttaacttctaaccggcctgagcctattcctgatcaacagctaaacattctcaactccttcactgccagtgacttgacagctttgaccaacagtgtagcaaccgtctgcgaccccacagatgtgaattgtttggatgatagctttcctccactgggcaacacaccccgtggacaagttaatcatgtgcctgttgtaacagaagagttactcaccctgcccagcaatggggaaagtgattgttttaatttatttgagactggattttatcactcggagctaaaccctatgaacatgtgcagtgaagagtcagagagaccagcaaaaagattgaaaatgggcattgccgtccctgaatcctttatgaatgaagtttctgtaaataacctgggtgtggactttgaaaatcacacacatcacatcaccagtgccaaaatggctgtttctgtggctgactttggcagtctctctgccaacgagaccaatggtttcatcagtgcccatgctctgcatcagcacgcggccctacactctgagtgacctgagtgaggatcccggaactgcgtgtgcagcaccagtaaacttgaggggagctatcaggtttgcatagtctttcactggaagtttgaacctttctcactatgacatcagtgatgtcagtatgtatagaactatatcttgatttatcaagagtattttcatttttcaatccataaatgtggaaatgaactatgatcagcagagttgggaactaagattgaactctgtggtgcagctttaagctctgcttctctcttcctcatctcccaatacctcttccccactcccttctttttctattcttttgtgttccccactgccctcactcccaattttaaaacctgtagacagaggccaccagctcaaaaccagcacagatgttctgaactgaatggtgtggcctgtttttgtgtaaattccttttgccgtaatggatgcagtggaataacaatgtttacaggtaccgatcccgatccctgctcaatgtagcatttttttggttttattttcttaataaaagcaggggtaggtttctttaaactgcacaaacatgcaaggattttttaaaaatggaaacttctctcatgttattcaactagagcacttcagtttacaaaacagcaagtccatctttatggaagccagcacaaggaactgtgtgcaaataatgaagacgcttgcttggatcctgtttcaaaattctagaccagggctaccttacacagaattggtcatgttactgccaggagatttctgtgtaacttcatttattggctacagttttggcatttgaagatgtggtactcagatggggttttgtccaccattgtcaagattgtaatcttaaaaatcataccagtcattgataatttagtttatcctgaggcagtcgacttgcagaggcacagtctacaaagcctaggatgttgccactcaatggtttacattttgggacatcttttaagttgtttgtagcactgcagttcaaagtgttaatatttagagggacttctagattttatacctaatgcagtagaaccttgaagtatatttaagcttttttgttaagcttgaacagttggcaagaataatgtgagttcctatctgaaatagaatggtacattaccacttttaagttttaaaaattgatagatgttcagatgtatctcaaactcagttttatttttattccaaatattgtgaatgagaagccattgtcctaaactttggccatttttgtgctataaacatgcatttttaagttataaggtgaatcaaacaatatgtaatacagtattaggatgtaatctttgcttttgtagtactgttaaaatagagaattatgttgtttgcaccgtcttaattaaaattcttgatttttactagttgctttgcaaaaaacaaatgtttggctgcattgctaatatttgtaagtataagttgcttcaaggttgtgctgatgagtagataggatgtagtgatcttagtagtgattgaaagggagggtatttattatacaaactgtgaactgcaatgacatccttagttttggatgatgtgtattcttgtttttctttgcagcattttaatgaagattgctttgaagtgtttacgcagtagcacattagtataaaatttagtttagcacagtggacaaaaagtagttaaattaataacttaaaatcagtctctaatttatacatctgaagtatagcattcctgtatgcacacagtaaataatgggtagcctgggctctgtgttactttcttgtatttttatccaagttgtcagcttcttattgctgtgttgttgtgctaaactttgaaccttatttcttttattaaaaatcagtacactttctataatttagtaagatactggccataatcttccattgttataaccttaattttcactctgggtttacagtggctggtctgtataaataatttacacaaagatgactgaatgctaataccagttgcacttaaatgaacatgcccattctcagtagctgatgcagtaatatattcagtttatctatgcattgctggggtcttgatataagatggaaacagtgtttcttatctaaagttttgattatcagcaagttgaatggacactttagttatttaaataaagatttttgaccaaaatccagaaaatggtatgagagaaaaataaattccagctagtttaatagatttttaaatgtcaatctgattttagcctcttagagagtgctaactagctggtaatgtttacttttaattccttgttaaaatgaggcaataatttgcaagatttttgtatataagtgtaaattcttcatatctttttagatctaattcaatattttctgactacttctgccatgtataataccatttttgtgcatgcttgatgtgacattcataaattgtaccactatgactttatccatgtaaaatagctatttattgaattttcttttaaaagctggatttactgggttttttttttctctcagtttaaacatcttaacagagaatttgttactgtttattaaaagaattgcatttggaagcaagaaaacaaccggatttgcaatcatgtgaagaaacaataatgcctttattatcaagtgttaagcacaattcttataacaaactgtgataaattctttttgtttttttttcctttgccccattattttcttatgaacaaaccaaaaattcatggtgagcagttgcagtgttggctgatatatcttttatgtacagggaatttgaaaaggacagtggattcatttagaagtgtaactggtgctgtgattatagcaatacatttgttagttgtacttcatctttttcatgctagctttttaaatgtttagttttcctcttgtcatggtcagctgctgaatttacttgaaggatgtagaatactgtttaaaaaatactaaaatttgtacaattagatcaaagaattgtgcaatcatttcctttttaatttttaaaatgttgaggctcataaatatttgagaacatcagatctaatagagcatagtgatactatttaatttaaccaaagtctctagtgaatatttcaactttgaatgtaaactaacaaataaacctgaccaccaaggagattgtttgcccagagtttcaaagcacattgtctacaaatggaaattgaaataatttataaaatattgacgttactatgttttttaaaaagttcctaattttttcactaaatggaggaaactattagttttattgttaaatatggtagatattaatattcctcttagatgaccagtgattccaattgtcccagtttgaaataagtaccctgtgagtatgagataaattagtgacaatcagaacaagtttcagtatcagatgttcaagaggaagttgctattgcattgattttaatatttgtacataaacactgatttttttgagcattattttgtatttgttgtactttaatacctggtgtacagttccagaaataaaaatctgggaatctt

SEQ ID NO: 153010 - DNA, 4818 bp, Homo sapiens
  Payload ID: 10100
  Gene Symbol: MIER1
  Gene Name: mesoderm induction early response 1, transcriptional regulator
  Uniprot ID: Q8N108
  ENST ID: ENST00000355356
  CDS Start-End: 150-1688
gcggctcctgcgcgttcccgccgaggcagtggcggcgggagcggcagagacggcagcggccggagtcccgttgctgagtctcacatccgggttctggccgtgacccagctgcggccgccgcggagatgtgacccggcagtacggcaaatatggcggagccatctgttgaatcttcaagtccaggaggttcagcaacatcagatgaccatgaatttgatccatcagctgacatgctggttcatgattttgatgatgaacgaacattagaagaggaagaaatgatggaaggagaaacaaacttcagctctgaaatagaagatcttgcaagggaaggcgacatgccaattcatgaacttctcagcctttatggttatggtagtactgttcgactacctgaagaagatgaggaagaggaagaagaggaagaagaaggtgaagatgatgaagatgctgataatgatgacaacagtggctgtagtggggaaaataaagaggagaatataaaggattcatcaggtcaggaggatgaaactcagtcttccaatgatgatccatcacaatctgttgcttctcaagatgcccaggaaataatccgcccacgtcgatgtaaatattttgatacaaatagtgaagtagaagaagaatctgaagaagatgaagattatattccatcagaagactggaaaaaggagattatggtgggctccatgtttcaagcagaaattccagttggcatttgtagatacaaagaaaatgaaaaagtatatgaaaatgatgatcagctcctgtgggaccctgagtacttaccagaagataaagtgattatatttcttaaagatgcatctagaagaacaggtgatgagaagggtgtagaagcaattcctgaaggatctcacataaaagacaatgaacaggctttatatgaattggttaaatgcaattttgatacagaagaagcattgagaagattaagatttaatgtaaaagcagctagagaggaattatctgtttggacagaggaagagtgtagaaattttgaacaagggctgaaggcctatggaaaggattttcatttgattcaggctaataaagtccgaacaaggtcagttggtgaatgtgtagcattctattacatgtggaaaaaatctgaacgttatgatttctttgctcagcaaacacgatttggaaagaagaaatataatcttcatcctggtgtaacggattacatggatcgtcttctagacgaaagtgaaagtgctgcatctagtcgagcaccatcccctcccccaactgcatcaaacagtagtaacagccagtctgagaaagaagatggcactgtaagcactgctaatcaaaatggagtgtcatctaatggaccaggtgaaatattaaacaaagaggaagtaaaagttgaagggttacacattaatggaccaacaggtggaaataagaaaccacttcatgcagatatggatactaatggttatgaaacagataaccttaccactgacccaaaacttgcccatatgactgcaagaaatgaaaatgattttgatgaaaaaagtgagagacctgccaaaaggcgaagggtaaacagcaatggaaaagaaagtccaggttcttctgaatttttccaagaagcagtctcacatgggaaatttgaagaacttgaaaacacagatgactaaattttagacctattttactttctttggagtaaattctggtgtgactaaaattttcagggttgatgggttaccttaaaaagttgatttccttgaagcagtttgaaaatttgaattgagtcttaactttaggaaatgaggtttcataattctgccttttgcagatttttttactttaaagctgtcagactcttttaagggtattttaaaaattagtaaatttgaatgaactaaagatatatctctaccttctcatttgaatatctttagttcattcagatttactaattttggtaaatctgaatgaactaaagatgtatctgtaccttctcatttgatgtattaatcataaaatttcactacaaggtaatttttgcttagtttgatggatgaatgggaaactcaagtccaaatttctgcttaataccaatttctctgagtttcttgaaatgtctttaaaacagacatttttctcaccaaacagtttgagtatctttattaaggaaacccttacgaatcctgaaaattatgctagcatgatttttttatatatagaagtttaaaaataaaccaggtcaggtttgtatatgtaaaattgttgacatcaatgatgtctttccatattcttatctgggcttaagaaatacattctgtatttttccagattctttgtagcctttgaaagatttttacagtacatatgtcttgactgagctgtcctttcttaatacaaaagcgtgtataattttcttaacttgtacagttggtaaacttttatgagaggaattgttattctgagtctgtcagctttcattttattttgctaaggtttttctaatgaatttttaagtgtttgtgtagtaattaagtcatatttcttatccaggtggttaaagcattcataaaggattataaaatttttttttttttttttttttttaaatttctacttaagggcaagtaatttgagaattctgaaattaagcatgatgcttagattgcagtttgttttgcatttgctataattttcaaaattatttttgaagcaagacaaaagtttaatgtcagcttaagtgcttaaatatatcatgctgaccagaatcctgttatttttatatgcatcataaaatttcccatttctgcattaaataaacagaggaggggggtcaagtgatacttagatattggcacacacaaggaacaactgttggcaggcagtatcgattttatgaagagaaagtgaagtttgaaaacttttcaaacttttctagttacaatccaatttttcagatttgataatgcttttccaaagtgaaaataagatacacaataatcattgctctgtgtgattacagataggattatccatctgcatagccttgtaaaagtgccattttatttttagtgctaaattcttgttaaataatgtagttttatatagctgatagaccaacctatatccaaacttttataaaatattaattattcttgtttttctcacacaggcatactccaaatgcttcttccagttcatttttcagccatcagttcaagagccaatgcctttttaaaataaagcttctgtggtcttgtttttaatggctcaactgtctgatgtaattgagtgaaggtttgcactgagaaattagcattcaggccttacccccatgaagtattactgttaacatatgttcggactgcttcccttcaccaatgtgaacaactttttttcccaaacagtgttaaaagccactttgcaacacttgacttcatcttaatgtacattcactgttgttacatacatatctaagtaaatcaaagttttgggtggaagtgttgagaagtatgagttttttgttgtttttgttttacttaaaacttttaatttatccagaatggcagtagctttagcaagcagatggtcacaatctgttttctaaatcattttttattaaatgaatccaaagtatcctagctctttgtcaaagatggtctgtagaaatgtttttaaagattagggatgctgtactttttgaattgttgcagtgttggagatgccattttcacctttttaaaaagatgcattttatttgcaggtttgtgaagttcttgcaaactcttactacagaaatgttttaaatacattctcaggcatgtttgcaaaaatatggcacatgtatacattttaggaaatgttacttttgttaatctttaaaaaatacacctaatgaaagacattccactattatgcgtaatgctcagctttttgtaaagaaatatttaattgtattttgtgtttatacaggtatttcacacaataatttgttcttaatgcagccactataacttgataagtcattgcactatttaaaaagttttagtaatatcatgaatttaatttgcttaagatttagtacatttcagaacttttgaacttttgacaaattgcattggaaaaagaagtctgttaatagtgatttagtctccccgcctcattcccacccccaacaaagcactatcattttcatttggaatgggtattttctgtttcatgatgtattttcaaatagagttcaggatctgcaattcagttcaacacaagtttgttgagctttaaaatgtatttgaagtaatatttaaataggcatttaaaatttcaaattagatgttaaatttatgcatagtaattttgcactgtaaaataattcccttctcccattccttgtctgccattctgaatatgcttattaaaatatttttttaaacatatttgcctacataatactgtgtgaatattttcattagattaattcactaagattttattagagattgtttgaatgatgcatgttattgacaaggcaaatatatatatatacacagtctgtttcttctattcctagacatattgcactactttttcagtggttcttggtcccctttaccacatcttgggtgatgtatttttgtcttcttcccctttgccacaagagatcctttcagtccctagacctccattcactctgtttctcttctgctggattatataatttaaaaataatgtgttcccgtattttgtagtggagttcatatcacattatgttttgcaaaataaaacttgttttgtcacaat

SEQ ID NO: 153011 - DNA, 3595 bp, Homo sapiens
  Payload ID: 10100
  Gene Symbol: MIER1
  Gene Name: mesoderm induction early response 1, transcriptional regulator
  Uniprot ID: Q8N108
  ENST ID: ENST00000355977
  CDS Start-End: 337-1449
aggagggcggaggcggaggggagggcagagggttggtggagctggaggaagctccggacgacgactggaagaaggaggcgggcggcccgggcctcaggcccctcccaggctctgagtctcccggctgcaggcggatggatggggcttcttcaggcggtggcggcagcagcgaaggtggcggcggcagcagcggcagcggctatggtgtggtcgctcgattctcccagtgcctggctgagtttcggacgtggttaagaaccaactggttgaggttcaatgcagacaagacggatgtgatgctgccatctgttgaatcttcaagtccaggaaggcgacatgccaattcatgaacttctcagcctttatggttatggtagtactgttcgactacctgaagaagatgaggaagaggaagaagaggaagaagaaggtgaagatgatgaagatgctgataatgatgacaacagtggctgtagtggggaaaataaagaggagaatataaaggattcatcaggtcaggaggatgaaactcagtcttccaatgatgatccatcacaatctgttgcttctcaagatgcccaggaaataatccgcccacgtcgatgtaaatattttgatacaaatagtgaagtagaagaagaatctgaagaagatgaagattatattccatcagaagactggaaaaaggagattatggtgggctccatgtttcaagcagaaattccagttggcatttgtagatacaaagaaaatgaaaaagtatatgaaaatgatgatcagctcctgtgggaccctgagtacttaccagaagataaagtgattatatttcttaaagatgcatctagaagaacaggtgatgagaagggtgtagaagcaattcctgaaggatctcacataaaagacaatgaacaggctttatatgaattggttaaatgcaattttgatacagaagaagcattgagaagattaagatttaatgtaaaagcagctagagaggaattatctgtttggacagaggaagagtgtagaaattttgaacaagggctgaaggcctatggaaaggattttcatttgattcaggctaataaagtccgaacaaggtcagttggtgaatgtgtagcattctattacatgtggaaaaaatctgaacgttatgatttctttgctcagcaaacacgatttggaaagaagaaatataatcttcatcctggtgtaacggattacatggatcgtcttctagacgaaagtgaaagtgctgcatctagtcgagcaccatcccctcccccaactgcatcaaacagtagtaacagccagtctgagaaagaagatggcactgtaagcactgctaatcaaaatggagtgtcatctaatggaccaggcatactccaaatgcttcttccagttcatttttcagccatcagttcaagagccaatgcctttttaaaataaagcttctgtggtcttgtttttaatggctcaactgtctgatgtaattgagtgaaggtttgcactgagaaattagcattcaggccttacccccatgaagtattactgttaacatatgttcggactgcttcccttcaccaatgtgaacaactttttttcccaaacagtgttaaaagccactttgcaacacttgacttcatcttaatgtacattcactgttgttacatacatatctaagtaaatcaaagttttgggtggaagtgttgagaagtatgagttttttgttgtttttgttttacttaaaacttttaatttatccagaatggcagtagctttagcaagcagatggtcacaatctgttttctaaatcattttttattaaatgaatccaaagtatcctagctctttgtcaaagatggtctgtagaaatgtttttaaagattagggatgctgtactttttgaattgttgcagtgttggagatgccattttcacctttttaaaaagatgcattttatttgcaggtttgtgaagttcttgcaaactcttactacagaaatgttttaaatacattctcaggcatgtttgcaaaaatatggcacatgtatacattttaggaaatgttacttttgttaatctttaaaaaatacacctaatgaaagacattccactattatgcgtaatgctcagctttttgtaaagaaatatttaattgtattttgtgtttatacaggtatttcacacaataatttgttcttaatgcagccactataacttgataagtcattgcactatttaaaaagttttagtaatatcatgaatttaatttgcttaagatttagtacatttcagaacttttgaacttttgacaaattgcattggaaaaagaagtctgttaatagtgatttagtctccccgcctcattcccacccccaacaaagcactatcattttcatttggaatgggtattttctgtttcatgatgtattttcaaatagagttcaggatctgcaattcagttcaacacaagtttgttgagctttaaaatgtatttgaagtaatatttaaataggcatttaaaatttcaaattagatgttaaatttatgcatagtaattttgcactgtaaaataattcccttctcccattccttgtctgccattctgaatatgcttattaaaatatttttttaaacatatttgcctacataatactgtgtgaatattttcattagattaattcactaagattttattagagattgtttgaatgatgcatgttattgacaaggcaaatatatatatatacacagtctgtttcttctattcctagacatattgcactactttttcagtggttcttggtcccctttaccacatcttgggtgatgtatttttgtcttcttcccctttgccacaagagatcctttcagtccctagacctccattcactctgtttctcttctgctggattatataatttaaaaataatgtgttcccgtattttgtagtggagttcatatcacattatgttttgcaaaataaaacttgttttgtcacaatattttctttgctatcgatggataattaggagtgggcacttggaataactgagggctggtgaatataataggcaatatttacatggggtgtgtaactaaataccaaatcagatagtaaggttttcccaactataatccatattcatgaaaaatgccagtgtggaaaaccatgtaacatacagaagaacaggagtttccaaattttaaccttttattctaaaaatgactctcttctctcaaaatgactttttctgtatcacataattctactgatacaactttttaccgtaaaaattaactctcttctttaatatcaagttcatcctttgcagaatcttaaagggttttccacacatccatccacccacttacagactgatttcatgtatctgaatatctgattaacctttcttttctaataccagttttccataaactcttgtcatgtacccttagtattgtgctgatcttttgccaactatacggacgtggagtttttccttttcagaatatgattattttcaatttgtctttagttagtataaagaattatagaatgtataatgtaattaaaatgtcattttgcttgc

SEQ ID NO: 153012 - DNA, 4978 bp, Homo sapiens
  Payload ID: 10100
  Gene Symbol: MIER1
  Gene Name: mesoderm induction early response 1, transcriptional regulator
  Uniprot ID: Q8N108
  ENST ID: ENST00000357692
  CDS Start-End: 258-1847
gactggaagaaggaggcgggcggcccgggcctcaggcccctcccaggctctgagtctcccggctgcaggcggatggatggggcttcttcaggcggtggcggcagcagcgaaggtggcggcggcagcagcggcagcggctatggtgtggtcgctcgattctcccagtgcctggctgagtttcggacgtggttaagaaccaactggttgaggttcaatgcagacaagacggatgtgatgctgtagaaaatgtgcatcagatgtttatgtttaattggtttacagactgtctgtggactcttttcctgtcaaattaccagccatctgttgaatcttcaagtccaggaggttcagcaacatcagatgaccatgaatttgatccatcagctgacatgctggttcatgattttgatgatgaacgaacattagaagaggaagaaatgatggaaggagaaacaaacttcagctctgaaatagaagatcttgcaagggaaggcgacatgccaattcatgaacttctcagcctttatggttatggtagtactgttcgactacctgaagaagatgaggaagaggaagaagaggaagaagaaggtgaagatgatgaagatgctgataatgatgacaacagtggctgtagtggggaaaataaagaggagaatataaaggattcatcaggtcaggaggatgaaactcagtcttccaatgatgatccatcacaatctgttgcttctcaagatgcccaggaaataatccgcccacgtcgatgtaaatattttgatacaaatagtgaagtagaagaagaatctgaagaagatgaagattatattccatcagaagactggaaaaaggagattatggtgggctccatgtttcaagcagaaattccagttggcatttgtagatacaaagaaaatgaaaaagtatatgaaaatgatgatcagctcctgtgggaccctgagtacttaccagaagataaagtgattatatttcttaaagatgcatctagaagaacaggtgatgagaagggtgtagaagcaattcctgaaggatctcacataaaagacaatgaacaggctttatatgaattggttaaatgcaattttgatacagaagaagcattgagaagattaagatttaatgtaaaagcagctagagaggaattatctgtttggacagaggaagagtgtagaaattttgaacaagggctgaaggcctatggaaaggattttcatttgattcaggctaataaagtccgaacaaggtcagttggtgaatgtgtagcattctattacatgtggaaaaaatctgaacgttatgatttctttgctcagcaaacacgatttggaaagaagaaatataatcttcatcctggtgtaacggattacatggatcgtcttctagacgaaagtgaaagtgctgcatctagtcgagcaccatcccctcccccaactgcatcaaacagtagtaacagccagtctgagaaagaagatggcactgtaagcactgctaatcaaaatggagtgtcatctaatggaccaggtgaaatattaaacaaagaggaagtaaaagttgaagggttacacattaatggaccaacaggtggaaataagaaaccacttcatgcagatatggatactaatggttatgaaacagataaccttaccactgacccaaaacttgcccatatgactgcaagaaatgaaaatgattttgatgaaaaaagtgagagacctgccaaaaggcgaagggtaaacagcaatggaaaagaaagtccaggttcttctgaatttttccaagaagcagtctcacatgggaaatttgaagaacttgaaaacacagatgactaaattttagacctattttactttctttggagtaaattctggtgtgactaaaattttcagggttgatgggttaccttaaaaagttgatttccttgaagcagtttgaaaatttgaattgagtcttaactttaggaaatgaggtttcataattctgccttttgcagatttttttactttaaagctgtcagactcttttaagggtattttaaaaattagtaaatttgaatgaactaaagatatatctctaccttctcatttgaatatctttagttcattcagatttactaattttggtaaatctgaatgaactaaagatgtatctgtaccttctcatttgatgtattaatcataaaatttcactacaaggtaatttttgcttagtttgatggatgaatgggaaactcaagtccaaatttctgcttaataccaatttctctgagtttcttgaaatgtctttaaaacagacatttttctcaccaaacagtttgagtatctttattaaggaaacccttacgaatcctgaaaattatgctagcatgatttttttatatatagaagtttaaaaataaaccaggtcaggtttgtatatgtaaaattgttgacatcaatgatgtctttccatattcttatctgggcttaagaaatacattctgtatttttccagattctttgtagcctttgaaagatttttacagtacatatgtcttgactgagctgtcctttcttaatacaaaagcgtgtataattttcttaacttgtacagttggtaaacttttatgagaggaattgttattctgagtctgtcagctttcattttattttgctaaggtttttctaatgaatttttaagtgtttgtgtagtaattaagtcatatttcttatccaggtggttaaagcattcataaaggattataaaatttttttttttttttttttttttaaatttctacttaagggcaagtaatttgagaattctgaaattaagcatgatgcttagattgcagtttgttttgcatttgctataattttcaaaattatttttgaagcaagacaaaagtttaatgtcagcttaagtgcttaaatatatcatgctgaccagaatcctgttatttttatatgcatcataaaatttcccatttctgcattaaataaacagaggaggggggtcaagtgatacttagatattggcacacacaaggaacaactgttggcaggcagtatcgattttatgaagagaaagtgaagtttgaaaacttttcaaacttttctagttacaatccaatttttcagatttgataatgcttttccaaagtgaaaataagatacacaataatcattgctctgtgtgattacagataggattatccatctgcatagccttgtaaaagtgccattttatttttagtgctaaattcttgttaaataatgtagttttatatagctgatagaccaacctatatccaaacttttataaaatattaattattcttgtttttctcacacaggcatactccaaatgcttcttccagttcatttttcagccatcagttcaagagccaatgcctttttaaaataaagcttctgtggtcttgtttttaatggctcaactgtctgatgtaattgagtgaaggtttgcactgagaaattagcattcaggccttacccccatgaagtattactgttaacatatgttcggactgcttcccttcaccaatgtgaacaactttttttcccaaacagtgttaaaagccactttgcaacacttgacttcatcttaatgtacattcactgttgttacatacatatctaagtaaatcaaagttttgggtggaagtgttgagaagtatgagttttttgttgtttttgttttacttaaaacttttaatttatccagaatggcagtagctttagcaagcagatggtcacaatctgttttctaaatcattttttattaaatgaatccaaagtatcctagctctttgtcaaagatggtctgtagaaatgtttttaaagattagggatgctgtactttttgaattgttgcagtgttggagatgccattttcacctttttaaaaagatgcattttatttgcaggtttgtgaagttcttgcaaactcttactacagaaatgttttaaatacattctcaggcatgtttgcaaaaatatggcacatgtatacattttaggaaatgttacttttgttaatctttaaaaaatacacctaatgaaagacattccactattatgcgtaatgctcagctttttgtaaagaaatatttaattgtattttgtgtttatacaggtatttcacacaataatttgttcttaatgcagccactataacttgataagtcattgcactatttaaaaagttttagtaatatcatgaatttaatttgcttaagatttagtacatttcagaacttttgaacttttgacaaattgcattggaaaaagaagtctgttaatagtgatttagtctccccgcctcattcccacccccaacaaagcactatcattttcatttggaatgggtattttctgtttcatgatgtattttcaaatagagttcaggatctgcaattcagttcaacacaagtttgttgagctttaaaatgtatttgaagtaatatttaaataggcatttaaaatttcaaattagatgttaaatttatgcatagtaattttgcactgtaaaataattcccttctcccattccttgtctgccattctgaatatgcttattaaaatatttttttaaacatatttgcctacataatactgtgtgaatattttcattagattaattcactaagattttattagagattgtttgaatgatgcatgttattgacaaggcaaatatatatatatacacagtctgtttcttctattcctagacatattgcactactttttcagtggttcttggtcccctttaccacatcttgggtgatgtatttttgtcttcttcccctttgccacaagagatcctttcagtccctagacctccattcactctgtttctcttctgctggattatataatttaaaaataatgtgttcccgtattttgtagtggagttcatatcacattatgttttgcaaaataaaacttgttttgtcacaata

SEQ ID NO: 153013 - DNA, 2420 bp, Homo sapiens
  Payload ID: 10100
  Gene Symbol: MIER1
  Gene Name: mesoderm induction early response 1, transcriptional regulator
  Uniprot ID: Q8N108
  ENST ID: ENST00000371012
  CDS Start-End: 245-490
aggaggcgggcggcccgggcctcaggcccctcccaggctctgagtctcccggctgcaggcggatggatggggcttcttcaggcggtggcggcagcagcgaaggtggcggcggcagcagcggcagcggctatggtgtggtcgctcgattctcccagtgcctggctgagtttcggacgtggttaagaaccaactggttgaggttcaatgcagacaagacggatgtgatgctgaaaatgtgcatcagatgtttatgtttaattggtttacagactgtctgtggactcttttcctgtcaaattaccagccatctgttgaatcttcaagtccaggaggttcagcaacatcagatgaccatgaatttgatccatcagctgacatgctggttcatgattttgatgatgaacgaacattagaagaggaagaaatgatggaaggagaaacaaacttcagctctgaaatagaagatcttgcaagggtaaataacatgtagagctagggtatgaattggttatgacttttttgtggaaagggaagatctgaaattttgattctctgattaggagagaaattgtgttatatattaatgactgaaaaattttgtgtgatcataggtgggatatttaaagtttgaaatgaaaggatttaaaaacaataactttattatgtgcaataacagaattcacatagttactttggtaaaacatagactgttaaatgattctgctataaaggtctggtcaaaaatggactataaaaggattctacacggcctcatatatcctttgtccttccccagttaccatatcttttacttattctccttcagagccaaaaattcttgaagtatcattttccattcactacataaagtgctctagattatctccactacataaagtgctctagattatctccacctcttcctatcaaggtgaccagtgaactttccttgttacatccatttttatattcacttttctctcactaccttactttttctcagcagtattcaatatagtttaacattcccttcttttacttgaattctggagtacaccactgtctggttttctttatctttttgtttctattcagtatcttttgcagactcttcttccgttactcaaggtttacatgttggcagtttgtgattctcagtttggaccttctttttttctctcctgtctctgtctggatcagtgctcctcaaaatgtagtatgagggtcagttgcatcagaatcaaccctgtacttattttaaaaagcagattttttggacctctcccccggcatactgaatcagaatctctggaggtggtgttcagatccacatcttcattaagtaagttggcattatatgtacaccaaatttgaaaatcactaagctgtgtgatttaatttattcccttggtgtgtatatccttagtattctttagtttatatttctagcattaacctatttcctgtctccagttttgtttgtccaccttgacatttctgcttgcttaactaaatggacatctctaaattataaatgtccaaaacagaactattgactgttgtttttttctctgcttgttctttccctgtcctatcagtaaaaagtggtactactatttaccctgttgcctaagtcagaaaccagtgagtcattttccttctctttcaatatcttatttctaaataaacctatcatttgtatccacaagaatatcccttagccgactcttgatccattgctgcctagattaccattctttctagcctaggctattgcagtagcttcctgactggtttccccatttcctcttttaccatctttctcctgatacatttccacccagcagctgtgatcttcttttcaaaatgtaaatcaattaatatcaacctcccagcttcctgttatatccaaagaaaacccaaactcctcaaccaggccagcaaggccacctgcatgataatggcctcttacccatgtatcacactacctctgttatagccacactagctgcttttgttgttaaataggctagtttcttctgcttcaagggttttcagctcattctcactctctggtatatgcatcccaaggccggctccttatcctctgggttcggtgttgcctcctcagaatagcagcctttcctgtcccctaattaggttttaattagttttttgttttatttttatttttttttaaccactgtcccctattcaatgctttctttagtgttaggacacaatttgtaattgtttgtttaatttattgtctgtacctccactggttttgagaagatgaaataaaatgactgttattcaccagtgtatttcatggtaccttgcaagagtgctcactcaaaagtattgtatgaatgaatggatatatcagtctggtatgttctaataaaatatatcatgca

SEQ ID NO: 153014 - DNA, 1728 bp, Homo sapiens
  Payload ID: 10100
  Gene Symbol: MIER1
  Gene Name: mesoderm induction early response 1, transcriptional regulator
  Uniprot ID: Q8N108
  ENST ID: ENST00000371014
  CDS Start-End: 71-1531
ctggaagaaggaggcgggcggcccgggcctcaggcccctcccaggctctgagtctcccggctgcaggcggatggatggggcttcttcaggcggtggcggcagcagcgaaggtggcggcggcagcagcggcagcggctatggtgtggtcgctcgattctcccagtgcctggctgagtttcggacgtggttaagaaccaactggttgaggttcaatgcagacaagacggatgtgatgctgccatctgttgaatcttcaagtccaggaggttcagcaacatcagatgaccatgaatttgatccatcagctgacatgctggttcatgattttgatgatgaacgaacattagaagaggaagaaatgatggaaggagaaacaaacttcagctctgaaatagaagatcttgcaagggaaggcgacatgccaattcatgaacttctcagcctttatggttatggtagtactgttcgactacctgaagaagatgaggaagaggaagaagaggaagaagaaggtgaagatgatgaagatgctgataatgatgacaacagtggctgtagtggggaaaataaagaggagaatataaaggattcatcaggtcaggaggatgaaactcagtcttccaatgatgatccatcacaatctgttgcttctcaagatgcccaggaaataatccgcccacgtcgatgtaaatattttgatacaaatagtgaagtagaagaagaatctgaagaagatgaagattatattccatcagaagactggaaaaaggagattatggtgggctccatgtttcaagcagaaattccagttggcatttgtagatacaaagaaaatgaaaaagtatatgaaaatgatgatcagctcctgtgggaccctgagtacttaccagaagataaagtgattatatttcttaaagatgcatctagaagaacaggtgatgagaagggtgtagaagcaattcctgaaggatctcacataaaagacaatgaacaggctttatatgaattggttaaatgcaattttgatacagaagaagcattgagaagattaagatttaatgtaaaagcagctagagaggaattatctgtttggacagaggaagagtgtagaaattttgaacaagggctgaaggcctatggaaaggattttcatttgattcaggctaataaagtccgaacaaggtcagttggtgaatgtgtagcattctattacatgtggaaaaaatctgaacgttatgatttctttgctcagcaaacacgatttggaaagaagaaatataatcttcatcctggtgtaacggattacatggatcgtcttctagacgaaagtgaaagtgctgcatctagtcgagcaccatcccctcccccaactgcatcaaacagtagtaacagccagtctgagaaagaagatggcactgtaagcactgctaatcaaaatggagtgtcatctaatggaccaggcatactccaaatgcttcttccagttcatttttcagccatcagttcaagagccaatgcctttttaaaataaagcttctgtggtcttgtttttaatggctcaactgtctgatgtaattgagtgaaggtttgcactgagaaattagcattcaggccttacccccatgaagtattactgttaacatatgttcggactgcttcccttcaccaatgtgaacaactttttttcccaaacagtgttaaaagccactttgcaacacttgacttcat

SEQ ID NO: 153015 - DNA, 1802 bp, Homo sapiens
  Payload ID: 10100
  Gene Symbol: MIER1
  Gene Name: mesoderm induction early response 1, transcriptional regulator
  Uniprot ID: Q8N108
  ENST ID: ENST00000371016
  CDS Start-End: 253-1605
ctggaagaaggaggcgggcggcccgggcctcaggcccctcccaggctctgagtctcccggctgcaggcggatggatggggcttcttcaggcggtggcggcagcagcgaaggtggcggcggcagcagcggcagcggctatggtgtggtcgctcgattctcccagtgcctggctgagtttcggacgtggttaagaaccaactggttgaggttcaatgcagacaagacggatgtgatgctgaaaatgtgcatcagatgtttatgtttaattggtttacagactgtctgtggactcttttcctgtcaaattaccagccatctgttgaatcttcaagtccaggaggttcagcaacatcagatgaccatgaatttgatccatcagctgacatgctggttcatgattttgatgatgaacgaacattagaagaggaagaaatgatggaaggagaaacaaacttcagctctgaaatagaagatcttgcaagggaaggcgacatgccaattcatgaacttctcagcctttatggttatggtagtactgttcgactacctgaagaagatgaggaagaggaagaagaggaagaagaaggtgaagatgatgaagatgctgataatgatgacaacagtggctgtagtggggaaaataaagaggagaatataaaggattcatcaggtcaggaggatgaaactcagtcttccaatgatgatccatcacaatctgttgcttctcaagatgcccaggaaataatccgcccacgtcgatgtaaatattttgatacaaatagtgaagtagaagaagaatctgaagaagatgaagattatattccatcagaagactggaaaaaggagattatggtgggctccatgtttcaagcagaaattccagttggcatttgtagatacaaagaaaatgaaaaagtatatgaaaatgatgatcagctcctgtgggaccctgagtacttaccagaagataaagtgattatatttcttaaagatgcatctagaagaacaggtgatgagaagggtgtagaagcaattcctgaaggatctcacataaaagacaatgaacaggctttatatgaattggttaaatgcaattttgatacagaagaagcattgagaagattaagatttaatgtaaaagcagctagagaggaattatctgtttggacagaggaagagtgtagaaattttgaacaagggctgaaggcctatggaaaggattttcatttgattcaggctaataaagtccgaacaaggtcagttggtgaatgtgtagcattctattacatgtggaaaaaatctgaacgttatgatttctttgctcagcaaacacgatttggaaagaagaaatataatcttcatcctggtgtaacggattacatggatcgtcttctagacgaaagtgaaagtgctgcatctagtcgagcaccatcccctcccccaactgcatcaaacagtagtaacagccagtctgagaaagaagatggcactgtaagcactgctaatcaaaatggagtgtcatctaatggaccaggcatactccaaatgcttcttccagttcatttttcagccatcagttcaagagccaatgcctttttaaaataaagcttctgtggtcttgtttttaatggctcaactgtctgatgtaattgagtgaaggtttgcactgagaaattagcattcaggccttacccccatgaagtattactgttaacatatgttcggactgcttcccttcaccaatgtgaacaactttttttcccaaacagtgttaaaagccactttgcaacacttgacttcat

SEQ ID NO: 153016 - DNA, 3875 bp, Homo sapiens
  Payload ID: 10100
  Gene Symbol: MIER1
  Gene Name: mesoderm induction early response 1, transcriptional regulator
  Uniprot ID: Q8N108
  ENST ID: ENST00000371018
  CDS Start-End: 317-1729
aggagggcggaggcggaggggagggcagagggttggtggagctggaggaagctccggacgacgactggaagaaggaggcgggcggcccgggcctcaggcccctcccaggctctgagtctcccggctgcaggcggatggatggggcttcttcaggcggtggcggcagcagcgaaggtggcggcggcagcagcggcagcggctatggtgtggtcgctcgattctcccagtgcctggctgagtttcggacgtggttaagaaccaactggttgaggttcaatgcagacaagacggatgtgatgctgaaaatgtgcatcagatgtttatgtttaattggtttacagactgtctgtggactcttttcctgtcaaattaccagccatctgttgaatcttcaagtccaggaggttcagcaacatcagatgaccatgaatttgatccatcagctgacatgctggttcatgattttgatgatgaacgaacattagaagaggaagaaatgatggaaggagaaacaaacttcagctctgaaatagaagatcttgcaagggaaggcgacatgccaattcatgaacttctcagcctttatggttatggtagtactgttcgactacctgaagaagatgaggaagaggaagaagaggaagaagaaggtgaagatgatgaagatgctgataatgatgacaacagtggctgtagtggggaaaataaagaggagaatataaaggattcatcaggtcaggaggatgaaactcagtcttccaatgatgatccatcacaatctgttgcttctcaagatgcccaggaaataatccgcccacgtcgatgtaaatattttgatacaaatagtgaagtagaagaagaatctgaagaagatgaagattatattccatcagaagactggaaaaaggagattatggtgggctccatgtttcaagcagaaattccagttggcatttgtagatacaaagaaaatgaaaaagtatatgaaaatgatgatcagctcctgtgggaccctgagtacttaccagaagataaagtgattatatttcttaaagatgcatctagaagaacaggtgatgagaagggtgtagaagcaattcctgaaggatctcacataaaagacaatgaacaggctttatatgaattggttaaatgcaattttgatacagaagaagcattgagaagattaagatttaatgtaaaagcagctagagaggaattatctgtttggacagaggaagagtgtagaaattttgaacaagggctgaaggcctatggaaaggattttcatttgattcaggctaataaagtccgaacaaggtcagttggtgaatgtgtagcattctattacatgtggaaaaaatctgaacgttatgatttctttgctcagcaaacacgatttggaaagaagaaatataatcttcatcctggtgtaacggattacatggatcgtcttctagacgaaagtgaaagtgctgcatctagtcgagcaccatcccctcccccaactgcatcaaacagtagtaacagccagtctgagaaagaagatggcactgtaagcactgctaatcaaaatggagtgtcatctaatggaccaggtgaaatattaaacaaagaggaagtaaaagttgaagggttacacattaatggaccaacaggcatactccaaatgcttcttccagttcatttttcagccatcagttcaagagccaatgcctttttaaaataaagcttctgtggtcttgtttttaatggctcaactgtctgatgtaattgagtgaaggtttgcactgagaaattagcattcaggccttacccccatgaagtattactgttaacatatgttcggactgcttcccttcaccaatgtgaacaactttttttcccaaacagtgttaaaagccactttgcaacacttgacttcatcttaatgtacattcactgttgttacatacatatctaagtaaatcaaagttttgggtggaagtgttgagaagtatgagttttttgttgtttttgttttacttaaaacttttaatttatccagaatggcagtagctttagcaagcagatggtcacaatctgttttctaaatcattttttattaaatgaatccaaagtatcctagctctttgtcaaagatggtctgtagaaatgtttttaaagattagggatgctgtactttttgaattgttgcagtgttggagatgccattttcacctttttaaaaagatgcattttatttgcaggtttgtgaagttcttgcaaactcttactacagaaatgttttaaatacattctcaggcatgtttgcaaaaatatggcacatgtatacattttaggaaatgttacttttgttaatctttaaaaaatacacctaatgaaagacattccactattatgcgtaatgctcagctttttgtaaagaaatatttaattgtattttgtgtttatacaggtatttcacacaataatttgttcttaatgcagccactataacttgataagtcattgcactatttaaaaagttttagtaatatcatgaatttaatttgcttaagatttagtacatttcagaacttttgaacttttgacaaattgcattggaaaaagaagtctgttaatagtgatttagtctccccgcctcattcccacccccaacaaagcactatcattttcatttggaatgggtattttctgtttcatgatgtattttcaaatagagttcaggatctgcaattcagttcaacacaagtttgttgagctttaaaatgtatttgaagtaatatttaaataggcatttaaaatttcaaattagatgttaaatttatgcatagtaattttgcactgtaaaataattcccttctcccattccttgtctgccattctgaatatgcttattaaaatatttttttaaacatatttgcctacataatactgtgtgaatattttcattagattaattcactaagattttattagagattgtttgaatgatgcatgttattgacaaggcaaatatatatatatacacagtctgtttcttctattcctagacatattgcactactttttcagtggttcttggtcccctttaccacatcttgggtgatgtatttttgtcttcttcccctttgccacaagagatcctttcagtccctagacctccattcactctgtttctcttctgctggattatataatttaaaaataatgtgttcccgtattttgtagtggagttcatatcacattatgttttgcaaaataaaacttgttttgtcacaatattttctttgctatcgatggataattaggagtgggcacttggaataactgagggctggtgaatataataggcaatatttacatggggtgtgtaactaaataccaaatcagatagtaaggttttcccaactataatccatattcatgaaaaatgccagtgtggaaaaccatgtaacatacagaagaacaggagtttccaaattttaaccttttattctaaaaatgactctcttctctcaaaatgactttttctgtatcacataattctactgatacaactttttaccgtaaaaattaactctcttctttaatatcaagttcatcctttgcagaatcttaaagggttttccacacatccatccacccacttacagactgatttcatgtatctgaatatctgattaacctttcttttctaataccagttttccataaactcttgtcatgtacccttagtattgtgctgatcttttgccaactatacggacgtggagtttttccttttcagaatatgattattttcaatttgtctttagttagtataaagaattatagaatgtataatgtaattaaaatgtcattttgcttgc

SEQ ID NO: 153017 - DNA, 2552 bp, Homo sapiens
  Payload ID: 10100
  Gene Symbol: MIER1
  Gene Name: mesoderm induction early response 1, transcriptional regulator
  Uniprot ID: Q8N108
  ENST ID: ENST00000401041
  CDS Start-End: 71-1768
ctggaagaaggaggcgggcggcccgggcctcaggcccctcccaggctctgagtctcccggctgcaggcggatggatggggcttcttcaggcggtggcggcagcagcgaaggtggcggcggcagcagcggcagcggctatggtgtggtcgctcgattctcccagtgcctggctgagtttcggacgtggttaagaaccaactggttgaggttcaatgcagacaagacggatgtgatgctgccatctgttgaatcttcaagtccaggaggttcagcaacatcagatgaccatgaatttgatccatcagctgacatgctggttcatgattttgatgatgaacgaacattagaagaggaagaaatgatggaaggagaaacaaacttcagctctgaaatagaagatcttgcaagggaaggcgacatgccaattcatgaacttctcagcctttatggttatggtagtactgttcgactacctgaagaagatgaggaagaggaagaagaggaagaagaaggtgaagatgatgaagatgctgataatgatgacaacagtggctgtagtggggaaaataaagaggagaatataaaggattcatcaggtcaggaggatgaaactcagtcttccaatgatgatccatcacaatctgttgcttctcaagatgcccaggaaataatccgcccacgtcgatgtaaatattttgatacaaatagtgaagtagaagaagaatctgaagaagatgaagattatattccatcagaagactggaaaaaggagattatggtgggctccatgtttcaagcagaaattccagttggcatttgtagatacaaagaaaatgaaaaagtatatgaaaatgatgatcagctcctgtgggaccctgagtacttaccagaagataaagtgattatatttcttaaagatgcatctagaagaacaggtgatgagaagggtgtagaagcaattcctgaaggatctcacataaaagacaatgaacaggctttatatgaattggttaaatgcaattttgatacagaagaagcattgagaagattaagatttaatgtaaaagcagctagagaggaattatctgtttggacagaggaagagtgtagaaattttgaacaagggctgaaggcctatggaaaggattttcatttgattcaggctaataaagtccgaacaaggtcagttggtgaatgtgtagcattctattacatgtggaaaaaatctgaacgttatgatttctttgctcagcaaacacgatttggaaagaagaaatataatcttcatcctggtgtaacggattacatggatcgtcttctagacgaaagtgaaagtgctgcatctagtcgagcaccatcccctcccccaactgcatcaaacagtagtaacagccagtctgagaaagaagatggcactgtaagcactgctaatcaaaatggagtgtcatctaatggaccaggtgaaatattaaacaaagaggaagtaaaagttgaagggttacacattaatggaccaacaggtggaaataagaaaccacttcatgcagatatggatactaatggttatgaaacagataaccttaccactgacccaaaacttgcccatatgactgcaagaaatgaaaatgattttgatgaaaaaagtgagagacctgccaaaaggcgaagggtaaacagcaatggaaaagaaagtccaggttcttctgaatttttccaagaagcagtctcacatgggaaatttgaagaacttgaaaacacagatgactaaattttagacctattttactttctttggagtaaattctggtgtgactaaaattttcagggttgatgggttaccttaaaaagttgatttccttgaagcagtttgaaaatttgaattgagtcttaactttaggaaatgaggtttcataattctgccttttgcagatttttttactttaaagctgtcagactcttttaagggtattttaaaaattagtaaatttgaatgaactaaagatatatctctaccttctcatttgaatatctttagttcattcagatttactaattttggtaaatctgaatgaactaaagatgtatctgtaccttctcatttgatgtattaatcataaaatttcactacaaggtaatttttgcttagtttgatggatgaatgggaaactcaagtccaaatttctgcttaataccaatttctctgagtttcttgaaatgtctttaaaacagacatttttctcaccaaacagtttgagtatctttattaaggaaacccttacgaatcctgaaaattatgctagcatgatttttttatatatagaagtttaaaaataaaccaggtcaggtttgtatatgtaaaattgttgacatcaatgatgtctttccatattcttatctgggcttaagaaatacattctgtatttttccagattctttgtagcctttgaaagatttttacagtacatatgtcttgactgagctgtcctttcttaatacaaaagcgtgtataattttcttaacttgtacagttggtaaacttttatgagaggaat

SEQ ID NO: 153018 - DNA, 1648 bp, Homo sapiens
  Payload ID: 10100
  Gene Symbol: MIER1
  Gene Name: mesoderm induction early response 1, transcriptional regulator
  Uniprot ID: Q8N108
  ENST ID: ENST00000401042
  CDS Start-End: 150-1451
gcggctcctgcgcgttcccgccgaggcagtggcggcgggagcggcagagacggcagcggccggagtcccgttgctgagtctcacatccgggttctggccgtgacccagctgcggccgccgcggagatgtgacccggcagtacggcaaatatggcggagccatctgttgaatcttcaagtccaggaggttcagcaacatcagatgaccatgaatttgatccatcagctgacatgctggttcatgattttgatgatgaacgaacattagaagaggaagaaatgatggaaggagaaacaaacttcagctctgaaatagaagatcttgcaagggaaggcgacatgccaattcatgaacttctcagcctttatggttatggtagtactgttcgactacctgaagaagatgaggaagaggaagaagaggaagaagaaggtgaagatgatgaagatgctgataatgatgacaacagtggctgtagtggggaaaataaagaggagaatataaaggattcatcaggtcaggaggatgaaactcagtcttccaatgatgatccatcacaatctgttgcttctcaagatgcccaggaaataatccgcccacgtcgatgtaaatattttgatacaaatagtgaagtagaagaagaatctgaagaagatgaagattatattccatcagaagactggaaaaaggagattatggtgggctccatgtttcaagcagaaattccagttggcatttgtagatacaaagaaaatgaaaaagtatatgaaaatgatgatcagctcctgtgggaccctgagtacttaccagaagataaagtgattatatttcttaaagatgcatctagaagaacaggtgatgagaagggtgtagaagcaattcctgaaggatctcacataaaagacaatgaacaggctttatatgaattggttaaatgcaattttgatacagaagaagcattgagaagattaagatttaatgtaaaagcagctagagaggaattatctgtttggacagaggaagagtgtagaaattttgaacaagggctgaaggcctatggaaaggattttcatttgattcaggctaataaagtccgaacaaggtcagttggtgaatgtgtagcattctattacatgtggaaaaaatctgaacgttatgatttctttgctcagcaaacacgatttggaaagaagaaatataatcttcatcctggtgtaacggattacatggatcgtcttctagacgaaagtgaaagtgctgcatctagtcgagcaccatcccctcccccaactgcatcaaacagtagtaacagccagtctgagaaagaagatggcactgtaagcactgctaatcaaaatggagtgtcatctaatggaccaggcatactccaaatgcttcttccagttcatttttcagccatcagttcaagagccaatgcctttttaaaataaagcttctgtggtcttgtttttaatggctcaactgtctgatgtaattgagtgaaggtttgcactgagaaattagcattcaggccttacccccatgaagtattactgttaacatatgttcggactgcttcccttcaccaatgtgaacaactttttttcccaaacagtgttaaaagccactttgcaacacttgacttcat

SEQ ID NO: 153019 - DNA, 2369 bp, Homo sapiens
  Payload ID: 10101
  Gene Symbol: MESP1
  Gene Name: mesoderm posterior bHLH transcription factor 1
  Uniprot ID: Q9BRJ9
  ENST ID: ENST00000300057
  CDS Start-End: 80-886
ctggaaggggccacttcacacctcgggctcggcataaagcggccgccggccgccggcccccagacgcgccgccgctgccatggcccagcccctgtgcccgccgctctccgagtcctggatgctctctgcggcctggggcccaactcggcggccgccgccctccgacaaggactgcggccgctccctcgtctcgtccccagactcatggggcagcaccccagccgacagccccgtggcgagccccgcgcggccaggcaccctccgggacccccgcgccccctccgtaggtaggcgcggcgcgcgcagcagccgcctgggcagcgggcagaggcagagcgccagtgagcgggagaaactgcgcatgcgcacgctggcccgcgccctgcacgagctgcgccgctttctaccgccgtccgtggcgcccgcgggccagagcctgaccaagatcgagacgctgcgcctggctatccgctatatcggccacctgtcggccgtgctaggcctcagcgaggagagtctccagcgccggtgccggcagcgcggtgacgcggggtcccctcggggctgcccgctgtgccccgacgactgccccgcgcagatgcagacacggacgcaggctgaggggcaggggcaggggcgcgggctgggcctggtatccgccgtccgcgccggggcgtcctggggatccccgcctgcctgccccggagcccgagctgcacccgagccgcgcgacccgcctgcgctgttcgccgaggcggcgtgccctgaagggcaggcgatggagccaagcccaccgtccccgctccttccgggcgacgtgctggctctgttggagacctggatgcccctctcgcctctggagtggctgcctgaggagcccaagtgacaagggacaactgacgccgtctctgtgagcaccgaggctttttggcctcagcaccttcgaagtggttccttggcagactgcctttcctggaagagggcacgggcgatcccgacgggggcattcctgcgggtgagagccgtccccaccgcggcggcccttctcagcccctccctccatggagggacccatagggctagacactttgaggcaagcaggaggctctgcctaatgtgaatttatttatttgtgaataaactgtactggtgtcagttggcaatttcttcttcctacccgtggacacagagctccctctctccctccaaagaagagcatgggagaggtgggaggggttcttgcaatctttagccccccgacccccacaggcccagacccctttggccttacccccagccctggctcagcatctagtccagatgggtcagcctggaatgggtggggagggacgtcctgtgagaaggcagcggcaagtagaatctgctcatcttttctttgaacctggtggggaactggttaaaaccaaaatatctgtgtagaaatacaactccattattgagtatttattgtatgtacatcaggtacctattatactcaagtaaccattttacagaaggatgaggatcagcgctcaagcccaggtaggcctccagagtcccagcgctcagctcttgtgggattttgccagctccatacatgttggggcctgagggataacagctccaaggggttattttcttgcatcctgtggtcttattctccatgcacgggagcatcctggccttggaactcccccaccctccgccggcattttcccatctgccttttctctggtttccccaccttgtggcttagagacataaataatggtgtggcggtcctgagtttatataaccatgacctcctacaggcctagatggggtgagatgaggggcccatggggttgcatcggaatccacacaggcagttgcgtgcctgtctgcattggctggattcacatcagggagcaagaaacgggaggcttgagcccagaaagtgtgtcctcatccagccagggtgtctgggcaacagtcatgattagagggtgcggtggggagaagggatgtgtagcctctctgccaagcgtcctttaccctctatggatagatacccagttctcccctcctctccttcaagtgtctgaaacacaggcttcagtgtctgtttttataagagctttattaggatacaattcacataccataaaattcactcttttaacaactgaatggctttagtacatccacagagttgtgcaagcattgccactaattttagaacgttttcaccccccaaaagaaaccgtatacctgttaacatcactcctcactattccctactcccagtccctggcactcactcttctagtctctgtctctataggtttgctttttcaggacatttcatataaaaggaatcgcaaaatacg

SEQ ID NO: 153020 - DNA, 1552 bp, Homo sapiens
  Payload ID: 10102
  Gene Symbol: MESP2
  Gene Name: mesoderm posterior bHLH transcription factor 2
  Uniprot ID: Q0VG99
  ENST ID: ENST00000341735
  CDS Start-End: 1-1194
atggcccagtcgcctcctccgcagagcctcctcggccacgaccactggatcttcgcccagggctggggctgggccggccactgggactccacgtccccggcctcctcctccgattcgtcgggttcgtgcccctgcgacggcgcccgcggactcccgcagccacagcctccgagctgcagctcccgagccgcagaggcagccgcgacgacgcccagacgagcgcgcaccggaccagcgggcggacagcggcagagcgccagcgagcgggagaaactgcgcatgcgcacgctggcccgcgccctgcacgagttgcgccgctttctgcctccctccttggcgccggccggccagagcctgaccaagatcgagacgctgcgcctggccatccgctacatcggccacctatcggccgtgctgggtctcagcgaggagagtctgcagtgccggcgcaggcagcgcggggacgcggggtccccttggggctgcccgctgtgccccgaccgtggccccgcagaggcgcagacgcaggcggaggggcaggggcaagggcaggggcaggggcaggggcaagggcaggggcaaggacaggggcaaggacaggggcaagggcaggggcgcaggccgggcctggtctccgccgtcctcgccgaggcgtcctggggatccccgtccgcctgccccggagcccaagccgcacccgagcgcctggggaggggggtccacgacacggatccctgggcaacacccccttactgccccaagatacagtcgcccccgtattcgtcccaagggacaacctccgacgcgtctctttggacgccaccccaaggctgtccctggacgcagtcgtccccagagccccggaacccaccagtgccctggacggcggccccagcaactttggagctggccgcagtgtaccagggtctctctgtgtctccagagccctgtctgtcgctgggagctccatctctcctgccccacccatcatgccagagactgcagcctcagacccccgggaggtgctggagccacagtgcagaggtggtgcccaactcagaggaccagggaccgggcgccgccttccagctcagtgaagcaagccctccccagagctcaggcctgcggttcagtggctgccctgaactttggcaagaagatctggagggggcccgcctgggcatcttctactaaatggcctcggcttccctctttccatccaggaatcagtcctgtagcttgggtgcctccttatttgttaattagtggcttttcatgttctcctttagccaaggctccctttttccaagtgatgtctttcagggaagcagtgtttgaaatagatagcgggtaccttccctggatggagtcagggcgggggcactgtcctccactgctagacacccccagaatgcctggcgctctgcagagcacagtctgagctgctctaagaaggggtctcctttaccctaaaggcagctgggcagggacaggtgggagaatgggtgtaggaggcaggccccaggctctgcttcttggtgacagttggcca

SEQ ID NO: 153021 - DNA, 859 bp, Homo sapiens
  Payload ID: 10102
  Gene Symbol: MESP2
  Gene Name: mesoderm posterior bHLH transcription factor 2
  ENST ID: ENST00000560219
  CDS Start-End: 140-439
gaggaagtgccgcgtcttggtgggtctggagctggctgacaatgcaggagacaaggtctcgccatgttgcctaggatgttctcgaactcctgaactcaagtaatccaccttggcctcccaaagtgctaggattacaggcatgagccaccacgcccggccaaattgtatgggtctctctgtgtctccagagccctgtctgtcgctgggagctccatctctcctgccccacccatcatgccagagactgcagcctcagacccccgggaggtgctggagccacagtgcagaggtggtgcccaactcagaggaccagggaccgggcgccgccttccagctcagtgaagcaagccctccccagagctcaggcctgcggttcagtggctgccctgaactttggcaagaagatctggagggggcccgcctgggcatcttctactaaatggcctcggcttccctctttccatccaggaatcagtcctgtagcttgggtgcctccttatttgttaattagtggcttttcatgttctcctttagccaaggctccctttttccaagtgatgtctttcagggaagcagtgtttgaaatagatagcgggtaccttccctggatggagtcagggcgggggcactgtcctccactgctagacacccccagaatgcctggcgctctgcagagcacagtctgagctgctctaagaaggggtctcctttaccctaaaggcagctgggcagggacaggtgggagaatgggtgtaggaggcaggccccaggctctgcttcttggtgacagttggccagagccctgtatgctttgatttttttgtacttaaaaagaaaaaacacacacacacaacaaaaa

SEQ ID NO: 153022 - DNA, 2465 bp, Homo sapiens
  Payload ID: 10103
  Gene Symbol: MEST
  Gene Name: mesoderm specific transcript
  Uniprot ID: Q5EB52
  ENST ID: ENST00000223215
  CDS Start-End: 222-1229
caaccagcacaccccggcacctcctctgcggcagctgcgcctcgcaagcgcagtgccgcagcgcacgccggagtggctgtagctgcccggcgcggcgccgccctgcgcgggctgtgggctgcgggctgcgcccccgctgctggccagctctgcacggctgcgggctctgcggcgcccggtgctctgcaacgctgcggcgggcggcatgggataacgcggccatggtgcgccgagatcgcctccgcaggatgagggagtggtgggtccaggtggggctgctggccgtgcccctgcttgctgcgtacctgcacatcccaccccctcagctctcccctgcccttcactcatggaagtcttcaggcaagtttttcacttacaagggactgcgtatcttctaccaagactctgtgggtgtggttggaagtccagagatagttgtgcttttacacggttttccaacatccagctacgactggtacaagatttgggaaggtctgaccttgaggtttcatcgggtgattgcccttgatttcttaggctttggcttcagtgacaaaccgagaccacatcactattccatatttgagcaggccagcatcgtggaagcgcttttgcggcatctggggctccagaaccgcaggatcaaccttctttctcatgactatggagatattgttgctcaggagcttctctacaggtacaagcagaatcgatctggtcggcttaccataaagagtctctgtctgtcaaatggaggtatctttcctgagactcaccgtccactccttctccaaaagctactcaaagatggaggtgtgctgtcacccatcctcacacgactgatgaacttctttgtattctctcgaggtctcaccccagtctttgggccgtatactcggccctctgagagtgagctgtgggacatgtgggcagggatccgcaacaatgacgggaacttagtcattgacagtctcttacagtacatcaatcagaggaagaagttcagaaggcgctgggtgggagctcttgcctctgtaactatccccattcattttatctatgggccattggatcctgtaaatccctatccagagtttttggagctgtacaggaaaacgctgccgcggtccacagtgtcgattctggatgaccacattagccactatccacagctagaggatcccatgggcttcttgaatgcatatatgggcttcatcaactccttctgagctggaaagagtagcttccctgtattacctcccctactcccttatgtgttgtgtattccacttaggaagaaatgcccaaaagaggtcctggccatcaaacataattctctcacaaagtccactttactcaaattggtgaacagtgtataggaagaagccagcaggagctctgactaaggttgacataatagtccacctcccattactttgatatctgatcaaatgtatagacttggctttgttttttgtgctattaggaaattctgatgagcattactattcactgatgcagaaagacgttcttttgcataaaagacttttttttaacactttggacttctctgaaatatttagaagtgctaatttctggcccacccccaacaggaattctatagtaaggaggaggagaaggggggctccttccctctcctcgaatgacgttatgggcacatgccttttaaaagttctttaagcaacacagagctgagtcctctttgtcatacctttggatttagtgtttcatcagctgtttttagttataaacattttgttaaaatagatattggtttaaatgatacagtattttaggtatgatttaagactatgatttacctatacattatatatattttataaagatactaaaccagcatacccttactctgccagagtagtgaagctaattaaacacatttggtttctgaataaattgaactaaatccaaactatttcctaaaatcacaggacattaaggaccaatagcatctgtgccagagatgtactgttattagctgggaagaccaattctaacagcaaataacagtctgagactcctcatacctcagtggttagaagcatgtctctcttgagctacagtagaggggaagggattgttgtgtagtcaagtcaccatgctgaatgtacactgattcctttatgatgactgcttaactccccactgcctgtcccagagaggctttccaatgtagctcagtaattcctgttactttacagacaggaaagttccagaaactttaagaacaaactctgaaagacctatgagcaaatggtgctgaatactttttttttaaagccacatttcattgtcttagtcaaagcaggattattaagtgattatttaaaattcgtttttttaaattagcaacttcaagtataacaactttgaaactggaataagtgtttattttctattaataaaaatgaattgtgacaaaa

SEQ ID NO: 153023 - DNA, 2443 bp, Homo sapiens
  Payload ID: 10103
  Gene Symbol: MEST
  Gene Name: mesoderm specific transcript
  Uniprot ID: Q5EB52
  ENST ID: ENST00000341441
  CDS Start-End: 227-1207
aggtggcgctgacgcctggcagggagaaggcggcagcacatgctgggctcgggggcgatgggcttgtgcgcggacctggcgacgctctagccccgagccgcgtattcgtggccgggtcctccctgggaacagggtgaaggccgagaacctctggcctcaggaagcgcatgcgcaaccggttctccgaaacatggagtcctgtaggcaaggtcttacctgaatcaggatgagggagtggtgggtccaggtggggctgctggccgtgcccctgcttgctgcgtacctgcacatcccaccccctcagctctcccctgcccttcactcatggaagtcttcaggcaagtttttcacttacaagggactgcgtatcttctaccaagactctgtgggtgtggttggaagtccagagatagttgtgcttttacacggttttccaacatccagctacgactggtacaagatttgggaaggtctgaccttgaggtttcatcgggtgattgcccttgatttcttaggctttggcttcagtgacaaaccgagaccacatcactattccatatttgagcaggccagcatcgtggaagcgcttttgcggcatctggggctccagaaccgcaggatcaaccttctttctcatgactatggagatattgttgctcaggagcttctctacaggtacaagcagaatcgatctggtcggcttaccataaagagtctctgtctgtcaaatggaggtatctttcctgagactcaccgtccactccttctccaaaagctactcaaagatggaggtgtgctgtcacccatcctcacacgactgatgaacttctttgtattctctcgaggtctcaccccagtctttgggccgtatactcggccctctgagagtgagctgtgggacatgtgggcagggatccgcaacaatgacgggaacttagtcattgacagtctcttacagtacatcaatcagaggaagaagttcagaaggcgctgggtgggagctcttgcctctgtaactatccccattcattttatctatgggccattggatcctgtaaatccctatccagagtttttggagctgtacaggaaaacgctgccgcggtccacagtgtcgattctggatgaccacattagccactatccacagctagaggatcccatgggcttcttgaatgcatatatgggcttcatcaactccttctgagctggaaagagtagcttccctgtattacctcccctactcccttatgtgttgtgtattccacttaggaagaaatgcccaaaagaggtcctggccatcaaacataattctctcacaaagtccactttactcaaattggtgaacagtgtataggaagaagccagcaggagctctgactaaggttgacataatagtccacctcccattactttgatatctgatcaaatgtatagacttggctttgttttttgtgctattaggaaattctgatgagcattactattcactgatgcagaaagacgttcttttgcataaaagacttttttttaacactttggacttctctgaaatatttagaagtgctaatttctggcccacccccaacaggaattctatagtaaggaggaggagaaggggggctccttccctctcctcgaatgacgttatgggcacatgccttttaaaagttctttaagcaacacagagctgagtcctctttgtcatacctttggatttagtgtttcatcagctgtttttagttataaacattttgttaaaatagatattggtttaaatgatacagtattttaggtatgatttaagactatgatttacctatacattatatatattttataaagatactaaaccagcatacccttactctgccagagtagtgaagctaattaaacacatttggtttctgaataaattgaactaaatccaaactatttcctaaaatcacaggacattaaggaccaatagcatctgtgccagagatgtactgttattagctgggaagaccaattctaacagcaaataacagtctgagactcctcatacctcagtggttagaagcatgtctctcttgagctacagtagaggggaagggattgttgtgtagtcaagtcaccatgctgaatgtacactgattcctttatgatgactgcttaactccccactgcctgtcccagagaggctttccaatgtagctcagtaattcctgttactttacagacaggaaagttccagaaactttaagaacaaactctgaaagacctatgagcaaatggtgctgaatactttttttttaaagccacatttcattgtcttagtcaaagcaggattattaagtgattatttaaaattcgtttttttaaattagcaacttcaagtataacaactttgaaactggaataagtgtttattttctattaataaaaatgaattgtgacaaaa

SEQ ID NO: 153024 - DNA, 2180 bp, Homo sapiens
  Payload ID: 10103
  Gene Symbol: MEST
  Gene Name: mesoderm specific transcript
  Uniprot ID: Q5EB52
  ENST ID: ENST00000378576
  CDS Start-End: 66-944
ccgaaacatggagtcctgtaggcaaggtcttacctgaatcagtgggtctctgcttttcctacaggatgagggagtggtgggtccaggtggggctgctggccgtgcccctgcttgctgcgtacctgcacatcccaccccctcagctctcccctgcccttcactcatggaagtcttcaggcaagtttttcacttacaagggactgcgtatcttctaccaagactctgtgggtgtggttggaagtccagagatagttgtgcttttacacggttttccaacatccagctacgactggtacaagatttgggaaggtctgaccttgaggtttcatcgggtgattgcccttgatttcttaggctttggcttcagtgacaaaccgagaccacatcactattccatatttgagcaggccagcatcgtggaagcgcttttgcggcatctggggctccagaaccgcaggatcaaccttctttctcatgactatggagatattgttgctcaggagcttctctacaggtacaagcagaatcgatctggtcggcttaccataaagagtctctgtctgtcaaatggaggtatctttcctgagactcaccgtccactccttctccaaaagctactcaaagatggaggtgtgctgtcacccatcctcacacgactgatgaacttctttgtattctctcgaggtctcttacagtacatcaatcagaggaagaagttcagaaggcgctgggtgggagctcttgcctctgtaactatccccattcattttatctatgggccattggatcctgtaaatccctatccagagtttttggagctgtacaggaaaacgctgccgcggtccacagtgtcgattctggatgaccacattagccactatccacagctagaggatcccatgggcttcttgaatgcatatatgggcttcatcaactccttctgagctggaaagagtagcttccctgtattacctcccctactcccttatgtgttgtgtattccacttaggaagaaatgcccaaaagaggtcctggccatcaaacataattctctcacaaagtccactttactcaaattggtgaacagtgtataggaagaagccagcaggagctctgactaaggttgacataatagtccacctcccattactttgatatctgatcaaatgtatagacttggctttgttttttgtgctattaggaaattctgatgagcattactattcactgatgcagaaagacgttcttttgcataaaagacttttttttaacactttggacttctctgaaatatttagaagtgctaatttctggcccacccccaacaggaattctatagtaaggaggaggagaaggggggctccttccctctcctcgaatgacgttatgggcacatgccttttaaaagttctttaagcaacacagagctgagtcctctttgtcatacctttggatttagtgtttcatcagctgtttttagttataaacattttgttaaaatagatattggtttaaatgatacagtattttaggtatgatttaagactatgatttacctatacattatatatattttataaagatactaaaccagcatacccttactctgccagagtagtgaagctaattaaacacatttggtttctgaataaattgaactaaatccaaactatttcctaaaatcacaggacattaaggaccaatagcatctgtgccagagatgtactgttattagctgggaagaccaattctaacagcaaataacagtctgagactcctcatacctcagtggttagaagcatgtctctcttgagctacagtagaggggaagggattgttgtgtagtcaagtcaccatgctgaatgtacactgattcctttatgatgactgcttaactccccactgcctgtcccagagaggctttccaatgtagctcagtaattcctgttactttacagacaggaaagttccagaaactttaagaacaaactctgaaagacctatgagcaaatggtgctgaatactttttttttaaagccacatttcattgtcttagtcaaagcaggattattaagtgattatttaaaattcgtttttttaaattagcaacttcaagtataacaactttgaaactggaataagtgtttattttctattaataaaaatgaattgtgacaaaa

SEQ ID NO: 153025 - DNA, 2380 bp, Homo sapiens
  Payload ID: 10103
  Gene Symbol: MEST
  Gene Name: mesoderm specific transcript
  Uniprot ID: Q5EB52
  ENST ID: ENST00000393187
  CDS Start-End: 160-1140
gggcgctgctgtggccaggcgtctggcatgctgaccacgtcgcgctgctgtaaaggaaacctgccccgcgcagcggcggtggctggagcgggagaaaccggactttgtgcaactttggccatagtggccatcccatgaatctgtttactagcttggtggatgagggagtggtgggtccaggtggggctgctggccgtgcccctgcttgctgcgtacctgcacatcccaccccctcagctctcccctgcccttcactcatggaagtcttcaggcaagtttttcacttacaagggactgcgtatcttctaccaagactctgtgggtgtggttggaagtccagagatagttgtgcttttacacggttttccaacatccagctacgactggtacaagatttgggaaggtctgaccttgaggtttcatcgggtgattgcccttgatttcttaggctttggcttcagtgacaaaccgagaccacatcactattccatatttgagcaggccagcatcgtggaagcgcttttgcggcatctggggctccagaaccgcaggatcaaccttctttctcatgactatggagatattgttgctcaggagcttctctacaggtacaagcagaatcgatctggtcggcttaccataaagagtctctgtctgtcaaatggaggtatctttcctgagactcaccgtccactccttctccaaaagctactcaaagatggaggtgtgctgtcacccatcctcacacgactgatgaacttctttgtattctctcgaggtctcaccccagtctttgggccgtatactcggccctctgagagtgagctgtgggacatgtgggcagggatccgcaacaatgacgggaacttagtcattgacagtctcttacagtacatcaatcagaggaagaagttcagaaggcgctgggtgggagctcttgcctctgtaactatccccattcattttatctatgggccattggatcctgtaaatccctatccagagtttttggagctgtacaggaaaacgctgccgcggtccacagtgtcgattctggatgaccacattagccactatccacagctagaggatcccatgggcttcttgaatgcatatatgggcttcatcaactccttctgagctggaaagagtagcttccctgtattacctcccctactcccttatgtgttgtgtattccacttaggaagaaatgcccaaaagaggtcctggccatcaaacataattctctcacaaagtccactttactcaaattggtgaacagtgtataggaagaagccagcaggagctctgactaaggttgacataatagtccacctcccattactttgatatctgatcaaatgtatagacttggctttgttttttgtgctattaggaaattctgatgagcattactattcactgatgcagaaagacgttcttttgcataaaagacttttttttaacactttggacttctctgaaatatttagaagtgctaatttctggcccacccccaacaggaattctatagtaaggaggaggagaaggggggctccttccctctcctcgaatgacgttatgggcacatgccttttaaaagttctttaagcaacacagagctgagtcctctttgtcatacctttggatttagtgtttcatcagctgtttttagttataaacattttgttaaaatagatattggtttaaatgatacagtattttaggtatgatttaagactatgatttacctatacattatatatattttataaagatactaaaccagcatacccttactctgccagagtagtgaagctaattaaacacatttggtttctgaataaattgaactaaatccaaactatttcctaaaatcacaggacattaaggaccaatagcatctgtgccagagatgtactgttattagctgggaagaccaattctaacagcaaataacagtctgagactcctcatacctcagtggttagaagcatgtctctcttgagctacagtagaggggaagggattgttgtgtagtcaagtcaccatgctgaatgtacactgattcctttatgatgactgcttaactccccactgcctgtcccagagaggctttccaatgtagctcagtaattcctgttactttacagacaggaaagttccagaaactttaagaacaaactctgaaagacctatgagcaaatggtgctgaatactttttttttaaagccacatttcattgtcttagtcaaagcaggattattaagtgattatttaaaattcgtttttttaaattagcaacttcaagtataacaactttgaaactggaataagtgtttattttctattaataaaaatgaattgtgacaaaagtgg

SEQ ID NO: 153026 - DNA, 390 bp, Homo sapiens
  Payload ID: 10103
  Gene Symbol: MEST
  Gene Name: mesoderm specific transcript
  ENST ID: ENST00000399874
  CDS Start-End: 38-390
tggttcagggagggggacagctgaagaaggtgtgaggatgagggagtggtgggtccaggtggggctgctggccgtgcccctgcttgctgcgtacctgcacatcccaccccctcagctctcccctgcccttcactcatggaagtcttcaggcaagtttttcacttacaagggactgcgtatcttctaccaagactctgtgggtgtggttggaagtccagagatagttgtgcttttacacggttttccaacatccagctacgactggtacaagatttgggaaggtctgaccttgaggtttcatcgggtgattgcccttgatttcttaggctttggcttcagtgacaaaccgagaccacatcactattccatatttgagcaggccagcatcgt

SEQ ID NO: 153027 - DNA, 555 bp, Homo sapiens
  Payload ID: 10103
  Gene Symbol: MEST
  Gene Name: mesoderm specific transcript
  ENST ID: ENST00000437637
  CDS Start-End: 176-555
attccgcgcccgctctgcctacttgaggagggggtgtcactcctgcccgcaatggaatgttcagaacgcgggacctccttgggttaggatttctagaccccgggatcgtcgtgggattgttcaccttggtttcgcgggttttcaaagtggttcgtctcgcggcgacgccatcaggatgagggagtggtgggtccaggtggggctgctggccgtgcccctgcttgctgcgtacctgcacatcccaccccctcagctctcccctgcccttcactcatggaagtcttcaggcaagtttttcacttacaagggactgcgtatcttctaccaagactctgtgggtgtggttggaagtccagagatagttgtgcttttacacggttttccaacatccagctacgactggtacaagatttgggaaggtctgaccttgaggtttcatcgggtgattgcccttgatttcttaggctttggcttcagtgacaaaccgagaccacatcactattccatatttgagcaggccagcatcgtggaagcgcttttgcggcatctggggct

SEQ ID NO: 153028 - DNA, 531 bp, Homo sapiens
  Payload ID: 10103
  Gene Symbol: MEST
  Gene Name: mesoderm specific transcript
  ENST ID: ENST00000458161
  CDS Start-End: 24-531
aaaatcaattctcacacgctgggatgagggagtggtgggtccaggtggggctgctggccgtgcccctgcttgctgcgtacctgcacatcccaccccctcagctctcccctgcccttcactcatggaagtcttcaggcaagtttttcacttacaagggactgcgtatcttctaccaagactctgtgggtgtggttggaagtccagagatagttgtgcttttacacggttttccaacatccagctacgactggtacaagatttgggaaggtctgaccttgaggtttcatcgggtgattgcccttgatttcttaggctttggcttcagtgacaaaccgagaccacatcactattccatatttgagcaggccagcatcgtggaagcgcttttgcggcatctggggctccagaaccgcaggatcaaccttctttctcatgactatggagatattgttgctcaggagcttctctacaggtacaagcagaatcgatctggtcggcttaccataaagagtctctgtctgtcaaatggag

SEQ ID NO: 153029 - DNA, 1455 bp, Homo sapiens
  Payload ID: 10103
  Gene Symbol: MEST
  Gene Name: mesoderm specific transcript
  ENST ID: ENST00000437945
  CDS Start-End: 215-1105
cacaccccggcacctcctctgcggcagctgcgcctcgcaagcgcagtgccgcagcgcacgccggagtggctgtagctgcccggcgcggcgccgccctgcgcgggctgtgggctgcgggctgcgcccccgctgctggccagctctgcacggctgcgggctctgcggcgcccggtgctctgcaacgctgcggcgggcggcatgggataacgcggccatggtgcgccgagatcgcctccgcaggatgagggagtggtgggtccaggtggggctgctggccgtgcccctgcttgctgcgtacctgcacatcccaccccctcagctctcccctgcccttcactcatggaagtcttcaggcaagtttttcacttacaagggactgcgtatcttctaccaagactctgtgggtgtggttggaagtccagagatagttgtgcttttacacggttttccaacatccagctacgactggtacaagatttgggaaggtctgaccttgaggtttcatcgggtgattgcccttgatttcttaggctttggcttcagtgacaaaccgagaccacatcactattccatatttgagcaggccagcatcgtggaagcgcttttgcggcatctggggctccagaaccgcaggatcaaccttctttctcatgactatggagatattgttgctcaggagcttctctacaggtacaagcagaatcgatctggtcggcttaccataaagagtctctgtctgtcaaatggaggtatctttcctgagactcaccgtccactccttctccaaaagctactcaaagatggaggtgtgctgtcacccatcctcacacgactgatgaacttctttgtattctctcgaggtctcaccccagtctttgggccgtatactcggccctctgagagtgagctgtgggacatgtgggcagggatccgcaacaatgacgggaacttagtcattgacagtctcttacagtacatcaatcagaggaagaagttcagaaggcgctgggtgggagctcttgcctctgtaactatccccagaaaacgctgccgcggtccacagtgtcgattctggatgaccacattagccactatccacagctagaggatcccatgggcttcttgaatgcatatatgggcttcatcaactccttctgagctggaaagagtagcttccctgtattacctcccctactcccttatgtgttgtgtattccacttaggaagaaatgcccaaaagaggtcctggccatcaaacataattctctcacaaagtccactttactcaaattggtgaacagtgtataggaagaagccagcaggagctctgactaaggttgacataatagtccacctcccattactttgatatctgatcaaatgtatagacttggctttgttttttgtgctattaggaaattctgatgagcattactattcactgatgcagaaaga

SEQ ID NO: 153030 - DNA, 794 bp, Homo sapiens
  Payload ID: 10103
  Gene Symbol: MEST
  Gene Name: mesoderm specific transcript
  ENST ID: ENST00000421001
  CDS Start-End: 156-794
gctgctgtggccaggcgtctggcatgctgaccacgtcgcgctgctgtaaaggaaacctgccccgcgcagcggcggtggctggagcgggagaaaccggactttgtgcaactttggccatagtggccatcccatgaatctgtttactagcttggtggatgagggagtggtgggtccaggtggggctgctggccgtgcccctgcttgctgcgtacctgcacatcccaccccctcagctctcccctgcccttcactcatggaagtcttcaggcaagtttttcacttacaagggactgcgtatcttctaccaagactctgtgggtgtggttggaagtccagagatagttgtgcttttacacggttttccaacatccagctacgactggtacaagatttgggaaggtctgaccttgaggtttcatcgggtgattgcccttgatttcttaggctttggcttcagtgacaaaccgagaccacatcactattccatatttgagcaggccagcatcgtggaagcgcttttgcggcatctggggctccagaaccgcaggatcaaccttctttctcatgactatggagatattgttgctcaggagcttctctacaggtacaagcagaatcgatctggtcggcttaccataaagagtctctgtctgtcaaatggaggtatctttcctgagactcaccgtccactccttctccaaaagctactcaaagatggaggtgtgctgtcacccatcctcacacgactgatgaacttctttgtattctctcgaggtctcaccccagtctttggg

SEQ ID NO: 153031 - DNA, 2158 bp, Homo sapiens
  Payload ID: 10103
  Gene Symbol: MEST
  Gene Name: mesoderm specific transcript
  Uniprot ID: Q5EB52
  ENST ID: ENST00000416162
  CDS Start-End: 44-922
ccgaaacatggagtcctgtaggcaaggtcttacctgaatcaggatgagggagtggtgggtccaggtggggctgctggccgtgcccctgcttgctgcgtacctgcacatcccaccccctcagctctcccctgcccttcactcatggaagtcttcaggcaagtttttcacttacaagggactgcgtatcttctaccaagactctgtgggtgtggttggaagtccagagatagttgtgcttttacacggttttccaacatccagctacgactggtacaagatttgggaaggtctgaccttgaggtttcatcgggtgattgcccttgatttcttaggctttggcttcagtgacaaaccgagaccacatcactattccatatttgagcaggccagcatcgtggaagcgcttttgcggcatctggggctccagaaccgcaggatcaaccttctttctcatgactatggagatattgttgctcaggagcttctctacaggtacaagcagaatcgatctggtcggcttaccataaagagtctctgtctgtcaaatggaggtatctttcctgagactcaccgtccactccttctccaaaagctactcaaagatggaggtgtgctgtcacccatcctcacacgactgatgaacttctttgtattctctcgaggtctcttacagtacatcaatcagaggaagaagttcagaaggcgctgggtgggagctcttgcctctgtaactatccccattcattttatctatgggccattggatcctgtaaatccctatccagagtttttggagctgtacaggaaaacgctgccgcggtccacagtgtcgattctggatgaccacattagccactatccacagctagaggatcccatgggcttcttgaatgcatatatgggcttcatcaactccttctgagctggaaagagtagcttccctgtattacctcccctactcccttatgtgttgtgtattccacttaggaagaaatgcccaaaagaggtcctggccatcaaacataattctctcacaaagtccactttactcaaattggtgaacagtgtataggaagaagccagcaggagctctgactaaggttgacataatagtccacctcccattactttgatatctgatcaaatgtatagacttggctttgttttttgtgctattaggaaattctgatgagcattactattcactgatgcagaaagacgttcttttgcataaaagacttttttttaacactttggacttctctgaaatatttagaagtgctaatttctggcccacccccaacaggaattctatagtaaggaggaggagaaggggggctccttccctctcctcgaatgacgttatgggcacatgccttttaaaagttctttaagcaacacagagctgagtcctctttgtcatacctttggatttagtgtttcatcagctgtttttagttataaacattttgttaaaatagatattggtttaaatgatacagtattttaggtatgatttaagactatgatttacctatacattatatatattttataaagatactaaaccagcatacccttactctgccagagtagtgaagctaattaaacacatttggtttctgaataaattgaactaaatccaaactatttcctaaaatcacaggacattaaggaccaatagcatctgtgccagagatgtactgttattagctgggaagaccaattctaacagcaaataacagtctgagactcctcatacctcagtggttagaagcatgtctctcttgagctacagtagaggggaagggattgttgtgtagtcaagtcaccatgctgaatgtacactgattcctttatgatgactgcttaactccccactgcctgtcccagagaggctttccaatgtagctcagtaattcctgttactttacagacaggaaagttccagaaactttaagaacaaactctgaaagacctatgagcaaatggtgctgaatactttttttttaaagccacatttcattgtcttagtcaaagcaggattattaagtgattatttaaaattcgtttttttaaattagcaacttcaagtataacaactttgaaactggaataagtgtttattttctattaataaaaatgaattgtgacaaaa

SEQ ID NO: 153032 - DNA, 882 bp, Homo sapiens
  Payload ID: 10103
  Gene Symbol: MEST
  Gene Name: mesoderm specific transcript
  ENST ID: ENST00000427521
  CDS Start-End: 186-882
gcatgcgcaaccggttctccgaaacatggagtcctgtaggcaaggtcttacctgaatcaggtaagaggcgggcggggaaggagtggagcctccccgtgcaccctcgcagcccgctccaggagtgggactagccctccttgggggtgtggctcgtgtgcgtgggccacaccagtcctaggggcaggatgagggagtggtgggtccaggtggggctgctggccgtgcccctgcttgctgcgtacctgcacatcccaccccctcagctctcccctgcccttcactcatggaagtcttcaggcaagtttttcacttacaagggactgcgtatcttctaccaagactctgtgggtgtggttggaagtccagagatagttgtgcttttacacggttttccaacatccagctacgactggtacaagatttgggaaggtctgaccttgaggtttcatcgggtgattgcccttgatttcttaggctttggcttcagtgacaaaccgagaccacatcactattccatatttgagcaggccagcatcgtggaagcgcttttgcggcatctggggctccagaaccgcaggatcaaccttctttctcatgactatggagatattgttgctcaggagcttctctacaggtacaagcagaatcgatctggtcggcttaccataaagagtctctgtctgtcaaatggaggtatctttcctgagactcaccgtccactccttctccaaaagctactcaaagatggaggtgtgctgtcacccatcctcacacgactgatgaacttctttgtattctctcgaggtctcttacagtacatcaatcagaggaagaagttcagaaggcgctgggtgggagctcttgcctctgtaactatcccca

SEQ ID NO: 153033 - DNA, 582 bp, Homo sapiens
  Payload ID: 10103
  Gene Symbol: MEST
  Gene Name: mesoderm specific transcript
  ENST ID: ENST00000433159
  CDS Start-End: 101-582
gactgtgcctgtgctgaagccctttcctcctcctagctcccaggcagctagaaaattgcctgtctgaaagaaagtagctgttttccttaggggactgtggatgagggagtggtgggtccaggtggggctgctggccgtgcccctgcttgctgcgtacctgcacatcccaccccctcagctctcccctgcccttcactcatggaagtcttcaggcaagtttttcacttacaagggactgcgtatcttctaccaagactctgtgggtgtggttggaagtccagagatagttgtgcttttacacggttttccaacatccagctacgactggtacaagatttgggaaggtctgaccttgaggtttcatcgggtgattgcccttgatttcttaggctttggcttcagtgacaaaccgagaccacatcactattccatatttgagcaggccagcatcgtggaagcgcttttgcggcatctggggctccagaaccgcaggatcaaccttctttctcatgactatggagatattgttgctcaggagcttctctacaggtacaagcagaatcgatctggtcggcttaccat

SEQ ID NO: 153034 - DNA, 764 bp, Homo sapiens
  Payload ID: 10103
  Gene Symbol: MEST
  Gene Name: mesoderm specific transcript
  ENST ID: ENST00000463263
  CDS Start-End: 1-522
cttctttctcatgactatggagatattgttgctcaggagcttctctacaggtacaagcagaatcgatctggtcggcttaccataaagagtctctgtctgtcaaatggaggtatctttcctgagactcaccgtccactccttctccaaaagctactcaaagatggaggtgtgctgtcacccatcctcacacgactgatgaacttctttctgtgggacatgtgggcagggatccgcaacaatgacgggaacttagtcattgacagtctcttacagtacatcaatcagaggaagaagttcagaaggcgctgggtgggagctcttgcctctgtaactatccccattcattttatctatgggccattggatcctgtaaatccctatccagagtttttggagctgtacaggaaaacgctgccgcggtccacagtgtcgattctggatgaccacattagccactatccacagctagaggatcccatgggcttcttgaatgcatatatgggcttcatcaactccttctgagctggaaagagtagcttccctgtattacctcccctactcccttatgtgttgtgtattccacttaggaagaaatgcccaaaagaggtcctggccatcaaacataattctctcacaaagtccactttactcaaattggtgaacagtgtataggaagaagccagcaggagctctgactaaggttgacataatagtccacctcccattactttgatatctgatcaaatgtatagacttggctttgt

SEQ ID NO: 153035 - DNA, 606 bp, Homo sapiens
  Payload ID: 10104
  Gene Symbol: MSGN1
  Gene Name: mesogenin 1
  Uniprot ID: A6NI15
  ENST ID: ENST00000281047
  CDS Start-End: 24-605
ccttctgcagctgtctcgcaggcatggacaacctgcgcgagactttcctcagcctcgaggatggcttgggctcctctgacagccctggcctgctgtcttcctgggactggaaggacagggcagggccctttgagctgaatcaggcctccccctctcagagcctttccccggctccatcgctggaatcctattcttcttctccctgtccagctgtggctgggctgccctgtgagcacggcggggccagcagtgggggcagcgaaggctgcagtgtcggtggggccagtggcctggtagaggtggactacaatatgttagctttccagcccacccaccttcagggcggtggtggccccaaggcccagaagggcaccaaagtcaggatgtctgtccagcggaggcggaaagccagcgagagggagaagctcaggatgaggaccttggcagatgccctgcacaccctccggaattacctgccacctgtctacagccagagaggccagcctctcaccaagatccagacactcaagtacaccatcaagtacatcggggaactcacagacctccttaaccgcggcagagagcccagagcccagagcgcgtgag

SEQ ID NO: 153036 - DNA, 2116 bp, Homo sapiens
  Payload ID: 10105
  Gene Symbol: MSLN
  Gene Name: mesothelin
  Uniprot ID: Q13421
  ENST ID: ENST00000382862
  CDS Start-End: 96-1988
ttctgcctggccggccactcccgtctgctgtgacgcgcggacagagagctaccggtggacccacggtgcctccctccctgggatctacacagaccatggccttgccaacggctcgacccctgttggggtcctgtgggacccccgccctcggcagcctcctgttcctgctcttcagcctcggatgggtgcagccctcgaggaccctggctggagagacagggcaggaggctgcgcccctggacggagtcctggccaacccacctaacatttccagcctctcccctcgccaactccttggcttcccgtgtgcggaggtgtccggcctgagcacggagcgtgtccgggagctggctgtggccttggcacagaagaatgtcaagctctcaacagagcagctgcgctgtctggctcaccggctctctgagccccccgaggacctggacgccctcccattggacctgctgctattcctcaacccagatgcgttctcggggccccaggcctgcacccgtttcttctcccgcatcacgaaggccaatgtggacctgctcccgaggggggctcccgagcgacagcggctgctgcctgcggctctggcctgctggggtgtgcgggggtctctgctgagcgaggctgatgtgcgggctctgggaggcctggcttgcgacctgcctgggcgctttgtggccgagtcggccgaagtgctgctaccccggctggtgagctgcccgggacccctggaccaggaccagcaggaggcagccagggcggctctgcagggcgggggacccccctacggccccccgtcgacatggtctgtctccacgatggacgctctgcggggcctgctgcccgtgctgggccagcccatcatccgcagcatcccgcagggcatcgtggccgcgtggcggcaacgctcctctcgggacccatcctggcggcagcctgaacggaccatcctccggccgcggttccggcgggaagtggagaagacagcctgtccttcaggcaagaaggcccgcgagatagacgagagcctcatcttctacaagaagtgggagctggaagcctgcgtggatgcggccctgctggccacccagatggaccgcgtgaacgccatccccttcacctacgagcagctggacgtcctaaagcataaactggatgagctctacccacaaggttaccccgagtctgtgatccagcacctgggctacctcttcctcaagatgagccctgaggacattcgcaagtggaatgtgacgtccctggagaccctgaaggctttgcttgaagtcaacaaagggcacgaaatgagtcctcaggctcctcggcggcccctcccacaggtggccaccctgatcgaccgctttgtgaagggaaggggccagctagacaaagacaccctagacaccctgaccgccttctaccctgggtacctgtgctccctcagccccgaggagctgagctccgtgccccccagcagcatctgggcggtcaggccccaggacctggacacgtgtgacccaaggcagctggacgtcctctatcccaaggcccgccttgctttccagaacatgaacgggtccgaatacttcgtgaagatccagtccttcctgggtggggcccccacggaggatttgaaggcgctcagtcagcagaatgtgagcatggacttggccacgttcatgaagctgcggacggatgcggtgctgccgttgactgtggctgaggtgcagaaacttctgggaccccacgtggagggcctgaaggcggaggagcggcaccgcccggtgcgggactggatcctacggcagcggcaggacgacctggacacgctggggctggggctacagggcggcatccccaacggctacctggtcctagacctcagcatgcaagaggccctctcggggacgccctgcctcctaggacctggacctgttctcaccgtcctggcactgctcctagcctccaccctggcctgagggccccactcccttgctggccccagccctgctggggatccccgcctggccaggagcaggcacgggtggtccccgttccaccccaagagaactcgcgctcagtaaacgggaacatgccccctgcagac

SEQ ID NO: 153037 - DNA, 2162 bp, Homo sapiens
  Payload ID: 10105
  Gene Symbol: MSLN
  Gene Name: mesothelin
  Uniprot ID: Q13421
  ENST ID: ENST00000545450
  CDS Start-End: 169-2037
tgccaggctctccacccccacttcccaattgaggaaaccgaggcagaggaggctcagcgccacgcactcctctttctgcctggccggccactcccgtctgctgtgacgcgcggacagagagctaccggtggacccacggtgcctccctccctgggatctacacagaccatggccttgccaacggctcgacccctgttggggtcctgtgggacccccgccctcggcagcctcctgttcctgctcttcagcctcggatgggtgcagccctcgaggaccctggctggagagacagggcaggaggctgcgcccctggacggagtcctggccaacccacctaacatttccagcctctcccctcgccaactccttggcttcccgtgtgcggaggtgtccggcctgagcacggagcgtgtccgggagctggctgtggccttggcacagaagaatgtcaagctctcaacagagcagctgcgctgtctggctcaccggctctctgagccccccgaggacctggacgccctcccattggacctgctgctattcctcaacccagatgcgttctcggggccccaggcctgcacccgtttcttctcccgcatcacgaaggccaatgtggacctgctcccgaggggggctcccgagcgacagcggctgctgcctgcggctctggcctgctggggtgtgcgggggtctctgctgagcgaggctgatgtgcgggctctgggaggcctggcttgcgacctgcctgggcgctttgtggccgagtcggccgaagtgctgctaccccggctggtgagctgcccgggacccctggaccaggaccagcaggaggcagccagggcggctctgcagggcgggggacccccctacggccccccgtcgacatggtctgtctccacgatggacgctctgcggggcctgctgcccgtgctgggccagcccatcatccgcagcatcccgcagggcatcgtggccgcgtggcggcaacgctcctctcgggacccatcctggcggcagcctgaacggaccatcctccggccgcggttccggcgggaagtggagaagacagcctgtccttcaggcaagaaggcccgcgagatagacgagagcctcatcttctacaagaagtgggagctggaagcctgcgtggatgcggccctgctggccacccagatggaccgcgtgaacgccatccccttcacctacgagcagctggacgtcctaaagcataaactggatgagctctacccacaaggttaccccgagtctgtgatccagcacctgggctacctcttcctcaagatgagccctgaggacattcgcaagtggaatgtgacgtccctggagaccctgaaggctttgcttgaagtcaacaaagggcacgaaatgagtcctcaggtggccaccctgatcgaccgctttgtgaagggaaggggccagctagacaaagacaccctagacaccctgaccgccttctaccctgggtacctgtgctccctcagccccgaggagctgagctccgtgccccccagcagcatctgggcggtcaggccccaggacctggacacgtgtgacccaaggcagctggacgtcctctatcccaaggcccgccttgctttccagaacatgaacgggtccgaatacttcgtgaagatccagtccttcctgggtggggcccccacggaggatttgaaggcgctcagtcagcagaatgtgagcatggacttggccacgttcatgaagctgcggacggatgcggtgctgccgttgactgtggctgaggtgcagaaacttctgggaccccacgtggagggcctgaaggcggaggagcggcaccgcccggtgcgggactggatcctacggcagcggcaggacgacctggacacgctggggctggggctacagggcggcatccccaacggctacctggtcctagacctcagcatgcaagaggccctctcggggacgccctgcctcctaggacctggacctgttctcaccgtcctggcactgctcctagcctccaccctggcctgagggccccactcccttgctggccccagccctgctggggatccccgcctggccaggagcaggcacgggtggtccccgttccaccccaagagaactcgcgctcagtaaacgggaacatgccccctgca

SEQ ID NO: 153038 - DNA, 1068 bp, Homo sapiens
  Payload ID: 10105
  Gene Symbol: MSLN
  Gene Name: mesothelin
  ENST ID: ENST00000566269
  CDS Start-End: 1-1003
atcctggcggcagcctgaacggaccatcctccggccgcggttccggcgggaagtggagaagacagcctgtccttcaggcaagaaggcccgcgagatagacgagagcctcatcttctacaagaagtgggagctggaagcctgcgtggatgcggccctgctggccacccagatggaccgcgtgaacgccatccccttcacctacgagcagctggacgtcctaaagcataaactggatgagctctacccacaaggttaccccgagtctgtgatccagcacctgggctacctcttcctcaagatgagccctgaggacattcgcaagtggaatgtgacgtccctggagaccctgaaggctttgcttgaagtcaacaaagggcacgaaatgagtcctcaggtggccaccctgatcgaccgctttgtgaagggaaggggccagctagacaaagacaccctagacaccctgaccgccttctaccctgggtacctgtgctccctcagccccgaggagctgagctccgtgccccccagcagcatctgggcggtcaggccccaggacctggacacgtgtgacccaaggcagctggacgtcctctatcccaaggcccgccttgctttccagaacatgaacgggtccgaatacttcgtgaagatccagtccttcctgggtggggcccccacggaggatttgaaggcgctcagtcagcagaatgtgagcatggacttggccacgttcatgaagctgcggacggatgcggtgctgccgttgactgtggctgaggtgcagaaacttctgggaccccacgtggagggcctgaaggcggaggagcggcaccgcccggtgcgggactggatcctacggcagcggcaggacgacctggacacgctggggctggggctacagggcggcatccccaacggctacctggtcctagacctcagcatgcaaggacctggacctgttctcaccgtcctggcactgctcctagcctccaccctggcctgagggccccactcccttgctggccccagccctgctggggatccccgcctggccaggagcaggcacgg

SEQ ID NO: 153039 - DNA, 2109 bp, Homo sapiens
  Payload ID: 10105
  Gene Symbol: MSLN
  Gene Name: mesothelin
  Uniprot ID: Q13421
  ENST ID: ENST00000563941
  CDS Start-End: 112-1980
ggctgccaggctctccacccccacttcccaattgaggaaaccgaggcagaggaggctcagagagctaccggtggacccacggtgcctccctccctgggatctacacagaccatggccttgccaacggctcgacccctgttggggtcctgtgggacccccgccctcggcagcctcctgttcctgctcttcagcctcggatgggtgcagccctcgaggaccctggctggagagacagggcaggaggctgcgcccctggacggagtcctggccaacccacctaacatttccagcctctcccctcgccaactccttggcttcccgtgtgcggaggtgtccggcctgagcacggagcgtgtccgggagctggctgtggccttggcacagaagaatgtcaagctctcaacagagcagctgcgctgtctggctcaccggctctctgagccccccgaggacctggacgccctcccattggacctgctgctattcctcaacccagatgcgttctcggggccccaggcctgcacccgtttcttctcccgcatcacgaaggccaatgtggacctgctcccgaggggggctcccgagcgacagcggctgctgcctgcggctctggcctgctggggtgtgcgggggtctctgctgagcgaggctgatgtgcgggctctgggaggcctggcttgcgacctgcctgggcgctttgtggccgagtcggccgaagtgctgctaccccggctggtgagctgcccgggacccctggaccaggaccagcaggaggcagccagggcggctctgcagggcgggggacccccctacggccccccgtcgacatggtctgtctccacgatggacgctctgcggggcctgctgcccgtgctgggccagcccatcatccgcagcatcccgcagggcatcgtggccgcgtggcggcaacgctcctctcgggacccatcctggcggcagcctgaacggaccatcctccggccgcggttccggcgggaagtggagaagacagcctgtccttcaggcaagaaggcccgcgagatagacgagagcctcatcttctacaagaagtgggagctggaagcctgcgtggatgcggccctgctggccacccagatggaccgcgtgaacgccatccccttcacctacgagcagctggacgtcctaaagcataaactggatgagctctacccacaaggttaccccgagtctgtgatccagcacctgggctacctcttcctcaagatgagccctgaggacattcgcaagtggaatgtgacgtccctggagaccctgaaggctttgcttgaagtcaacaaagggcacgaaatgagtcctcaggtggccaccctgatcgaccgctttgtgaagggaaggggccagctagacaaagacaccctagacaccctgaccgccttctaccctgggtacctgtgctccctcagccccgaggagctgagctccgtgccccccagcagcatctgggcggtcaggccccaggacctggacacgtgtgacccaaggcagctggacgtcctctatcccaaggcccgccttgctttccagaacatgaacgggtccgaatacttcgtgaagatccagtccttcctgggtggggcccccacggaggatttgaaggcgctcagtcagcagaatgtgagcatggacttggccacgttcatgaagctgcggacggatgcggtgctgccgttgactgtggctgaggtgcagaaacttctgggaccccacgtggagggcctgaaggcggaggagcggcaccgcccggtgcgggactggatcctacggcagcggcaggacgacctggacacgctggggctggggctacagggcggcatccccaacggctacctggtcctagacctcagcatgcaagaggccctctcggggacgccctgcctcctaggacctggacctgttctcaccgtcctggcactgctcctagcctccaccctggcctgagggccccactcccttgctggccccagccctgctggggatccccgcctggccaggagcaggcacgggtggtccccgttccaccccaagagaactcgcgctcagtaaacgggaacatgccccctgcagaca

SEQ ID NO: 153040 - DNA, 1084 bp, Homo sapiens
  Payload ID: 10105
  Gene Symbol: MSLN
  Gene Name: mesothelin
  ENST ID: ENST00000563651
  CDS Start-End: 87-1084
gccggccactcccgtctgctgtgacgcgcggacagagagctaccggtggacccacggtgcctccctccctgggatctacacagaccatggccttgccaacggctcgacccctgttggggtcctgtgggacccccgccctcggcagcctcctgttcctgctcttcagcctcggatgggtgcagccctcgaggaccctggctggagagacagggcaggaggctgcgcccctggacggagtcctggccaacccacctaacatttccagcctctcccctcgccaactccttggcttcccgtgtgcggaggtgtccggcctgagcacggagcgtgtccgggagctggctgtggccttggcacagaagaatgtcaagctctcaacagagcagctgcgctgtctggctcaccggctctctgagccccccgaggacctggacgccctcccattggacctgctgctattcctcaacccagatgcgttctcggggccccaggcctgcacccgtttcttctcccgcatcacgaaggccaatgtggacctgctcccgaggggggctcccgagcgacagcggctgctgcctgcggctctggcctgctggggtgtgcgggggtctctgctgagcgaggctgatgtgcgggctctgggaggcctggcttgcgacctgcctgggcgctttgtggccgagtcggccgaagtgctgctaccccggctgggcatcgtggccgcgtggcggcaacgctcctctcgggacccatcctggcggcagcctgaacggaccatcctccggccgcggttccggcgggaagtggagaagacagcctgtccttcaggcaagaaggcccgcgagatagacgagagcctcatcttctacaagaagtgggagctggaagcctgcgtggatgcggccctgctggccacccagatggaccgcgtgaacgccatccccttcacctacgagcagctggacgtcctaaagcataaactggatgagctctacccacaaggttaccccgagtctgtgatccagcacctgggctacctcttcctcaagatgagccctgaggacattcgcaagtggaatgtgac

SEQ ID NO: 153041 - DNA, 2418 bp, Homo sapiens
  Payload ID: 10105
  Gene Symbol: MSLN
  Gene Name: mesothelin
  Uniprot ID: Q13421
  ENST ID: ENST00000566549
  CDS Start-End: 418-2286
ccaggctctccacccccacttcccaattgaggaaaccgaggcagaggaggctcaggtgtggccaatcaccctgcacatcagagttaccctgggcagggcccactgagacctgggaggggccactcgggacctggagggctgggggctgcccgggcgttaggggtaaagctccctacccaactgcgcagaaggcctcagaggcctgggggctgggcttcccctttcacatcgccctttagaggcccacgtgtgggcattggcccgcgatctgaaaggggctgtcctgttcctcatgggcgctgccagcgccacgcactcctctttctgcctggccggccactcccgtctgctgtgacgcgcggacagagagctaccggtggacccacggtgcctccctccctgggatctacacagaccatggccttgccaacggctcgacccctgttggggtcctgtgggacccccgccctcggcagcctcctgttcctgctcttcagcctcggatgggtgcagccctcgaggaccctggctggagagacagggcaggaggctgcgcccctggacggagtcctggccaacccacctaacatttccagcctctcccctcgccaactccttggcttcccgtgtgcggaggtgtccggcctgagcacggagcgtgtccgggagctggctgtggccttggcacagaagaatgtcaagctctcaacagagcagctgcgctgtctggctcaccggctctctgagccccccgaggacctggacgccctcccattggacctgctgctattcctcaacccagatgcgttctcggggccccaggcctgcacccgtttcttctcccgcatcacgaaggccaatgtggacctgctcccgaggggggctcccgagcgacagcggctgctgcctgcggctctggcctgctggggtgtgcgggggtctctgctgagcgaggctgatgtgcgggctctgggaggcctggcttgcgacctgcctgggcgctttgtggccgagtcggccgaagtgctgctaccccggctggtgagctgcccgggacccctggaccaggaccagcaggaggcagccagggcggctctgcagggcgggggacccccctacggccccccgtcgacatggtctgtctccacgatggacgctctgcggggcctgctgcccgtgctgggccagcccatcatccgcagcatcccgcagggcatcgtggccgcgtggcggcaacgctcctctcgggacccatcctggcggcagcctgaacggaccatcctccggccgcggttccggcgggaagtggagaagacagcctgtccttcaggcaagaaggcccgcgagatagacgagagcctcatcttctacaagaagtgggagctggaagcctgcgtggatgcggccctgctggccacccagatggaccgcgtgaacgccatccccttcacctacgagcagctggacgtcctaaagcataaactggatgagctctacccacaaggttaccccgagtctgtgatccagcacctgggctacctcttcctcaagatgagccctgaggacattcgcaagtggaatgtgacgtccctggagaccctgaaggctttgcttgaagtcaacaaagggcacgaaatgagtcctcaggtggccaccctgatcgaccgctttgtgaagggaaggggccagctagacaaagacaccctagacaccctgaccgccttctaccctgggtacctgtgctccctcagccccgaggagctgagctccgtgccccccagcagcatctgggcggtcaggccccaggacctggacacgtgtgacccaaggcagctggacgtcctctatcccaaggcccgccttgctttccagaacatgaacgggtccgaatacttcgtgaagatccagtccttcctgggtggggcccccacggaggatttgaaggcgctcagtcagcagaatgtgagcatggacttggccacgttcatgaagctgcggacggatgcggtgctgccgttgactgtggctgaggtgcagaaacttctgggaccccacgtggagggcctgaaggcggaggagcggcaccgcccggtgcgggactggatcctacggcagcggcaggacgacctggacacgctggggctggggctacagggcggcatccccaacggctacctggtcctagacctcagcatgcaagaggccctctcggggacgccctgcctcctaggacctggacctgttctcaccgtcctggcactgctcctagcctccaccctggcctgagggccccactcccttgctggccccagccctgctggggatccccgcctggccaggagcaggcacgggtggtccccgttccaccccaagagaactcgcgctcagtaaacgggaacatgccccctgcagacacgt

SEQ ID NO: 153042 - DNA, 1195 bp, Homo sapiens
  Payload ID: 10105
  Gene Symbol: MSLN
  Gene Name: mesothelin
  ENST ID: ENST00000561896
  CDS Start-End: 1-1195
gtggagaagacagcctgtccttcaggcaagaaggcccgcgagatagacgagagcctcatcttctacaagaagtgggagctggaagcctgcgtggatgcggccctgctggccacccagatggaccgcgtgaacgccatccccttcacctacgagcagctggacgtcctaaagcataaactggatgagctctacccacaaggttaccccgagtctgtgatccagcacctgggctacctcttcctcaagatgagccctgaggacattcgcaagtggaatgtgacgtccctggagaccctgaaggctttgcttgaagtcaacaaagggcacgaaatgagtcctcaggtggccaccctgatcgaccgctttgtgaagggaaggggccagctagacaaagacaccctagacaccctgaccgccttctaccctgggtacctgtgctccctcagccccgaggagctgagctccgtgccccccagcagcatctgggcggtcaggccccaggacctggacacgtgtgacccaaggcagctggacgtcctctatcccaaggcccgccttgctttccagaacatgaacgggtccgaatacttcgtgaagatccagtccttcctgggtggggcccccacggaggatttgaaggcgctcagtcagcagaatgtgagcatggacttggccacgttcatgaagctgcggacggatgcggtgctgccgttgactgtggctgaggtgcagaaacttctgggaccccacgtggagggcctgaaggcggaggagcggcaccgcccggtgcgggactggatcctacggcagcggcaggacgacctggacacgctggggctggggctacagggcggcatccccaacggctacctggtcctagacctcagcatgcaaggtgggcggggcggccaggccagggctgggggcagagctgggggcgtggaggtgggcgctctgagtcacccctctctctgtagaggccctctcggggacgccctgcctcctaggacctggacctgttctcaccgtcctggcactgctcctagcctccaccctggcctgagggccccactcccttgctggccccagccctgctggggatccccgcctggccaggagcaggcacgggtggtccccgttccaccccaagagaactcgcgctcagtaaacgggaacatgccccctgcagacacgt

SEQ ID NO: 153043 - DNA, 550 bp, Homo sapiens
  Payload ID: 10105
  Gene Symbol: MSLN
  Gene Name: mesothelin
  ENST ID: ENST00000569566
  CDS Start-End: 41-550
ggcagggccagggtgcggacacaagctgcagacacagaccatggccttgccaacggctcgacccctgttggggtcctgtgggacccccgccctcggcagcctcctgttcctgctcttcagcctcggatgggtgcagccctcgaggaccctggctggagagacagggcaggaggctgcgcccctggacggagtcctggccaacccacctaacatttccagcctctcccctcgccaactccttggcttcccgtgtgcggaggtgtccggcctgagcacggagcgtgtccgggagctggctgtggccttggcacagaagaatgtcaagctctcaacagagcagctgcgctgtctggctcaccggctctctgagccccccgaggacctggacgccctcccattggacctgctgctattcctcaacccagatgcgttctcggggccccaggcctgcacccgtttcttctcccgcatcacgaaggccaatgtggacctgctcccgaggggggctcccgagcgacagcggctgctgcctgcggctctggcctgctgg

SEQ ID NO: 153044 - DNA, 2116 bp, Homo sapiens
  Payload ID: 10105
  Gene Symbol: MSLN
  Gene Name: mesothelin
  Uniprot ID: Q13421
  ENST ID: ENST00000620831
  CDS Start-End: 92-1984
ctctacttcccaggggaggaaaccgaggcacacctgtagccagggagcagggggtcccatcctgagtcactgccctccacagacacagaccatggccttgccaacggctcgacccctgttggggtcctgtgggacccccgccctcggcagcctcctgttcctgctcttcagcctcggatgggtgcagccctcgaggaccctggctggagagacagggcaggaggctgcgcccctggacggagtcctggccaacccacctaacatttccagcctctcccctcgccaactccttggcttcccgtgtgcggaggtgtccggcctgagcacggagcgtgtccgggagctggctgtggccttggcacagaagaatgtcaagctctcaacagagcagctgcgctgtctggctcaccggctctctgagccccccgaggacctggacgccctcccattggacctgctgctattcctcaacccagatgcgttctcggggccccaggcctgcacccgtttcttctcccgcatcacgaaggccaatgtggacctgctcccgaggggggctcccgagcgacagcggctgctgcctgcggctctggcctgctggggtgtgcgggggtctctgctgagcgaggctgatgtgcgggctctgggaggcctggcttgcgacctgcctgggcgctttgtggccgagtcggccgaagtgctgctaccccggctggtgagctgcccgggacccctggaccaggaccagcaggaggcagccagggcggctctgcagggcgggggacccccctacggccccccgtcgacatggtctgtctccacgatggacgctctgcggggcctgctgcccgtgctgggccagcccatcatccgcagcatcccgcagggcatcgtggccgcgtggcggcaacgctcctctcgggacccatcctggcggcagcctgaacggaccatcctccggccgcggttccggcgggaagtggagaagacagcctgtccttcaggcaagaaggcccgcgagatagacgagagcctcatcttctacaagaagtgggagctggaagcctgcgtggatgcggccctgctggccacccagatggaccgcgtgaacgccatccccttcacctacgagcagctggacgtcctaaagcataaactggatgagctctacccacaaggttaccccgagtctgtgatccagcacctgggctacctcttcctcaagatgagccctgaggacattcgcaagtggaatgtgacgtccctggagaccctgaaggctttgcttgaagtcaacaaagggcacgaaatgagtcctcaggctcctcggcggcccctcccacaggtggccaccctgatcgaccgctttgtgaagggaaggggccagctagacaaagacaccctagacaccctgaccgccttctaccctgggtacctgtgctccctcagccccgaggagctgagctccgtgccccccagcagcatctgggcggtcaggccccaggacctggacacgtgtgacccaaggcagctggacgtcctctatcccaaggcccgccttgctttccagaacatgaacgggtccgaatacttcgtgaagatccagtccttcctgggtggggcccccacggaggatttgaaggcgctcagtcagcagaatgtgagcatggacttggccacgttcatgaagctgcggacggatgcggtgctgccgttgactgtggctgaggtgcagaaacttctgggaccccacgtggagggcctgaaggcggaggagcggcaccgcccggtgcgggactggatcctacggcagcggcaggacgacctggacacgctggggctggggctacagggcggcatccccaacggctacctggtcctagacctcagcatgcaagaggccctctcggggacgccctgcctcctaggacctggacctgttctcaccgtcctggcactgctcctagcctccaccctggcctgagggccccactcccttgctggccccagccctgctggggatccccgcctggccaggagcaggcacgggtggtccccgttccaccccaagagaactcgcgctcagtaaacgggaacatgccccctgcagacacgt

SEQ ID NO: 153045 - DNA, 2109 bp, Homo sapiens
  Payload ID: 10106
  Gene Symbol: MSLNL
  Gene Name: mesothelin-like
  Uniprot ID: Q96KJ4
  ENST ID: ENST00000442466
  CDS Start-End: 1-2109
atggccgcagccgtcaccattcctggcccccgcattggtgccctgcagagctcaggcctcaccctcctgctgtcccttgctgcccactgctctgggccccaggccaaggttctttccccaggagggctggatgccagcggggccaacctgtgggccagtgccaactgctccctgctgcaaggcttctggtgccagccggccagccagctgccccgggaccagctctcagccctaatccagaggctggccttgctgcaggtccccctccaggcctggcagctcagctgcttggccaacctggcgtcacggtgcggcctccaggacgacttcacgctccacccacccaacctgctgctcttctacaacctgagccaggtgcgggaagccgactgccgggccttcatccgccgtgccgcccagggggacgtggagctgctgagccatctacccgaccagagggtcgccctgtggcgtgcggctgtggcctgcctggtgggcgctggcctgcgactcagcgcctccgaccagcaactgctcggggccctggtgtgtgacatggacgcgtccagcatcggtgccgcagacccccacatgctggagaacctgcggcgctgcccccggctgaccgctgcccagcgcattgcccttaactcactgctggccggtgggaagacctcgctcgggccccctggctcctggacactggaggggctacaggccctggggcccctggccacatacatcagccctcacctgtgggcgcaggtgcaggaggccgtgggcctgggcttcttccgcagcgtggtggcttcgtgccaggtgggaaggctcggccagcgcgaggccaggtgcttcgtcaccagcttcctggagtccaagaccaaaccagtgtcctccaggcccaggctcagcacaggcaacatcacggccgccacgctgcgggacgacctcttcctggtgcactacgactgtgcagagcttgagtcctgcctggatggctgcatcctcagaaccaacctggacaccctgttgcagcacctgctgcccactgagtgccagcatgtggtcaaggccaagctcgcacagatctacccacaaggcctcccggaggatcagctgcggctcatcacctcgctggtctacctctactcccgcaccgagatcggccagtggagcatcacctcccaggacacggtcatggctctgctggcctccgacgtggccctggagaaccagacagaggctgtgctgcagaagtttctggagcacaatggcacagtctccggtgccctgctgctggccatcgggggcacccgcctgtgctggatgagtcctcaccagatccagaccatccatccccaggagctccggctggccggggccctggacctctcctcctgcccccagagccggaaggacgtgctctacaccaaggcccatgagaccttcggcagcagcgggaccctagctgcctactaccgcctcatgcgcccctacctcggcggctcccctggtggagcccagcccccctcacccgtccccccaggcggcgccccggtggaggagctgcggcacctggcccacgccaacatctccatggacatcgacaccttcaccagcctgaaccccctcgagctgcagagcctggatgttggcaacgtgactgcgctgctgggccacaacgtgggagaccttcagaaggcccgcagccaccccaccgtcagggcctggctgcgcagcctcaacagctccaccctgggccagctcggcctggacgccagccccaccagccccactggcccagcccacggcaccagggggccccccagcaccacccaccaagtgctccatctggtccacacctcgggcctgcccacgaacgatgcccaggcctccacctcaggcagcctgtgggcccccctggggtacctgcccctggcgatggccctgccttgcagcctcctgtgcctgctgcactgggggacttgcatcctggtttctgtggacagcgttgcctcagggtggctgggttcacaggggtcaggtgcaggaaaaacagaggtgttagattcagctggacgcccacttgggctgacgggccagctctag

SEQ ID NO: 153046 - DNA, 2259 bp, Homo sapiens
  Payload ID: 10106
  Gene Symbol: MSLNL
  Gene Name: mesothelin-like
  ENST ID: ENST00000543963
  CDS Start-End: 1-2259
tcctggacccactgcccttggccccagcaccttcctgccctgggacgtctcagccaggatgaccagtgcacgccgccgcacagacgtgggccccagagtgggtgccctgcagagctcaggcctcaccctcctgctgtcccttgctgcccactgctctgggccccaggccaaggttctttccccaggagggctggatgccagcggggccaacctgtgggccagtgccaactgctccctgctgcaaggcttctggtgccagccggccagccagctgccccgggaccagctctcagccctaatccagaggctggccttgctgcaggtccccctccaggcctggcaggtgagcgggaaggagtctgcttggccaacctggcgtcacggtgcggcctccaggacgacttcacgctccacccacccaacctgctgctcttctacaacctgagccaggtgcgggaagccgactgccgggccttcatccgccgtgccgcccagggggacgtggagctgctgagccatctacccgaccagagggtcgccctgtggcgtgcggctgtggcctgcctggtgggcgctgggtggggatgggcccggtgcattggaggcagcctcccgctgggcgccgacctgctggccctgcagggggtggcccgcctgcgactcagcgcctccgaccagcaactgctcggggccctggtgtgtgacatggacgcgtccagcatcggtgccgcagacccccacatgctggagaacctgcggcgctgcccccggctgaccgctgcccagcgcattgcccttaactcactgctggccggtgggaagacctcgctcgggccccctggctcctggacactggaggggctacaggccctggggcccctggccacatacatcagccctcacctgtgggcgcaggtgcaggaggccgtgggcctgggcttcttccgcagcgtggtggcttcgtgccaggtgggaaggctcggccagcgcgaggccaggtgcttcgtcaccagcttcctggagtccaagaccaaaccagtgtcctccaggcccaggctcagcacaggcaacatcacggccgccacgctgcgggacgacctcttcctggtgcactacgactgtgcagagcttgagtcctgcctggatggctgcatcctcagaaccaacctggacaccctgttgcagcacctgctgcccactgagtgccagcatgtggtcaaggccaagctcgcacagatctacccacaaggcctcccggaggatcagctgcggctcatcacctcgctggtctacctctactcccgcaccgagatcggccagtggagcatcacctcccaggacacggtcatggctctgctggcctccgacgtggccctggagaaccagacagaggctgtgctgcagaagtttctggagcacaatggcacagtctccggtgccctgctgctggccatcgggggcacccgcctgtgctggatgagtcctcaccagatccagaccatccatccccaggagctccggctggccggggccctggacctctcctcctgcccccagagccggaaggacgtgctctacaccaaggcccatgagaccttcggcagcagcgggaccctagctgcctactaccgcctcatgcgcccctacctcggcggctcccctggtggagcccagcccccctcacccgtccccccaggcggcgccccggtggaggagctgcggcacctggcccacgccaacatctccatggacatcgacaccttcaccagcctgaaccccctcgagctgcagagcctggatgttggcaacgtgactgcgctgctgggccacaacgtgggagaccttcagaaggcccgcagccaccccaccgtcagggcctggctgcgcagcctcaacagctccaccctgggccagctcggcctggacgccagccccaccagccccactggcccagcccacggcaccagggggccccccagcaccacccaccaagtgctccatctggtccacacctcgggcctgcccacgaacgatgcccaggcctccacctcaggcagcctgtgggcccccctggggtacctgcccctggcgatggccctgccttgcagcctcctgtgcctgctgcactgggggacttgcatcctggtttctgtggacagcgttgcctcagggtggctgggttcacaggggtcaggtgcaggaaaaacagaggtgttagattcagctggacgcccacttgggctgacgggccagctctag

SEQ ID NO: 153047 - DNA, 4632 bp, Homo sapiens
  Payload ID: 10107
  Gene Symbol: MET
  Gene Name: MET proto-oncogene, receptor tyrosine kinase
  Uniprot ID: P08581
  ENST ID: ENST00000318493
  CDS Start-End: 188-4414
gccctcgccgcccgcggcgccccgagcgctttgtgagcagatgcggagccgagtggagggcgcgagccagatgcggggcgacagctgacttgctgagaggaggcggggaggcgcggagcgcgcgtgtggtccttgcgccgctgacttctccactggttcctgggcaccgaaagataaacctctcataatgaaggcccccgctgtgcttgcacctggcatcctcgtgctcctgtttaccttggtgcagaggagcaatggggagtgtaaagaggcactagcaaagtccgagatgaatgtgaatatgaagtatcagcttcccaacttcaccgcggaaacacccatccagaatgtcattctacatgagcatcacattttccttggtgccactaactacatttatgttttaaatgaggaagaccttcagaaggttgctgagtacaagactgggcctgtgctggaacacccagattgtttcccatgtcaggactgcagcagcaaagccaatttatcaggaggtgtttggaaagataacatcaacatggctctagttgtcgacacctactatgatgatcaactcattagctgtggcagcgtcaacagagggacctgccagcgacatgtctttccccacaatcatactgctgacatacagtcggaggttcactgcatattctccccacagatagaagagcccagccagtgtcctgactgtgtggtgagcgccctgggagccaaagtcctttcatctgtaaaggaccggttcatcaacttctttgtaggcaataccataaattcttcttatttcccagatcatccattgcattcgatatcagtgagaaggctaaaggaaacgaaagatggttttatgtttttgacggaccagtcctacattgatgttttacctgagttcagagattcttaccccattaagtatgtccatgcctttgaaagcaacaattttatttacttcttgacggtccaaagggaaactctagatgctcagacttttcacacaagaataatcaggttctgttccataaactctggattgcattcctacatggaaatgcctctggagtgtattctcacagaaaagagaaaaaagagatccacaaagaaggaagtgtttaatatacttcaggctgcgtatgtcagcaagcctggggcccagcttgctagacaaataggagccagcctgaatgatgacattcttttcggggtgttcgcacaaagcaagccagattctgccgaaccaatggatcgatctgccatgtgtgcattccctatcaaatatgtcaacgacttcttcaacaagatcgtcaacaaaaacaatgtgagatgtctccagcatttttacggacccaatcatgagcactgctttaataggacacttctgagaaattcatcaggctgtgaagcgcgccgtgatgaatatcgaacagagtttaccacagctttgcagcgcgttgacttattcatgggtcaattcagcgaagtcctcttaacatctatatccaccttcattaaaggagacctcaccatagctaatcttgggacatcagagggtcgcttcatgcaggttgtggtttctcgatcaggaccatcaacccctcatgtgaattttctcctggactcccatccagtgtctccagaagtgattgtggagcatacattaaaccaaaatggctacacactggttatcactgggaagaagatcacgaagatcccattgaatggcttgggctgcagacatttccagtcctgcagtcaatgcctctctgccccaccctttgttcagtgtggctggtgccacgacaaatgtgtgcgatcggaggaatgcctgagcgggacatggactcaacagatctgtctgcctgcaatctacaaggttttcccaaatagtgcaccccttgaaggagggacaaggctgaccatatgtggctgggactttggatttcggaggaataataaatttgatttaaagaaaactagagttctccttggaaatgagagctgcaccttgactttaagtgagagcacgatgaatacattgaaatgcacagttggtcctgccatgaataagcatttcaatatgtccataattatttcaaatggccacgggacaacacaatacagtacattctcctatgtggatcctgtaataacaagtatttcgccgaaatacggtcctatggctggtggcactttacttactttaactggaaattacctaaacagtgggaattctagacacatttcaattggtggaaaaacatgtactttaaaaagtgtgtcaaacagtattcttgaatgttataccccagcccaaaccatttcaactgagtttgctgttaaattgaaaattgacttagccaaccgagagacaagcatcttcagttaccgtgaagatcccattgtctatgaaattcatccaaccaaatcttttattagtacttggtggaaagaacctctcaacattgtcagttttctattttgctttgccagtggtgggagcacaataacaggtgttgggaaaaacctgaattcagttagtgtcccgagaatggtcataaatgtgcatgaagcaggaaggaactttacagtggcatgtcaacatcgctctaattcagagataatctgttgtaccactccttccctgcaacagctgaatctgcaactccccctgaaaaccaaagcctttttcatgttagatgggatcctttccaaatactttgatctcatttatgtacataatcctgtgtttaagccttttgaaaagccagtgatgatctcaatgggcaatgaaaatgtactggaaattaagggaaatgatattgaccctgaagcagttaaaggtgaagtgttaaaagttggaaataagagctgtgagaatatacacttacattctgaagccgttttatgcacggtccccaatgacctgctgaaattgaacagcgagctaaatatagagtggaagcaagcaatttcttcaaccgtccttggaaaagtaatagttcaaccagatcagaatttcacaggattgattgctggtgttgtctcaatatcaacagcactgttattactacttgggtttttcctgtggctgaaaaagagaaagcaaattaaagatctgggcagtgaattagttcgctacgatgcaagagtacacactcctcatttggataggcttgtaagtgcccgaagtgtaagcccaactacagaaatggtttcaaatgaatctgtagactaccgagctacttttccagaagatcagtttcctaattcatctcagaacggttcatgccgacaagtgcagtatcctctgacagacatgtcccccatcctaactagtggggactctgatatatccagtccattactgcaaaatactgtccacattgacctcagtgctctaaatccagagctggtccaggcagtgcagcatgtagtgattgggcccagtagcctgattgtgcatttcaatgaagtcataggaagagggcattttggttgtgtatatcatgggactttgttggacaatgatggcaagaaaattcactgtgctgtgaaatccttgaacagaatcactgacataggagaagtttcccaatttctgaccgagggaatcatcatgaaagattttagtcatcccaatgtcctctcgctcctgggaatctgcctgcgaagtgaagggtctccgctggtggtcctaccatacatgaaacatggagatcttcgaaatttcattcgaaatgagactcataatccaactgtaaaagatcttattggctttggtcttcaagtagccaaaggcatgaaatatcttgcaagcaaaaagtttgtccacagagacttggctgcaagaaactgtatgctggatgaaaaattcacagtcaaggttgctgattttggtcttgccagagacatgtatgataaagaatactatagtgtacacaacaaaacaggtgcaaagctgccagtgaagtggatggctttggaaagtctgcaaactcaaaagtttaccaccaagtcagatgtgtggtcctttggcgtgctcctctgggagctgatgacaagaggagccccaccttatcctgacgtaaacacctttgatataactgtttacttgttgcaagggagaagactcctacaacccgaatactgcccagaccccttatatgaagtaatgctaaaatgctggcaccctaaagccgaaatgcgcccatccttttctgaactggtgtcccggatatcagcgatcttctctactttcattggggagcactatgtccatgtgaacgctacttatgtgaacgtaaaatgtgtcgctccgtatccttctctgttgtcatcagaagataacgctgatgatgaggtggacacacgaccagcctccttctgggagacatcatagtgctagtactatgtcaaagcaacagtccacactttgtccaatggttttttcactgcctgacctttaaaaggccatcgatattctttgctcttgccaaaattgcactattataggacttgtattgttatttaaattactggattctaaggaatttcttatctgacagagcatcagaaccagaggcttggtcccacaggccacggaccaatggcctgcag

SEQ ID NO: 153048 - DNA, 6635 bp, Homo sapiens
  Payload ID: 10107
  Gene Symbol: MET
  Gene Name: MET proto-oncogene, receptor tyrosine kinase
  Uniprot ID: P08581
  ENST ID: ENST00000397752
  CDS Start-End: 201-4373
aggtgacccggaggccctcgccgcccgcggcgccccgagcgctttgtgagcagatgcggagccgagtggagggcgcgagccagatgcggggcgacagctgacttgctgagaggaggcggggaggcgcggagcgcgcgtgtggtccttgcgccgctgacttctccactggttcctgggcaccgaaagataaacctctcataatgaaggcccccgctgtgcttgcacctggcatcctcgtgctcctgtttaccttggtgcagaggagcaatggggagtgtaaagaggcactagcaaagtccgagatgaatgtgaatatgaagtatcagcttcccaacttcaccgcggaaacacccatccagaatgtcattctacatgagcatcacattttccttggtgccactaactacatttatgttttaaatgaggaagaccttcagaaggttgctgagtacaagactgggcctgtgctggaacacccagattgtttcccatgtcaggactgcagcagcaaagccaatttatcaggaggtgtttggaaagataacatcaacatggctctagttgtcgacacctactatgatgatcaactcattagctgtggcagcgtcaacagagggacctgccagcgacatgtctttccccacaatcatactgctgacatacagtcggaggttcactgcatattctccccacagatagaagagcccagccagtgtcctgactgtgtggtgagcgccctgggagccaaagtcctttcatctgtaaaggaccggttcatcaacttctttgtaggcaataccataaattcttcttatttcccagatcatccattgcattcgatatcagtgagaaggctaaaggaaacgaaagatggttttatgtttttgacggaccagtcctacattgatgttttacctgagttcagagattcttaccccattaagtatgtccatgcctttgaaagcaacaattttatttacttcttgacggtccaaagggaaactctagatgctcagacttttcacacaagaataatcaggttctgttccataaactctggattgcattcctacatggaaatgcctctggagtgtattctcacagaaaagagaaaaaagagatccacaaagaaggaagtgtttaatatacttcaggctgcgtatgtcagcaagcctggggcccagcttgctagacaaataggagccagcctgaatgatgacattcttttcggggtgttcgcacaaagcaagccagattctgccgaaccaatggatcgatctgccatgtgtgcattccctatcaaatatgtcaacgacttcttcaacaagatcgtcaacaaaaacaatgtgagatgtctccagcatttttacggacccaatcatgagcactgctttaataggacacttctgagaaattcatcaggctgtgaagcgcgccgtgatgaatatcgaacagagtttaccacagctttgcagcgcgttgacttattcatgggtcaattcagcgaagtcctcttaacatctatatccaccttcattaaaggagacctcaccatagctaatcttgggacatcagagggtcgcttcatgcaggttgtggtttctcgatcaggaccatcaacccctcatgtgaattttctcctggactcccatccagtgtctccagaagtgattgtggagcatacattaaaccaaaatggctacacactggttatcactgggaagaagatcacgaagatcccattgaatggcttgggctgcagacatttccagtcctgcagtcaatgcctctctgccccaccctttgttcagtgtggctggtgccacgacaaatgtgtgcgatcggaggaatgcctgagcgggacatggactcaacagatctgtctgcctgcaatctacaaggttttcccaaatagtgcaccccttgaaggagggacaaggctgaccatatgtggctgggactttggatttcggaggaataataaatttgatttaaagaaaactagagttctccttggaaatgagagctgcaccttgactttaagtgagagcacgatgaatacattgaaatgcacagttggtcctgccatgaataagcatttcaatatgtccataattatttcaaatggccacgggacaacacaatacagtacattctcctatgtggatcctgtaataacaagtatttcgccgaaatacggtcctatggctggtggcactttacttactttaactggaaattacctaaacagtgggaattctagacacatttcaattggtggaaaaacatgtactttaaaaagtgtgtcaaacagtattcttgaatgttataccccagcccaaaccatttcaactgagtttgctgttaaattgaaaattgacttagccaaccgagagacaagcatcttcagttaccgtgaagatcccattgtctatgaaattcatccaaccaaatcttttattagtggtgggagcacaataacaggtgttgggaaaaacctgaattcagttagtgtcccgagaatggtcataaatgtgcatgaagcaggaaggaactttacagtggcatgtcaacatcgctctaattcagagataatctgttgtaccactccttccctgcaacagctgaatctgcaactccccctgaaaaccaaagcctttttcatgttagatgggatcctttccaaatactttgatctcatttatgtacataatcctgtgtttaagccttttgaaaagccagtgatgatctcaatgggcaatgaaaatgtactggaaattaagggaaatgatattgaccctgaagcagttaaaggtgaagtgttaaaagttggaaataagagctgtgagaatatacacttacattctgaagccgttttatgcacggtccccaatgacctgctgaaattgaacagcgagctaaatatagagtggaagcaagcaatttcttcaaccgtccttggaaaagtaatagttcaaccagatcagaatttcacaggattgattgctggtgttgtctcaatatcaacagcactgttattactacttgggtttttcctgtggctgaaaaagagaaagcaaattaaagatctgggcagtgaattagttcgctacgatgcaagagtacacactcctcatttggataggcttgtaagtgcccgaagtgtaagcccaactacagaaatggtttcaaatgaatctgtagactaccgagctacttttccagaagatcagtttcctaattcatctcagaacggttcatgccgacaagtgcagtatcctctgacagacatgtcccccatcctaactagtggggactctgatatatccagtccattactgcaaaatactgtccacattgacctcagtgctctaaatccagagctggtccaggcagtgcagcatgtagtgattgggcccagtagcctgattgtgcatttcaatgaagtcataggaagagggcattttggttgtgtatatcatgggactttgttggacaatgatggcaagaaaattcactgtgctgtgaaatccttgaacagaatcactgacataggagaagtttcccaatttctgaccgagggaatcatcatgaaagattttagtcatcccaatgtcctctcgctcctgggaatctgcctgcgaagtgaagggtctccgctggtggtcctaccatacatgaaacatggagatcttcgaaatttcattcgaaatgagactcataatccaactgtaaaagatcttattggctttggtcttcaagtagccaaaggcatgaaatatcttgcaagcaaaaagtttgtccacagagacttggctgcaagaaactgtatgctggatgaaaaattcacagtcaaggttgctgattttggtcttgccagagacatgtatgataaagaatactatagtgtacacaacaaaacaggtgcaaagctgccagtgaagtggatggctttggaaagtctgcaaactcaaaagtttaccaccaagtcagatgtgtggtcctttggcgtgctcctctgggagctgatgacaagaggagccccaccttatcctgacgtaaacacctttgatataactgtttacttgttgcaagggagaagactcctacaacccgaatactgcccagaccccttatatgaagtaatgctaaaatgctggcaccctaaagccgaaatgcgcccatccttttctgaactggtgtcccggatatcagcgatcttctctactttcattggggagcactatgtccatgtgaacgctacttatgtgaacgtaaaatgtgtcgctccgtatccttctctgttgtcatcagaagataacgctgatgatgaggtggacacacgaccagcctccttctgggagacatcatagtgctagtactatgtcaaagcaacagtccacactttgtccaatggttttttcactgcctgacctttaaaaggccatcgatattctttgctcttgccaaaattgcactattataggacttgtattgttatttaaattactggattctaaggaatttcttatctgacagagcatcagaaccagaggcttggtcccacaggccacggaccaatggcctgcagccgtgacaacactcctgtcatattggagtccaaaacttgaattctgggttgaattttttaaaaatcaggtaccacttgatttcatatgggaaattgaagcaggaaatattgagggcttcttgatcacagaaaactcagaagagatagtaatgctcaggacaggagcggcagccccagaacaggccactcatttagaattctagtgtttcaaaacacttttgtgtgttgtatggtcaataacatttttcattactgatggtgtcattcacccattaggtaaacattcccttttaaatgtttgtttgttttttgagacaggatctcactctgttgccagggctgtagtgcagtggtgtgatcatagctcactgcaacctccacctcccaggctcaagcctcccgaatagctgggactacaggcgcacaccaccatccccggctaatttttgtattttttgtagagacggggttttgccatgttgccaaggctggtttcaaactcctggactcaagaaatccacccacctcagcctcccaaagtgctaggattacaggcatgagccactgcgcccagcccttataaatttttgtatagacattcctttggttggaagaatatttataggcaatacagtcaaagtttcaaaatagcatcacacaaaacatgtttataaatgaacaggatgtaatgtacatagatgacattaagaaaatttgtatgaaataatttagtcatcatgaaatatttagttgtcatataaaaacccactgtttgagaatgatgctactctgatctaatgaatgtgaacatgtagatgttttgtgtgtatttttttaaatgaaaactcaaaataagacaagtaatttgttgataaatatttttaaagataactcagcatgtttgtaaagcaggatacattttactaaaaggttcattggttccaatcacagctcataggtagagcaaagaaagggtggatggattgaaaagattagcctctgtctcggtggcaggttcccacctcgcaagcaattggaaacaaaacttttggggagttttattttgcattagggtgtgttttatgttaagcaaaacatactttagaaacaaatgaaaaaggcaattgaaaatcccagctatttcacctagatggaatagccaccctgagcagaactttgtgatgcttcattctgtggaattttgtgcttgctactgtatagtgcatgtggtgtaggttactctaactggttttgtcgacgtaaacatttaaagtgttatattttttataaaaatgtttatttttaatgatatgagaaaaattttgttaggccacaaaaacactgcactgtgaacattttagaaaaggtatgtcagactgggattaatgacagcatgattttcaatgactgtaaattgcgataaggaaatgtactgattgccaatacaccccaccctcattacatcatcaggacttgaagccaagggttaacccagcaagctacaaagagggtgtgtcacactgaaactcaatagttgagtttggctgttgttgcaggaaaatgattataactaaaagctctctgatagtgcagagacttaccagaagacacaaggaattgtactgaagagctattacaatccaaatattgccgtttcataaatgtaataagtaatactaattcacagagtattgtaaatggtggatgacaaaagaaaatctgctctgtggaaagaaagaactgtctctaccagggtcaagagcatgaacgcatcaatagaaagaactcggggaaacatcccatcaacaggactacacacttgtatatacattcttgagaacactgcaatgtgaaaatcacgtttgctatttataaacttgtccttagattaatgtgtctggacagattgtgggagtaagtgattcttctaagaattagatacttgtcactgcctatacctgcagctgaactgaatggtacttcgtatgttaatagttgttctgataaatcatgcaattaaagtaaagtgatgcaacatcttgta

SEQ ID NO: 153049 - DNA, 475 bp, Homo sapiens
  Payload ID: 10107
  Gene Symbol: MET
  Gene Name: MET proto-oncogene, receptor tyrosine kinase
  ENST ID: ENST00000454623
  CDS Start-End: 1-475
gcagttaaaggtgaagtgttaaaagttggaaataagagctgtgagaatatacacttacattctgaagccgttttatgcacggtccccaatgacctgctgaaattgaacagcgagctaaatatagagtggaagcaagcaatttcttcaaccgtccttggaaaagtaatagttcaaccagatcagaatttcacaggattgattgctggtgttgtctcaatatcaacagcactgttattactacttgggtttttcctgtggctgaaaaagagaaagcaaattaaagatcagtttcctaattcatctcagaacggttcatgccgacaagtgcagtatcctctgacagacatgtcccccatcctaactagtggggactctgatatatccagtccattactgcaaaatactgtccacattgacctcagtgctctaaatccagagctggtccaggcagtgcagcatgtagtgattgggccca

SEQ ID NO: 153050 - DNA, 688 bp, Homo sapiens
  Payload ID: 10107
  Gene Symbol: MET
  Gene Name: MET proto-oncogene, receptor tyrosine kinase
  ENST ID: ENST00000422097
  CDS Start-End: 1-645
gctgttaaattgaaaattgacttagccaaccgagagacaagcatcttcagttaccgtgaagatcccattgtctatgaaattcatccaaccaaatcttttattagtggtgggagcacaataacaggtgttgggaaaaacctgaattcagttagtgtcccgagaatggtcataaatgtgcatgaagcaggaaggaactttacagtggcatgtcaacatcgctctaattcagagataatctgttgtaccactccttccctgcaacagctgaatctgcaactccccctgaaaaccaaagcctttttcatgttagatgggatcctttccaaatactttgatctcatttatgtacataatcctgtgtttaagccttttgaaaagccagtgatgatctcaatgggcaatgaaaatgtactggaaattaagggaaatgatattgaccctgaagcagttaaaggtgaagtgttaaaagttggaaataagagctgtgagaatatacacttacattctgaagccgttttatgcacggtccccaatgacctgctgaaattgaacagcgagctaaatatagaggtgggattcctgcattcctctcatgatgtaaataaggaagccagtgtaattatgttattctcaggcttaaaataaatcattaaagctcatttatgtgtgggttttggctcatcaactc

SEQ ID NO: 153051 - DNA, 2295 bp, Homo sapiens
  Payload ID: 10107
  Gene Symbol: MET
  Gene Name: MET proto-oncogene, receptor tyrosine kinase
  Uniprot ID: P08581
  ENST ID: ENST00000436117
  CDS Start-End: 1-2295
atgaaggcccccgctgtgcttgcacctggcatcctcgtgctcctgtttaccttggtgcagaggagcaatggggagtgtaaagaggcactagcaaagtccgagatgaatgtgaatatgaagtatcagcttcccaacttcaccgcggaaacacccatccagaatgtcattctacatgagcatcacattttccttggtgccactaactacatttatgttttaaatgaggaagaccttcagaaggttgctgagtacaagactgggcctgtgctggaacacccagattgtttcccatgtcaggactgcagcagcaaagccaatttatcaggaggtgtttggaaagataacatcaacatggctctagttgtcgacacctactatgatgatcaactcattagctgtggcagcgtcaacagagggacctgccagcgacatgtctttccccacaatcatactgctgacatacagtcggaggttcactgcatattctccccacagatagaagagcccagccagtgtcctgactgtgtggtgagcgccctgggagccaaagtcctttcatctgtaaaggaccggttcatcaacttctttgtaggcaataccataaattcttcttatttcccagatcatccattgcattcgatatcagtgagaaggctaaaggaaacgaaagatggttttatgtttttgacggaccagtcctacattgatgttttacctgagttcagagattcttaccccattaagtatgtccatgcctttgaaagcaacaattttatttacttcttgacggtccaaagggaaactctagatgctcagacttttcacacaagaataatcaggttctgttccataaactctggattgcattcctacatggaaatgcctctggagtgtattctcacagaaaagagaaaaaagagatccacaaagaaggaagtgtttaatatacttcaggctgcgtatgtcagcaagcctggggcccagcttgctagacaaataggagccagcctgaatgatgacattcttttcggggtgttcgcacaaagcaagccagattctgccgaaccaatggatcgatctgccatgtgtgcattccctatcaaatatgtcaacgacttcttcaacaagatcgtcaacaaaaacaatgtgagatgtctccagcatttttacggacccaatcatgagcactgctttaataggacacttctgagaaattcatcaggctgtgaagcgcgccgtgatgaatatcgaacagagtttaccacagctttgcagcgcgttgacttattcatgggtcaattcagcgaagtcctcttaacatctatatccaccttcattaaaggagacctcaccatagctaatcttgggacatcagagggtcgcttcatgcaggttgtggtttctcgatcaggaccatcaacccctcatgtgaattttctcctggactcccatccagtgtctccagaagtgattgtggagcatacattaaaccaaaatggctacacactggttatcactgggaagaagatcacgaagatcccattgaatggcttgggctgcagacatttccagtcctgcagtcaatgcctctctgccccaccctttgttcagtgtggctggtgccacgacaaatgtgtgcgatcggaggaatgcctgagcgggacatggactcaacagatctgtctgcctgcaatctacaaggttttcccaaatagtgcaccccttgaaggagggacaaggctgaccatatgtggctgggactttggatttcggaggaataataaatttgatttaaagaaaactagagttctccttggaaatgagagctgcaccttgactttaagtgagagcacgatgaatacattgaaatgcacagttggtcctgccatgaataagcatttcaatatgtccataattatttcaaatggccacgggacaacacaatacagtacattctcctatgtggatcctgtaataacaagtatttcgccgaaatacggtcctatggctggtggcactttacttactttaactggaaattacctaaacagtgggaattctagacacatttcaattggtggaaaaacatgtactttaaaaagtgtgtcaaacagtattcttgaatgttataccccagcccaaaccatttcaactgagtttgctgttaaattgaaaattgacttagccaaccgagagacaagcatcttcagttaccgtgaagatcccattgtctatgaaattcatccaaccaaatcttttattaggcatgtcaacatcgctctaattcagagataa

SEQ ID NO: 153052 - DNA, 767 bp, Homo sapiens
  Payload ID: 10107
  Gene Symbol: MET
  Gene Name: MET proto-oncogene, receptor tyrosine kinase
  ENST ID: ENST00000456159
  CDS Start-End: 196-767
gcaggtgacccggaggccctcgccgcccgcggcgccccgagcgctttgtgagcagatgcggagccgagtggagggcgcgagccagatgcggggcgacagctgacttgctgagaggaggcggggaggcgcggagcgcgcgtgtggtccttgcgccgctgacttctccactggttcctgggcaccgaaagggtggtgatgaagagtaaatcaaagagtttagcagaatgcttcccatatgataaacctctcataatgaaggcccccgctgtgcttgcacctggcatcctcgtgctcctgtttaccttggtgcagaggagcaatggggagtgtaaagaggcactagcaaagtccgagatgaatgtgaatatgaagtatcagcttcccaacttcaccgcggaaacacccatccagaatgtcattctacatgagcatcacattttccttggtgccactaactacatttatgttttaaatgaggaagaccttcagaaggttgctgagtacaagactgggcctgtgctggaacacccagattgtttcccatgtcaggactgcagcagcaaagccaatttatcaggaggtgtttggaaagataacatcaacatggctctagttgtcgacacctactatgatgatcaactcattagctgtggcagcgtcaacagagggacctgccagcgacatgtctttccccacaatcatactgctgacatacagtcggaggttcactgcatattctccccacagatagaagagcccagccagtg

SEQ ID NO: 153053 - DNA, 6177 bp, Homo sapiens
  Payload ID: 10108
  Gene Symbol: MTDH
  Gene Name: metadherin
  Uniprot ID: Q86UE4
  ENST ID: ENST00000336273
  CDS Start-End: 329-2077
ggcccaagccgccattgttccgccgagggaggacagcggggcctggcgctggcgccgagacgccgcttagcggccgccactggagacactccctcccgcctcccgggtctcctggcggcggcggagtgaggctgacagcggggaacctgggagacccctccgccctccccgcggtggcagcggccgatccccggctccggcgcgagggacggccgcgatgcgctcggcctgaggttacccggcccggcccttcctcgcttccctcgactattccactgcgtctccgcgccccggcgtcatcctgcgagtccctctgacgggagggaagatggctgcacggagctggcaggacgagctggcccagcaggccgaggagggctcggcccggctgcgggaaatgctctcggtcggcctaggctttctgcgcaccgagctgggcctcgacctggggctggagccgaaacggtaccccggctgggtgatcctggtgggcactggcgcgctcgggctgctgctgctgtttctgctgggctacggctgggccgcggcttgcgccggcgcccgcaaaaagcggaggagcccgccccgcaagcgggaggaggcggcggccgtgccggccgcggcccccgacgacctggccttgctgaagaatctccggagcgaggaacagaagaagaagaaccggaagaaactgtccgagaagcccaaaccaaatgggcggactgttgaagtggctgagggtgaagctgttcgaacacctcaaagtgtaacagcaaagcagccaccagagattgacaagaaaaatgaaaagtcaaagaaaaataagaagaaatcaaagtcagatgctaaagcagtgcaaaacagttcacgccatgatggaaaggaagttgatgaaggagcctgggaaactaaaattagtcacagagagaaacgacagcagcgtaaacgtgataaggtgctgactgattctggttcattggattcaactatccctgggatagaaaataccatcacagttaccaccgagcaacttacaaccgcatcatttcctgttggttccaagaagaataaaggtgattctcatctaaatgttcaagttagcaactttaaatctggaaaaggagattctacacttcaggtttcttcaggattgaatgaaaacctcactgtcaatggaggaggctggaatgaaaagtctgtaaaactctcctcacagatcagtgcaggtgaggagaagtggaactccgtttcacctgcttctgcaggaaagaggaaaactgagccatctgcctggagtcaagacactggagatgctaatacaaatggaaaagactggggaaggagttggagtgaccgttcaatattttctggcattgggtctactgctgagccagtttctcagtctaccacttctgattatcagtgggatgttagccgtaatcaaccctatatcgatgatgaatggtctgggttaaatggtctgtcttctgctgatcccaactctgattggaatgcaccagcagaagagtggggcaattgggtagacgaagaaagagcttcacttctaaagtcccaggaaccaattcctgatgatcaaaaggtctcagatgatgataaagaaaagggagagggagctcttccaactgggaaatccaaaaagaaaaaaaagaaaaagaagaagcaaggtgaagataactctactgcacaggacacagaagaattagaaaaagagattagagaagaccttccagtgaatacctctaaaacccgtccaaaacaggaaaaagctttttccttgaagaccataagcactagtgatccagccgaagtactcgtcaaaaatagccagcctatcaagactcttccacctgctacttctaccgagccatctgtaatcttatcaaaaagtgattctgacaagagctcttcccaagtgccgccaatactacaagagacagataaatccaagtcaaataccaagcaaaatagtgtgcctccttcacagaccaagtctgaaactagctgggaatctcccaaacaaataaaaaagaagaaaaaagccagacgagaaacgtgaaattttttttcctgaattggacatgtgtttgcaaacacttgtcttgaagattatgctgtttatgcaataatttgtgaacatgtacagagttttatataaatttaaaccaatttttaaaacaaaactgcggacaccaccataaaaatggaatcaaaagaaagttaatttatgaaattaagaggtcagcagaatatactcagtgatggaagacacttgggaaagtctttttaatagaacaagaacgatcttaatttaagaatattatcctggtttaacaacagtgccctgtttacaacagattgtgccctatctcatctgcagccgaggaataaaggattctgattagaaagagggttgcctacagattagtaagcaattccttggatcttatgcacagaacttgtaccatttgaatctgttttatgcttaaatcaaagtgctttgatcaaatgcataacctgccatatctttacatatttgttggtagcaatttgtattaaagaaatcacaagtgcaaataaaaagtcatttatcatttgtttaactaaactgtcatggtttagtttacaatttttaaaaagttcttaaaatactgaaaatgcagttgacacttgtgtatggcttatgaagttatttttgatagtcttacattacttgaattgttcaaagtacagtatattttaaattaagaaaagtgaactatatgtatttgttttatacatttaaggcttagactcataaataatgctattgtttatgatttgaaaactttcaggcaaaatccaatttacatttttcccttccctagcaattacttttttccagcttcaactcttcttagttactaatactttgttgactttaaaaatgaaatcattcacaaacttttggtatatgatggagaatgaaaaactagagtcagacagctttaattgacattgtcaacacctccagttatcaggaatacatttttttactgccttaacctgtagtgcgtagaatatgcatcaatttcttgaaggagattcatgtttttataagaattttcatgtaattattgcaattgtggtcaaataaggaacgtttcctgcttgaaattatattgatttaaatgatgtgtgagatgtttcaccattttcaggcactgtgtaattctattgtaataaactggcaggtatctttgtaactataaatagtgcatgctcagccatgtacactgtaaatagcctttaccaaacgtgtttgacaaggaccataattaacatcacttagtgaattgtgataaagaaaaaaaagccatgatttattcgatgtgattggcttgtttttatgtggcgccaagaacgaacctgtttaacagctgtaaccaatggtactgatctatccatccaatgttgtcattatatttgactgtggttcaacagtattgcgttgtcagactaggaaagctaaacgaacaaaatggttttagttttgctgaagactggccttattaatggacagctttcctaacaagagattattaacttttatcaggtgttaacatctgtttcaggaacatggcagtatgtttacatgtcagaagttttgtttaattctatggtatttctaaattgacttgtttaaataaattcagcaaatggatagcattgttttttatttgcttcaatatgggggtagataatagctaaagagccaaggatgaatttcttcaaatgactttattctgttagctttacataggtgttggaggattcctaaggtgtcagcattttgtaaaggtaccacaaaggagaagttgatagggaatctaattttagaatgtgccaaatggtctgtgctcaacaatataattgaactctctcaactctacctcaccatttctttatctcaaaattctgttggctttgtcaaacgttggattttatttctgcagcctagtatctccccattctaccacctatgccagatgttaaagacagcagatgttttgaggagaatggcattgtggagatgcagagatgcgttgctaagttgaggtggatccagtatagagatacctctatttcttctttatggctcaagagctaggacttggattttgttttaagagatggcagctggccgggtgcagtggctcacgtctgtaatcccagcactttgggaggccgaggcaggtggatcacgaggtcaggagttcaagaccagcctggccaagagggtgaaaccccatctttactaaaaatacaaaaaaaaaaattagctgggtgtggtggtgggctcctgtaatcccagctactcaggaggctaaggcagagaatcatttgaacccaggagacggagtttgcaaagccaagatcgtgccactgcactccagcctgggcaacagaaggagactccgtctcaaaaaaaaaaaaaagatggcagctatataaatgataaaattaattacattctctttcacatgcatgaggtgcaaactctgtcacaaagtattttaattaccttttaccttgtttcatagatctttatgtgacataaaaacagtttctggcacggtggctcacgcctgtaatcctagcactttgggaggctgaggcaggtggatcacctgaggtcaggagtttgagaccagcctggccaatatggtgaaaccccatctctacaaaatttgcaaaaagtagatgggtgtggtagtgggcgcctgtaatcccagctactcaggaggttgaggcagagaatcgcttgaacccggggggtggaggttgcagtgagctgagatcgcaccactgcactccagcatgaaagagcgagactcaatctcaaaaaaaaaaaagtttctggcacctgaacaggaactggtttccatcatcaactcagaaagcactaaaatctaggtggtgattcagggaggagcaggggaagacagcctcctatggtggcatgaataagatgcttccagaactagtagggaaataactaacctcttcaggctttatcaggcctggaggggaaccttgctcatgttagcaagaaaggtatcctagagaagccactcaaaaggctccctaatccagcctgtctccacatacatactgaaaattcttccctactctgaggcagggtgtagtggtttaggggtttctccagactggaatcctacctatctgtaccgacaattgagcaaacaacagttgagagagtccaaaaaaaaaagtattaaaatgtgattgatgtaatttaccatgtttactttatgcatgcattttattggggaggggaggtcagaataattcacccaaatctagtggtcttatttcataggctaatctggtttatatttgcattaaagatactggagggcaatatttacagagtttagtttttcttaattaaaaacagtcctctattaatatagtgtgaaatatctttcaaaatttagagtttaggtttaagatgtctactagatatctttaagattttcctgtaaactcactgcacaaactggaattactttccaaaagacttagggaatgcaaatatgttactcataagatgcattgagtattgtaaataaaacaaaccatttttgatttgtttaaattgctcgttacagttctcttgtggggagggactttgtcagtcattttgcatcttaagctagactaaactttttgttgttgttttcctaaaaccataggtgcaagctttgccgctgggaagtcatattgaattaagcacttttgaaaatgtcactgtttgtgacacacaatgttctctacagaaaacttcttctatcttatgtcattttagcagtagatgtagctgcctgccaccaggtgcaatatgtcatttgcatcagccttttcagttaaggaaattaaaacttggcatgcattagttcatatgtatgaggttggctgtgtccccaaacagcaattgcttgtacaagatagaagtttgcttctcagctgggcatggtggctcatgcctgtaatccaagctctttgggaggccaacgcgggaggattgtttgagcccaggagtttgaaaccatcctgagcaatagagagacccccatctcgacaaaaaaaaaaaaa

SEQ ID NO: 153054 - DNA, 2184 bp, Homo sapiens
  Payload ID: 10108
  Gene Symbol: MTDH
  Gene Name: metadherin
  ENST ID: ENST00000519934
  CDS Start-End: 31-1611
gccgaggagggctcggcccggctgcgggaaatgctctcggtcggcctaggctttctgcgcaccgagctgggcctcgacctggggctggagccgaaacggtaccccggctgggtgatcctggtgggcactggcgcgctcgggctgctgctgctgtttctgctgggctacggctgggccgcggcttgcgccggcgcccgcaaaaagcggaggagcccgccccgcaagcgggaggaggcggcggccgtgccggccgcggcccccgacgacctggccttgctgaagaatctccggagcgaggaacagaagaagaagaaccggaagaaactgtccgagaagcccaaaccaaatgggcggactgttgaagtggctgagggtgaagctgttcgaacacctcaaagtgtaacagcaaagcagccaccagagattgacaagaaaaatgaaaagtcaaagaaaaataagaagaaatcaaagtcagatgctaaagcagtgcaaaacagttcacgccatgatggaaaggaagttgatgaaggagcctgggaaactaaaattagtcacagagagaaacgacagcagcgtaaacgtgataaggtgctgactgattctggttcattggattcaactatccctgggatagaaaataccatcacagttaccaccgagcaacttacaaccgcatcatttcctgttggttccaagaagaataaaggtgattctcatctaaatgttcaagttagcaactttaaatctggaaaaggagattctacacttcaggtttcttcaggattgaatgaaaacctcactgtcaatggaggaggctggaatgaaaagtctgtaaaactctcctcacagatcagtgcaggtgaggagaagtggaactccgtttcacctgcttctgcaggaaagaggaaaactgagccatctgcctggagtcaagacactggagatgctaatacaaatggaaaagactggggaaggagttggagtgaccgttcaatattttctggcattgatggtctgtcttctgctgatcccaactctgattggaatgcaccagcagaagagtggggcaattgggtagacgaagaaagagcttcacttctaaagtcccaggaaccaattcctgatgatcaaaaggtctcagatgatgataaagaaaagggagagggagctcttccaactgggaaatccaaaaagaaaaaaaagaaaaagaagaagcaaggtgaagataactctactgcacaggacacagaagaattagaaaaagagattagagaagaccttccagtgaatacctctaaaacccgtccaaaacaggaaaaagctttttccttgaagaccataagcactagtgatccagccgaagtactcgtcaaaaatagccagcctatcaagactcttccacctgctacttctaccgagccatctgtaatcttatcaaaaagtgattctgacaagagctcttcccaagtgccgccaatactacaagagacagataaatccaagtcaaataccaagcaaaatagtgtgcctccttcacagaccaagtctgaaactagctgggaatctcccaaacaaataaaaaagaagaaaaaagccagacgagaaacgtgaaattttttttcctgaattggacatgtgtttgcaaacacttgtcttgaagattatgctgtttatgcaataatttgtgaacatgtacagagttttatataaatttaaaccaatttttaaaacaaaactgcggacaccaccataaaaatggaatcaaaagaaagttaatttatgaaattaagaggtcagcagaatatactcagtgatggaagacacttgggaaagtctttttaatagaacaagaacgatcttaatttaagaatattatcctggtttaacaacagtgccctgtttacaacagattgtgccctatctcatctgcagccgaggaataaaggattctgattagaaagagggttgcctacagattagtaagcaattccttggatcttatgcacagaacttgtaccatttgaatctgttttatgcttaaatcaaagtgctttgatcaaatgcataacctgccatatctttacatatttgttggtagcaatttgtattaaagaaatcacaagtgcaaataaaaagtcatttatcatttgtttaactaaactgtcatggtttagtttacaattt

SEQ ID NO: 153055 - DNA, 672 bp, Homo sapiens
  Payload ID: 10108
  Gene Symbol: MTDH
  Gene Name: metadherin
  ENST ID: ENST00000522313
  CDS Start-End: 1-672
cggccgcggcccccgacgacctggccttgctgaagaatctccggagcgaggaacagaagaagaagaaccggaagaaactgtccgagaagcccaaaccaaatgggcggactgttgaagtggctgagggtgaagctgttcgaacacctcaaagtgtaacagcaaagcagccaccagagattgacaagaaaaatgaaaagtcaaagaaaaataagaagaaatcaaagtcagatgctaaagcagtgcaaaacagttcacgccatgatggaaaggaagttgatgaaggagcctgggaaactaaaattagtcacagagagaaacgacagcagcgtaaacgtgataaggtgctgactgattctggttcattggattcaactatccctgggatagaaaataccatcacagttaccaccgagcaacttacaaccgcatcatttcctgttggttccaagaagaataaagtttcttcaggattgaatgaaaacctcactgtcaatggaggaggctggaatgaaaagtctgtaaaactctcctcacagatcagtgcaggtgaggagaagtggaactccgtttcacctgcttctgcaggaaagaggaaaactgagccatctgcctggagtcaagacactggagatgctaatacaaatggaaaagactggggaaggagttggagtg

SEQ ID NO: 153056 - DNA, 629 bp, Homo sapiens
  Payload ID: 10108
  Gene Symbol: MTDH
  Gene Name: metadherin
  ENST ID: ENST00000519293
  CDS Start-End: 1-181
ctcctcacagatcagtgcaggtgaggagaagtggaactccgtttcacctgcttctgcaggaaagaggaaaactgagccatctgcctggagtcaagacactggagatgctaatacaaatggaaaagactggggaaggagttggagtgaccgttcaatattttctggcattggtctcagatgatgataaagaaaagggagagggagctcttccaactgggaaatccaaaaagaaaaaaaagaaaaagaagaagcaaggtgaagataactctactgcacaggacacagaagaattagaaaaagagattagagaagaccttccagtgaatacctctaaaacccgtccaaaacaggaaaaagctttttccttgaagaccataagcactagtgatccagccgaagtactcgtcaaaaatagccagcctatcaagactcttccacctgctacttctaccgagccatctgtaatcttatcaaaaagtgattctgacaagagctcttcccaagtgccgccaatactacaagagacagataaatccaagtcaaataccaagcaaaatagtgtgcctccttcacagaccaagtctgaaactagctgggaatctcccaaacaaataaaaaagaagaaaaaa

SEQ ID NO: 153057 - DNA, 565 bp, Homo sapiens
  Payload ID: 10108
  Gene Symbol: MTDH
  Gene Name: metadherin
  ENST ID: ENST00000521933
  CDS Start-End: 1-565
acaaatggaaaagactggggaaggagttggagtgaccgttcaatattttctggcattgggtctactgctgagccagtttctcagtctaccacttctgattatcagtgggatgttagccgtaatcaaccctatatcgatgatgaatggtctgggttaaatggtctgtcttctgctgatcccaactctgattggaatgcaccagcagaagagtggggcaattgggtagacgaagaaagagcttcacttctaaagtcccaggaaccaattcctgatgatcaaaaggtctcagatgatgataaagaaaagggagagggagctcttccaactgggaaatccaaaaagaaaaaaaagaaaaagaagaagcaaggtgaagataactctactgcacagcctatcaagactcttccacctgctacttctaccgagccatctgtaatcttatcaaaaagtgattctgacaagagctcttcccaagtgccgccaatactacaagagacagataaatccaagtcaaataccaagcaaaatagtgtgcctccttcacagaccaagtctgaaactagct

SEQ ID NO: 153058 - DNA, 4125 bp, Homo sapiens
  Payload ID: 10109
  Gene Symbol: MTF2
  Gene Name: metal response element binding transcription factor 2
  Uniprot ID: Q9Y483
  ENST ID: ENST00000370298
  CDS Start-End: 290-2071
gccattcggcaccggagtcgctccgcgctcccagaatgcaccggcagtccgcgggaaaccaaaatggcgaggggctgtattgaagtgggctgtgtttgaggccggtgtaagaacgctcattctacccccaacccttgtctccaaggacctcggtttgtgcgtgcatatgtgccgggtacccggtggggcgggtgcccagtaagtgctcggactcgcaggggaagcgcccacggggacggattggttgttttttcctgtatgaagcggttggcaccactgaagtgaccgaatgagagactctacaggggcaggtaattcactggtccacaagcggtctcctttacgtcgaaaccaaaagaccccaacatccttgaccaagctgtctttacaggatggacataaagccaaaaagccagcatgtaaatttgaagagggtcaggatgtcctagctagatggtcagatggcttgttttatcttggcactatcaaaaagataaacatattgaaacagagctgcttcatcatatttgaagacagttctaaatcctgggttctctggaaggacattcaaacaggagccactggaagtggggaaatggtctgtacaatatgtcaagaagagtattcagaagctcccaatgaaatggttatatgtgacaagtgtggccaaggatatcatcagttgtgtcacacacctcatattgattccagtgtgattgattcagatgaaaaatggctctgtcggcagtgtgtttttgcaacaacaacaaagaggggtggtgcacttaagaaaggaccaaatgccaaagcattgcaagtcatgaagcagacattaccctatagtgtggcagaccttgaatgggatgcaggtcataaaaccaatgtccagcagtgttactgctattgtggaggccctggagactggtatttgaagatgctacagtgctgcaaatgtaagcagtggtttcatgaggcttgtgtgcaatgccttcaaaagccaatgctatttggagacagattttatacgtttatatgctctgtctgcagttctggaccagaatacctcaaacgtctaccattacagtgggtagatatagcacacctatgcctttacaacctaagtgttattcataagaagaaatactttgattctgaacttgagcttatgacatacattaatgaaaactgggatagattgcaccctggagagctggcagacacaccaaaatctgaaagatatgagcatgttctggaggcattaaatgattacaagaccatgtttatgtctgggaaagaaataaagaagaagaagcatttgtttgggttgcgaattcgtgttcctcctgtgccaccaaatgtggctttcaaagcagagaaagaacctgaaggaacatctcatgaatttaaaattaaaggcagaaaggcatccaaacctatatctgattcaagggaagtaagcaatggcatagaaaaaaaaggaaagaaaaaatctgtaggtcgtccacctggcccatatacaagaaaaatgattcaaaaaactgctgagccacttttggataaggaatcaatttcagagaatcctactttggatttaccttgttctatagggagaactgagggaactgcacattcatccaatacctcagatgtggatttcacgggtgcttccagtgcaaaagaaactacctcgtctagcatttccaggcattatggattatctgactccagaaaaagaacgcgtacaggaagatcttggcctgctgcaataccacatttgcggagaagaagaggtcgtcttccaagaagagcactccagactcagaactcagaaattgtaaaagatgatgaaggcaaagaagattatcagtttgatgaactcaacacagagattctgaataacttagcagatcaggagttacaactcaatcatctaaagaactccattaccagttattttggtgctgcaggtagaatagcatgtggcgaaaaataccgagttttggcacgtcgggtgacacttgatggaaaggtgcagtatcttgtggaatgggaaggagcaactgcatcctgactgtaggactgaacattatgttcactgcactctgattttctgtaggtacagttcaaagccctaaaggagtctggcttttactatctttcttaaaaaaaaaaaaaagtcaaaaaaattcaaaaaaggggatgatactagccttaacatgtacctgtcaatgttatggatattgtcataaaaaggtatcttttaaaaatcagaacagagacttaattttttaaatcttaagatttgtagaatgtttctaggataggatattaaaaatgattgaaacccatgcatggtgttagacaatttttctaattattccattgagtcagttttttgtgattagtgattatcagagcaaacatcatgtagatagcacaagtatttggagaaacgttgtttgttttgttaccaaaatgttggaaaaatttatttcaataccttttagatttcataaagtgcagtgtatataatgcctactgaaagactgtaaaatattgaaattttctttcaagcaaagtgtaaaaaaatatattgagcctgtaaattgctctgtgactagacttcattgtcgtcttaatatattcttgcatgtgcatatatatacacacgtgtatatatatgtgtgtgattatgtgacctatgcaatacaaattatgggaatgggcagctttggagtatatatcccataattcttttttcaggaatagttgcagtatttacacagcagcatttcttctcaggcttttattgggtgctgttgcttgctatgtatgaagagaaatgtgtcagacaagtttagtgtgttctgaagaagggtgtgaacaacagtgttcatgggcttttagaatgcttttcacttttagtccttgtaactcagctgttcagtacctaaaacaaattcaaataatatgaacattatctcctactagaagtaacgttttcaagttttcatggcacattatgattgtaaatgtctctcatttttaacagtaagtctataggagtcccgtgaagattcctgaaatgtctgtagtaactgttagtcatgtttgaataagtgtagtatgaacaaagtattttattgcacagggttaacaaacagtatgttgccagctgaggctactgctgttttattacaacattacctcttgtttttataaagtgtaccaagatttaaattgataactttattttacttgtaaaaaaaaagtttcttttatcaccagtgttacagttgtcttctgtttctttttgttttgttttatttgttttcctttttagccaaagagtgaacagaagattttcttattttggtggctattcattttacttttaaaagtgattggtggattttagactaattatgggggaatttgccaccaaaataaaaaatatgtaaagtgtagtgattacagagtggttaaaatgtgggttagtacttatttattccattaattgattatttgactgtttataaagaaagttgctttatttctttaaacatcttcaaaagatgatcctttcttgtcacattatagccaaaagaagcagagaacttcattgtctgcatttggttcctggttggccaggtataaatgagctttacaaaagtgcaaattaaaaactgttacttctgtttacctccaccaaaacttgattttcccctagctattaatttaaggttgcctttcctgcagctgcaatattttgaataacacacagagtttgtgttgatttttgaatgtttgtttatatctaggggtaatgaaaaatgtaaatcccgtgtatccttattcactccacctgtatcatattatttcattttccccaaagtcctttaattctaactgaacaccagcagtatttttagaaatttttctttaacatacttggaagatgatttatccagctgaactgtctttagacgtaattattgtgaatgtctgttttattttctcatggtggttcacatggctctgatgttcagtttgtatttttggaattgctttacttagaaattaaaacagaccaacattaaatgtgtgtattttttaaagagctaa

SEQ ID NO: 153059 - DNA, 1951 bp, Homo sapiens
  Payload ID: 10109
  Gene Symbol: MTF2
  Gene Name: metal response element binding transcription factor 2
  ENST ID: ENST00000370303
  CDS Start-End: 217-1827
gctgtattgaagtgggctgtgtttgaggccggtgtaagaacgctcattctacccccaacccttgtctccaaggacctcggtttgtgcgtgcatatgtgccgggtacccggtggggcgggtgcccagtaagtgctcggactcgcaggggaagcgcccacggggacggattggttgttttttcctgtatgaagcggttggcaccactgaagtgaccgaatgagagactctacaggggcaggtaattcactggtccacaagcggtctcctttacgtcgaaaccaaaagaccccaacatccttgaccaagctgtctttacaggatggacataaagccaaaaagccagcatgtaaatttgaagagggtcaggatgtcctagctagatggtcagatggcttgttttatcttggcactatcaaaaagataaacatattgaaacagagctgcttcatcatatttgaagacagttctaaatcctgggttctctggaaggacattcaaacaggagccactggaagtggggaaatggtctgtacaatatgtcaagaagagtattcagaagctcccaatgaaatggttatatgtgacaagtgtggccaaggatatcatcagttgtgtcacacacctcatattgattccagtgtgattgattcagatgaaaaatggctctgtcggcagtgtgtttttgcaacaacaacaaagaggggtggtgcacttaagaaaggaccaaatgccaaagcattgcaagtcatgaagcagacattaccctatagtgtggcagaccttgaatgggatgcaggtcataaaaccaatgtccagcagtgttactgctattgtggaggccctggagactggtatttgaagatgctacagtgctgcaaatgtaagcagtggtttcatgaggcttgtgtgcaatgccttcaaaagccaatgctatttggagacagattttatacgtttatatgctctgtctgcagttctggaccagaatacctcaaacgtctaccattacagtgggtagatatagcacacctatgcctttacaacctaagtgttattcataagaagaaatactttgattctgaacttgagcttatgacatacattaatgaaaactgggatagattgcaccctggagagctggcagacacaccaaaatctgaaagatatgagcatgttctggaggcattaaatgattacaagaccatggaagtaagcaatggcatagaaaaaaaaggaaagaaaaaatctgtaggtcgtccacctggcccatatacaagaaaaatgattcaaaaaactgctgagccacttttggataaggaatcaatttcagagaatcctactttggatttaccttgttctatagggagaactgagggaactgcacattcatccaatacctcagatgtggatttcacgggtgcttccagtgcaaaagaaactacctcgtctagcatttccaggcattatggattatctgactccagaaaaagaacgcgtacaggaagatcttggcctgctgcaataccacatttgcggagaagaagaggtcgtcttccaagaagagcactccagactcagaactcagaaattgtaaaagatgatgaaggcaaagaagattatcagtttgatgaactcaacacagagattctgaataacttagcagatcaggagttacaactcaatcatctaaagaactccattaccagttattttggtgctgcaggtagaatagcatgtggcgaaaaataccgagttttggcacgtcgggtgacacttgatggaaaggtgcagtatcttgtggaatgggaaggagcaactgcatcctgactgtaggactgaacattatgttcactgcactctgattttctgtaggtacagttcaaagccctaaaggagtctggcttttactatctttcttaaaaaaaaaaaaaagtcaaaaaaattcaaaaaa

SEQ ID NO: 153060 - DNA, 3845 bp, Homo sapiens
  Payload ID: 10109
  Gene Symbol: MTF2
  Gene Name: metal response element binding transcription factor 2
  ENST ID: ENST00000540243
  CDS Start-End: 318-1793
gctgccattcggcaccggagtcgctccgcgctcccagaatgcaccggcagtccgcgggaaaccaaaatggcgaggggctgtattgaagtgggctgtgtttgaggccggtgtaagaacgctcattctacccccaacccttgtctccaaggacctcggtttgtgcgtgcatatgtgccgggtacccggtggggcgggtgcccagtaagtgctcggactcgcaggggaagcgcccacggggacggattggttgttttttcctgtatgaagcggttggcaccactgaagtgaccgaatgaggagccactggaagtggggaaatggtctgtacaatatgtcaagaagagtattcagaagctcccaatgaaatggttatatgtgacaagtgtggccaaggatatcatcagttgtgtcacacacctcatattgattccagtgtgattgattcagatgaaaaatggctctgtcggcagtgtgtttttgcaacaacaacaaagaggggtggtgcacttaagaaaggaccaaatgccaaagcattgcaagtcatgaagcagacattaccctatagtgtggcagaccttgaatgggatgcaggtcataaaaccaatgtccagcagtgttactgctattgtggaggccctggagactggtatttgaagatgctacagtgctgcaaatgtaagcagtggtttcatgaggcttgtgtgcaatgccttcaaaagccaatgctatttggagacagattttatacgtttatatgctctgtctgcagttctggaccagaatacctcaaacgtctaccattacagtgggtagatatagcacacctatgcctttacaacctaagtgttattcataagaagaaatactttgattctgaacttgagcttatgacatacattaatgaaaactgggatagattgcaccctggagagctggcagacacaccaaaatctgaaagatatgagcatgttctggaggcattaaatgattacaagaccatgtttatgtctgggaaagaaataaagaagaagaagcatttgtttgggttgcgaattcgtgttcctcctgtgccaccaaatgtggctttcaaagcagagaaagaacctgaaggaacatctcatgaatttaaaattaaaggcagaaaggcatccaaacctatatctgattcaagggaagtaagcaatggcatagaaaaaaaaggaaagaaaaaatctgtaggtcgtccacctggcccatatacaagaaaaatgattcaaaaaactgctgagccacttttggataaggaatcaatttcagagaatcctactttggatttaccttgttctatagggagaactgagggaactgcacattcatccaatacctcagatgtggatttcacgggtgcttccagtgcaaaagaaactacctcgtctagcatttccaggcattatggattatctgactccagaaaaagaacgcgtacaggaagatcttggcctgctgcaataccacatttgcggagaagaagaggtcgtcttccaagaagagcactccagactcagaactcagaaattgtaaaagatgatgaaggcaaagaagattatcagtttgatgaactcaacacagagattctgaataacttagcagatcaggagttacaactcaatcatctaaagaactccattaccagttattttggtgctgcaggtagaatagcatgtggcgaaaaataccgagttttggcacgtcgggtgacacttgatggaaaggtgcagtatcttgtggaatgggaaggagcaactgcatcctgactgtaggactgaacattatgttcactgcactctgattttctgtaggtacagttcaaagccctaaaggagtctggcttttactatctttcttaaaaaaaaaaaaaagtcaaaaaaattcaaaaaaggggatgatactagccttaacatgtacctgtcaatgttatggatattgtcataaaaaggtatcttttaaaaatcagaacagagacttaattttttaaatcttaagatttgtagaatgtttctaggataggatattaaaaatgattgaaacccatgcatggtgttagacaatttttctaattattccattgagtcagttttttgtgattagtgattatcagagcaaacatcatgtagatagcacaagtatttggagaaacgttgtttgttttgttaccaaaatgttggaaaaatttatttcaataccttttagatttcataaagtgcagtgtatataatgcctactgaaagactgtaaaatattgaaattttctttcaagcaaagtgtaaaaaaatatattgagcctgtaaattgctctgtgactagacttcattgtcgtcttaatatattcttgcatgtgcatatatatacacacgtgtatatatatgtgtgtgattatgtgacctatgcaatacaaattatgggaatgggcagctttggagtatatatcccataattcttttttcaggaatagttgcagtatttacacagcagcatttcttctcaggcttttattgggtgctgttgcttgctatgtatgaagagaaatgtgtcagacaagtttagtgtgttctgaagaagggtgtgaacaacagtgttcatgggcttttagaatgcttttcacttttagtccttgtaactcagctgttcagtacctaaaacaaattcaaataatatgaacattatctcctactagaagtaacgttttcaagttttcatggcacattatgattgtaaatgtctctcatttttaacagtaagtctataggagtcccgtgaagattcctgaaatgtctgtagtaactgttagtcatgtttgaataagtgtagtatgaacaaagtattttattgcacagggttaacaaacagtatgttgccagctgaggctactgctgttttattacaacattacctcttgtttttataaagtgtaccaagatttaaattgataactttattttacttgtaaaaaaaaagtttcttttatcaccagtgttacagttgtcttctgtttctttttgttttgttttatttgttttcctttttagccaaagagtgaacagaagattttcttattttggtggctattcattttacttttaaaagtgattggtggattttagactaattatgggggaatttgccaccaaaataaaaaatatgtaaagtgtagtgattacagagtggttaaaatgtgggttagtacttatttattccattaattgattatttgactgtttataaagaaagttgctttatttctttaaacatcttcaaaagatgatcctttcttgtcacattatagccaaaagaagcagagaacttcattgtctgcatttggttcctggttggccaggtataaatgagctttacaaaagtgcaaattaaaaactgttacttctgtttacctccaccaaaacttgattttcccctagctattaatttaaggttgcctttcctgcagctgcaatattttgaataacacacagagtttgtgttgatttttgaatgtttgtttatatctaggggtaatgaaaaatgtaaatcccgtgtatccttattcactccacctgtatcatattatttcattttccccaaagtcctttaattctaactgaacaccagcagtatttttagaaatttttctttaacatacttggaagatgatttatccagctgaactgtctttagacgtaattattgtgaatgtctgttttattttctcatggtggttcacatggctctgatgttcagtttgtatttttggaattgctttacttagaaattaaaacagaccaacattaaatgtgtgtattttttaaagagct

SEQ ID NO: 153061 - DNA, 4046 bp, Homo sapiens
  Payload ID: 10109
  Gene Symbol: MTF2
  Gene Name: metal response element binding transcription factor 2
  ENST ID: ENST00000545708
  CDS Start-End: 519-1994
gctgccattcggcaccggagtcgctccgcgctcccagaatgcaccggcagtccgcgggaaaccaaaatggcgaggggctgtattgaagtgggctgtgtttgaggccggtgtaagaacgctcattctacccccaacccttgtctccaaggacctcggtttgtgcgtgcatatgtgccgggtacccggtggggcgggtgcccagtaagtgctcggactcgcaggggaagcgcccacggggacggattggttgttttttcctgtatgaagcggttggcaccactgaagtgaccgaatgagagactctacaggggcaggatggacataaagccaaaaagccagcatgtaaatttgaagagggtcaggatgtcctagctagatggtcagatggcttgttttatcttggcactatcaaaaagataaacatattgaaacagagctgcttcatcatatttgaagacagttctaaatcctgggttctctggaaggacattcaaacaggagccactggaagtggggaaatggtctgtacaatatgtcaagaagagtattcagaagctcccaatgaaatggttatatgtgacaagtgtggccaaggatatcatcagttgtgtcacacacctcatattgattccagtgtgattgattcagatgaaaaatggctctgtcggcagtgtgtttttgcaacaacaacaaagaggggtggtgcacttaagaaaggaccaaatgccaaagcattgcaagtcatgaagcagacattaccctatagtgtggcagaccttgaatgggatgcaggtcataaaaccaatgtccagcagtgttactgctattgtggaggccctggagactggtatttgaagatgctacagtgctgcaaatgtaagcagtggtttcatgaggcttgtgtgcaatgccttcaaaagccaatgctatttggagacagattttatacgtttatatgctctgtctgcagttctggaccagaatacctcaaacgtctaccattacagtgggtagatatagcacacctatgcctttacaacctaagtgttattcataagaagaaatactttgattctgaacttgagcttatgacatacattaatgaaaactgggatagattgcaccctggagagctggcagacacaccaaaatctgaaagatatgagcatgttctggaggcattaaatgattacaagaccatgtttatgtctgggaaagaaataaagaagaagaagcatttgtttgggttgcgaattcgtgttcctcctgtgccaccaaatgtggctttcaaagcagagaaagaacctgaaggaacatctcatgaatttaaaattaaaggcagaaaggcatccaaacctatatctgattcaagggaagtaagcaatggcatagaaaaaaaaggaaagaaaaaatctgtaggtcgtccacctggcccatatacaagaaaaatgattcaaaaaactgctgagccacttttggataaggaatcaatttcagagaatcctactttggatttaccttgttctatagggagaactgagggaactgcacattcatccaatacctcagatgtggatttcacgggtgcttccagtgcaaaagaaactacctcgtctagcatttccaggcattatggattatctgactccagaaaaagaacgcgtacaggaagatcttggcctgctgcaataccacatttgcggagaagaagaggtcgtcttccaagaagagcactccagactcagaactcagaaattgtaaaagatgatgaaggcaaagaagattatcagtttgatgaactcaacacagagattctgaataacttagcagatcaggagttacaactcaatcatctaaagaactccattaccagttattttggtgctgcaggtagaatagcatgtggcgaaaaataccgagttttggcacgtcgggtgacacttgatggaaaggtgcagtatcttgtggaatgggaaggagcaactgcatcctgactgtaggactgaacattatgttcactgcactctgattttctgtaggtacagttcaaagccctaaaggagtctggcttttactatctttcttaaaaaaaaaaaaaagtcaaaaaaattcaaaaaaggggatgatactagccttaacatgtacctgtcaatgttatggatattgtcataaaaaggtatcttttaaaaatcagaacagagacttaattttttaaatcttaagatttgtagaatgtttctaggataggatattaaaaatgattgaaacccatgcatggtgttagacaatttttctaattattccattgagtcagttttttgtgattagtgattatcagagcaaacatcatgtagatagcacaagtatttggagaaacgttgtttgttttgttaccaaaatgttggaaaaatttatttcaataccttttagatttcataaagtgcagtgtatataatgcctactgaaagactgtaaaatattgaaattttctttcaagcaaagtgtaaaaaaatatattgagcctgtaaattgctctgtgactagacttcattgtcgtcttaatatattcttgcatgtgcatatatatacacacgtgtatatatatgtgtgtgattatgtgacctatgcaatacaaattatgggaatgggcagctttggagtatatatcccataattcttttttcaggaatagttgcagtatttacacagcagcatttcttctcaggcttttattgggtgctgttgcttgctatgtatgaagagaaatgtgtcagacaagtttagtgtgttctgaagaagggtgtgaacaacagtgttcatgggcttttagaatgcttttcacttttagtccttgtaactcagctgttcagtacctaaaacaaattcaaataatatgaacattatctcctactagaagtaacgttttcaagttttcatggcacattatgattgtaaatgtctctcatttttaacagtaagtctataggagtcccgtgaagattcctgaaatgtctgtagtaactgttagtcatgtttgaataagtgtagtatgaacaaagtattttattgcacagggttaacaaacagtatgttgccagctgaggctactgctgttttattacaacattacctcttgtttttataaagtgtaccaagatttaaattgataactttattttacttgtaaaaaaaaagtttcttttatcaccagtgttacagttgtcttctgtttctttttgttttgttttatttgttttcctttttagccaaagagtgaacagaagattttcttattttggtggctattcattttacttttaaaagtgattggtggattttagactaattatgggggaatttgccaccaaaataaaaaatatgtaaagtgtagtgattacagagtggttaaaatgtgggttagtacttatttattccattaattgattatttgactgtttataaagaaagttgctttatttctttaaacatcttcaaaagatgatcctttcttgtcacattatagccaaaagaagcagagaacttcattgtctgcatttggttcctggttggccaggtataaatgagctttacaaaagtgcaaattaaaaactgttacttctgtttacctccaccaaaacttgattttcccctagctattaatttaaggttgcctttcctgcagctgcaatattttgaataacacacagagtttgtgttgatttttgaatgtttgtttatatctaggggtaatgaaaaatgtaaatcccgtgtatccttattcactccacctgtatcatattatttcattttccccaaagtcctttaattctaactgaacaccagcagtatttttagaaatttttctttaacatacttggaagatgatttatccagctgaactgtctttagacgtaattattgtgaatgtctgttttattttctcatggtggttcacatggctctgatgttcagtttgtatttttggaattgctttacttagaaattaaaacagaccaacattaaatgtgtgtattttttaaagagct

SEQ ID NO: 153062 - DNA, 1502 bp, Homo sapiens
  Payload ID: 10110
  Gene Symbol: MBLAC1
  Gene Name: metallo-beta-lactamase domain containing 1
  Uniprot ID: A4D2B0
  ENST ID: ENST00000398075
  CDS Start-End: 400-1200
agatactcgggacgctgaggcgggaggatcacatgagcccaggaggttgaggctgcagtgaggtatgatcgcgccactgcactcctgcctgggcaactgagcatgaaccctcctcaaagctaatggcgcttcaaaattctgcagtgcaaagaagttgctggggttgcggagcggagaaccgccaggaggctggagcccagccaggcagcctcctcgggcacacggtgaaggcgccggaactacagctacctccgcggcgccgcttcggccgccatatctgggtacacgggaaccgcagaggacaaactctcacccgcgttttcgatttctgcgctttcttcgagtgaggcaagacctagcagaggcccaagcccgtccctccctgccaggagcagcctcatgcggaccgagccgctgtgcggggcatcccctctgctggtgcccggcgacccctactctgtggtggttctgctgcagggctacgcggagccagagggtgtgggcgatgccgtgcgcgccgacggctccgtgaccctggtcctaccccagacccggggcccggcctccagccaccgagagtccccgcgcgggagtggcggcgcagaggccgccctggaggaggcggcccgtggccccatcctggtggacaccgggggcccctgggctcgggaggcgctgctgggggcgctggcggggcagggcgtggccccgggagacgtgacgctagtggtggggacccacgggcactcggatcacatcgggaacttggggctgttcccaggcgcggctctgctggtctcgcacgacttctgccttcccggaggccgctacctgccccacgggctgggtgaggggcagcccctgcgcctgggcccggggctcgaggtgtgggccacgccgggccacgggggccagcgcgacgtgagcgtggtggtggccggcacggctctgggcaccgtggtggtggcgggagatgtgtttgagcgagatggggacgaggattcgtggcaggcactgagtgaagaccccgcagcccaggagcggagccggaagagggtcctggtcgttgccgacgtggtcgtacctggtcacgggcccccctttcgagtgttaagggaagcctcgcagcccgagacggagggtggagggaacagccagcaggagccggtggtcggagacgaggagcccgccctgcactaatcagcctcgagagggactgcactcttgtcagggaagccctaacagcgaagagctgctggagacagagtcagagcagtcaagggtgggagcttccagcccttccaggaggccagttttctagtgaagacagagtgcacctgacactgccatcacatcgtcagtatcactgcctgtctctgccaccaaactaagatcaaaggaggggctcagctccctgtgcattctccctgggcctcagtaaaatgggagaaggttcgtgggaggggcctccaaaataaaaatggaaactgcattgaaaatca

SEQ ID NO: 153063 - DNA, 718 bp, Homo sapiens
  Payload ID: 10110
  Gene Symbol: MBLAC1
  Gene Name: metallo-beta-lactamase domain containing 1
  ENST ID: ENST00000421390
  CDS Start-End: 378-718
ggcaactgagcatgaaccctcctcaaagctaatggcgcttcaaaattctgcagtgcaaagaagttgctggggttgcggagcggagaaccgccaggaggctggagcccagccaggcagcctcctcgggcacacggtgaaggcgccggaactacagctacctccgcggcgccgcttcggccgccatatctgggtacacgggaaccgcagaggacaaactctcacccgcgttttcgatttctgcgctttcttcgagtgaggcaagacctagcagaggcccaaggtagagcgcggctaggattcgatggagggaaacataaaggatagcctttggagggtgacgggcaaggaccccgtccctccctgccaggagcagcctcatgcggaccgagccgctgtgcggggcatcccctctgctggtgcccggcgacccctactctgtggtggttctgctgcagggctacgcggagccagagggtgtgggcgatgccgtgcgcgccgacggctccgtgaccctggtcctaccccagacccggggcccggcctccagccaccgagagtccccgcgcgggagtggcggcgcagaggccgccctggaggaggcggcccgtggccccatcctggtggacaccgggggcccctgggctcgggaggcgctgctgggggcgctggcggggcagggcgtggccccgggagacgtgacgctagtggtggggaccca

SEQ ID NO: 153064 - DNA, 4280 bp, Homo sapiens
  Payload ID: 10111
  Gene Symbol: MBLAC2
  Gene Name: metallo-beta-lactamase domain containing 2
  Uniprot ID: Q68D91
  ENST ID: ENST00000316610
  CDS Start-End: 477-1316
caacccgcgaggccccacactttctgcgccagctgggagtgcgcgccctgcagagccagtgggtgggcggttctagctcttcccaccctcactgcgggcctctgctgtcacacgcccggggtggcgaaacggtcgccacctgagtctccattctgctgcagtggcccctgcgttaaagctctctcgtggtgcggctgccgaggctgcggtagctcctgcgcccccgtgctggtggcgcagcctctgcttgctgccgacctggcggaagggtgcgggagcgcacgctacgggcagcgtcggtctgcgtccttcctcctcctattccgacccccgcatcccacgcccccgcctcgctctacgcctcctccctggctgcaggcagaccgcttcacacagccgcagtgccctgtgtgtggacagcctgtgggagactcgcacgcccacactcaccccgcctggctgcacccctgcccagcatgtcggcgctcgagtggtacgcccacaagtctctaggcgatggtatcttctggattcaagaacgtttctacgagtcgggcaaccgtgccaacatctggctggtgcgcggctccgagcaggacgtggtgatcgatacaggcctggggctgcgcagcctcccggagtacctgtactcctccggcctcttgcaggaccgagaggccaaagaggacgcggcgcgccggccactgcttgccgtggccacccacgtgcacttcgaccactccggcggcctctaccagttcgaccgcgtggcagtgcaccacgccgaggccgaggcgctggctcgcggggacaactttgagaccgtgacctggctttccgatagcgaggtggtgcggacgcccagccccggctggagggccagacagttccgggtacaggcggtgcagcccaccctcatcctgcaggatggggatgtgatcaaccttggtgacagacagctcactgttatgcacatgccaggtcactccaggggcagtatttgcttacatgacaaagaccgaaagattctcttcagtggagacgtcgtgtatgatggatcactgattgactggctcccatacagcaggataagtgactatgttggaacttgtgaacgtctaatagaattagtggacagaggtctggtagagaaggtgcttcctgggcacttcaatacctttggtgctgaaaggctttttcgattggcttctaactatatttcaaaagctgggatatgtcacaaagtttctacttttgccatgcgatctcttgcaagtttagctctacgtgtaacaaattctaggacctcgccctagtatctatactgataatatattttgattaattatatacattaattcattctgtgctatttaactgattaatagtgagcatttcatgaagtgcttttataccactattatatatcagagaaagattgagaatgaataagccaaaaagaaaattgttagtttaaattgttttctttcttccaagaaagaagccacttaaataagcttatactttgccaaagctgtcatcttgtaatatatgctctagaaatgacataaaggtttatggggaagcaaagagagattttgtggcaagagaactgcccttgcctctgtttttcttgttttattcccttgatgacctagggaaaaaaaggcatgtagagtattatgtttatactttaaacttgatatttttagtgtattatttaaagataaaggttcttgggtttaaaatacattagaacttaatgcagacatataaagtaacattgagaatgacaactaaaacattccattgttatggtcctgaattttttatgcttcatttcatgtatttattctttgtataattatagcatacatgttatgtaatataacttatgaaaagtacagtgaattttgctttattgcaaagctttaaatataaatttcagagtgcttcagtaaaaagctactatatattgttgtttgttattgtgtaggtaatattttcaattatgaaagtgaaatgcaaatgtctgttatctaactacaaattgtcagatttcttaaaaggacactgtcaggcaaatttgaaaatatacacattgagaataattttttattattatatcctattttaatattaacagctattatgaacaaaatttttcctgttaaatagcgacttcagtattgtgttatgttttacagcgttaaaacaactatgaagatctgcagctattcttttacttaacatgcatatgtactacagagggatttttaaattaattgcaaaatgtgcattagctattgacttagagtgaattgccttttgtatcctgattcacaacacctattcctgttcagtattctttgtcttgaatagagaagtctatgttcgtaaagtcatataaaaggttataccactatttagtaaaaagttttagtttggtgctgttaataataatttgctaaaaggccttttagaatatttcataaagggttttaaacagttttttcccactgcctttttattattgacatatctaaaaccaaactgaaatcgctttggaaatcagattttttaatgttaggaagatccagcaattttggtttctgaaaaattacaaaacttttctaccctacagatgcccaggttctttagttttttattcattcaactcacacacacataaacatatacatacacaaacacaatcccacatgcaaacacacacagccacatatatacatgtgtagcacagcgctaaacactgtggaggctaaaaaaagtcaaagacaacattataactaaaagtcgaaagcacacaaaatataaataatagtgtatgcaagttaatgtacattatacatgcgtgtaagggacataaatggaggggtgtgaactttggttaggcaaagtttactggaggaggggtttttgagtcaaatttggaaggatgaacttgttagatagtcagagttggaaacaaaacaatccaagaatagggatataagcattgctagtctagaatagtctattccttgtgaaaatataaatttaattttcaggaatccagtatattccaaacatcacatatttagcatgagaaaaattgatttgtgattgtgtatatgagtcattgttaatgggagacaagctgaactgccacatgccaccaaatgaacctttacttcaatcaaaaaggagggtatgattggttcaattatattaacagaatatcatgggcatttctctatgatggtcattcaaggtagtaggtctctttcaactgagtgcaacattgagaataatgatttggttcagggcaactacaaataatcacttactaagccttaaataaagccattatttttatatcaatagcacaaaggaaaaccaaaagtccttaaccactgaccatttttatcatattttaggcctttttttaaaaaatcagggtatagtaggcactaagttttattaggaaatatttaaacctgctgaaggatttatttataaaaagtgcaatttttcaaaacacattattattttttaatttcccaattttttcagtttttcaaattgtaccacaacatagaactgtgatattttgctattacttcaatgtgaataaataaggtaaagtatatcatttattgagtgcccatgctgtacatttaaaatatgcattatttaatttaatcttactcccagcaccaaaaggtaattgaccagcctcaacacaattttggacaaagctagtaactgaacacaggtctgtctgccccacacttctctttctcttgtaactgcacaatagcagaaaattggcaagatgtatttttactttccaagatgccgtgtgtgccaagaataaatgaaatgatgttaaagcataataataacatatctttaaaaagcttttcaaaatatattttcaccctgacagtgacccttgtaacttaaatgatttttggaaatattagtatgtaagtataattcaaagttgtcaaaatgtaagacatttagaagtaatttttattatttatattgttaatacttaatcactggaaattcattttccttactcgatgttttctttcaactgagaagcctaaaacaaacaaaaaccttgtgtgttatcctgatatagttgactaaatgtatttgttcttatatggatagtaatatgaatgtgacatgcaccaattgtcctattataattttcagataagtgtaactaagcacttgtgtaataaatattagtcattttatttcaa

SEQ ID NO: 153065 - DNA, 1936 bp, Homo sapiens
  Payload ID: 10111
  Gene Symbol: MBLAC2
  Gene Name: metallo-beta-lactamase domain containing 2
  Uniprot ID: Q68D91
  ENST ID: ENST00000514906
  CDS Start-End: 87-686
acacagccgcagtgccctgtgtgtggacagcctgtgggagactcgcacgcccacactcaccccgcctggctgcacccctgcccagcatgtcggcgctcgagtggtacgcccacaagtctctaggcgatggtatcttctggattcaagaacgtttctacgagtcgggcaaccgtgccaacatctggctggtgcgcggctccgagcaggacgtggtgatcgatacaggcctggggctgcgcagcctcccggagtacctgtactcctccggcctcttgcaggaccgagaggccaaagaggacgcggcgcgccggccactgcttgccgtggccacccacgtgcacttcgaccactccggcggcctctaccagttcgaccgcgtggcagtgcaccacgccgaggccgaggcgctggctcgcggggacaactttgagaccgtgacctggctttccgatagcgaggtggtgcggacgcccagccccggctggagggccagacagttccgggtacaggcggtgcagcccaccctcatcctgcaggatggtaatgggcccccgcgggcgcgcgctctcgttaagggagggtattgggaagagactgtccgagtgccgcatgttgcagacttgcgtggccataaaggggattattttggcacctcgcagagccacttctgtttcacccttccctgagtaaaaacccacttgaccagagtcaaggccatcacagccttccctgccagagaccagctctggcatcgtgtagagattctgagtactcctttgaaagccggcaccaccccctccctagccactttcctgcatcggctgtagcagtaacactacaaagacttgtgactgactagggatttctcattctttccctaagcacctgcccgacatttccaggagctttcgtagtgagcagacttttaaggaatgacccctcacggagagtgcatgtcatgatctgtgcttttgagaattgcagacttcatcagcttggtccccaccgggtatgggcagttcccacctgtagccttagagagtcatcagaccagtgattccaatccgctaatgcgattggaaacctttcagataggtttctgttcttgatgttgcctcacgattgcaaaagcttaatagtaatcataaacgtagaatatgtctgagtcttactttatgacagatatttggtccggttgaaagcaaagcctgagaaagatcaataaggaagtaattttcggtagaggtaaattatgtggactaatgcataggtagccatggtcctctttggctctgtgaaagacaagtatggaattcagagagaaattcatggaatgaaaataaatagggcctcagcccattctccctacgtagggacttaaataattgagctaattcgccacatcagcaatatttggtatattagttttctattttctttttaaaatacttttgatttcattttatcttcacaacacatttaaagtgaggccactgaccccccagttaaatggcttgcctgagccagatcatgataaaagctaggatatgaatctaggcacaatagatcaaggcatgcagaacatacataaatcctgcctcataaatatatgatgattttgagtagaatgtgaaaggccccttctttcctttagcgtgagatcattttaattaccaatgtggtatattaaaacgtgcctctatatggtagaaaaattcagttgctgcagtataatgaagctcactttatgaccaaacaatatggcaaataatgaaatattttacaaaaatcagtttatctcacagatgacatcttcatttgagatattttaaaaattgcaatattgtactgcttatcggtgctaaaaaaaaaattgcaagattctgtacctcacacccaccgaacaagtcttcattaaagttttaaatctaaattt

SEQ ID NO: 153066 - DNA, 1636 bp, Homo sapiens
  Payload ID: 10112
  Gene Symbol: MPPE1
  Gene Name: metallophosphoesterase 1
  Uniprot ID: Q53F39
  ENST ID: ENST00000309976
  CDS Start-End: 243-1244
aggaagttggctgggtgcgcgccggctccggctgcagttcccgggtccctcggccaccgaagccaccctgccctggtgaaagggctcccgcaccgcccggtgctccccatctgcctggcgttgtgcgcagagctggaaagcatggctgttgtgcccagctaagacctgaatgccatcaccctccccagggctctgcagttttctcgtggtgaacccttgatggatttgttgttgcttgagaaatggcgatgatcgaattggggtttggaagacagaattttcatccattaaagaggaagagttcattgctgttgaaactcatagctgttgtctttgctgtgcttctattttgtgaatttttaatctattacttagcgatctttcagtgtaattggcctgaagtgaaaaccacagcctctgatggtgaacagaccacacgtgagcctgtgctcaaagccatgtttttggctgacacccatttgcttggggaattcctaggccactggctggacaaattacgaagggaatggcagatggagagagcgttccagacagctctgtggttgctgcagccggaagtcgtcttcatcctgggggatatctttgatgaagggaagtggagcacccctgaggcctgggcggatgatgtggagcggtttcagaaaatgttcagacacccaagtcatgtacagctgaaggtagttgctggaaaccatgacattggcttccattatgagatgaacacatacaaagtagaacgctttgagaaagtgttcagctctgaaagactgttttcttggaaaggcattaactttgtgatggtcaacagcgtggcgctgaacggggatggctgtggcatctgctctgaaacagaagcagagctcattgaagtttctcacagactgaactgctcccgagagctgctgtggtggctccagccgcgcctggttctcagtggccacacgcacagcgcctgcgaggtgcaccacgggggccgagtccccgagctcagcgtcccatctttcagttggaggaacagaaacaaccccagtttcatcatgggtagcatcacgcccacagactacaccctctccaagtgctacctcccacgtgaggatgtggttttgatcatctactgtggagtggtgggcttccttgtggtcctcacactcactcactttgggcttctagcctcaccttttctttctggtttgaacttgctcggaaagcgtaagacaagatgaagagcaggcgccattataaatatcaaagcccaagaaatggaactttgggcagagatcatgttagaatcaagtggatgatgagaccaattacaggccgtctctctgcacagcacagaaattctcaatcactgaaatgagtaactgcaaaataaatagttgattgtactgttctcatgctataaaagtggacaggtactctacaacaaatctgttttctcatttttatcaaatatatgtatcatcaaaggttgcatctgtacagtatgtaaatgctattaatgtcgtcactcacatgcacgacagtccttgttcccccaggaagggcctggtggccccagcacacacttgggattatgtgtatacataaataaatattgggctgtttccctctt

SEQ ID NO: 153067 - DNA, 1910 bp, Homo sapiens
  Payload ID: 10112
  Gene Symbol: MPPE1
  Gene Name: metallophosphoesterase 1
  ENST ID: ENST00000317251
  CDS Start-End: 454-1185
accgaagccaccctgccctggtgaaagggctcccgcaccgcccggtgctccccatctgcctggcgttgtgcgcagagctggaaagcatggctgttataaatgaattctgattttggggagcagatgccaacttagagcctcgtaccaatctctctgtctttaaaagatgaggtgacttggtgattttcctggaaaattatagcgatctttcagtgtaattggcctgaagtgaaaaccacagcctctgatggtgaacagaccacacgtgagcctgtgctcaaagccatgtttttggctgacacccatttgcttggggaattcctaggccactggctggacaaattacgaagagatggagttttgctgtgttgcccatgctggttttgaactcctggcctcaagtgatcctccctccttggcctcccaaagcattgaaattacagggaatggcagatggagagagcgttccagacagctctgtggttgctgcagccggaagtcgtcttcatcctgggggatatctttgatgaagggaagtggagcacccctgaggcctgggcggatgatgtggagcggtttcagaaaatgttcagacacccaagtcatgtacagctgaaggtagttgctggaaaccatgacattggcttccattatgagatgaacacatacaaagtagaacgctttgagaaagtgttcagctctgaaagactgttttcttggaaaggcattaactttgtgatggtcaacagcgtggcgctgaacggggatggctgtggcatctgctctgaaacagaagcagagctcattgaagtttctcacagactgaactgctcccgagaggcacgtggctccagccggtgtggacctgggcctctgctgcccacgtctgcccctgtcctcctgcagcattatcctctgtatcggagaagtgatgctaactgttctggggaagacgctgctcctgcagaggaaagggacatcccatttaaggagaactatgacgtgctttcacgggaggcatcacaaaagctgctgtggtggctccagccgcgcctggttctcagtggccacacgcacagcgcctgcgaggtgcaccacgggggccgagtccccgagctcagcgtcccatctttcagttggaggaacagaaacaaccccagtttcatcatgggaacagatgcttagttgagcatcaaggggcaggaagacacctttccctccttgttcctcgctgaccgatgaccctggaactccacggtgcctctctgaatctctgttatggatcccccactatatttgatgggaacccagtgagccaggggccagttttgacagggtagcatcacgcccacagactacaccctctccaagtgctacctcccacgtgaggatgtggttttgatcatctactgtggagtggtgggcttccttgtggtcctcacactcactcactttgggcttctagcctcaccttttctttctggtttgaacttgctcggaaagcgtaagacaagatgaagagcaggcgccattataaatatcaaagcccaagaaatggaactttgggcagagatcatgttagaatcaagtggatgatgagaccaattacaggccgtctctctgcacagcacagaaattctcaatcactgaaatgagtaactgcaaaataaatagttgattgtactgttctcatgctataaaagtggacaggtactctacaacaaatctgttttctcatttttatcaaatatatgtatcatcaaaggttgcatctgtacagtatgtaaatgctattaatgtcgtcactcacatgcacgacagtccttgttcccccaggaagggcctggtggccccagcacacacttgggattatgtgtatacataaataaatattgggctgtttccctctt

SEQ ID NO: 153068 - DNA, 2324 bp, Homo sapiens
  Payload ID: 10112
  Gene Symbol: MPPE1
  Gene Name: metallophosphoesterase 1
  Uniprot ID: Q53F39
  ENST ID: ENST00000317235
  CDS Start-End: 349-1350
ggaagttggctgggtgcgcgccggctccggctgcagttcccgggtccctcggccaccgaagccaccctgccctggtgaaagggctcccgcaccgcccggtgctccccatctgcctggcgttgtgcgcagagctggaaagcatggctgttataaatgaattctgattttggggagcagatgccaacttagagcctcgtaccaatctctctgtctttaaaagatgaggtgacttggtgattttcctggaaaattataggtgcccagctaagacctgaatgccatcaccctccccagggctctgcagttttctcgtggtgaacccttgatggatttgttgttgcttgagaaatggcgatgatcgaattggggtttggaagacagaattttcatccattaaagaggaagagttcattgctgttgaaactcatagctgttgtctttgctgtgcttctattttgtgaatttttaatctattacttagcgatctttcagtgtaattggcctgaagtgaaaaccacagcctctgatggtgaacagaccacacgtgagcctgtgctcaaagccatgtttttggctgacacccatttgcttggggaattcctaggccactggctggacaaattacgaagggaatggcagatggagagagcgttccagacagctctgtggttgctgcagccggaagtcgtcttcatcctgggggatatctttgatgaagggaagtggagcacccctgaggcctgggcggatgatgtggagcggtttcagaaaatgttcagacacccaagtcatgtacagctgaaggtagttgctggaaaccatgacattggcttccattatgagatgaacacatacaaagtagaacgctttgagaaagtgttcagctctgaaagactgttttcttggaaaggcattaactttgtgatggtcaacagcgtggcgctgaacggggatggctgtggcatctgctctgaaacagaagcagagctcattgaagtttctcacagactgaactgctcccgagagctgctgtggtggctccagccgcgcctggttctcagtggccacacgcacagcgcctgcgaggtgcaccacgggggccgagtccccgagctcagcgtcccatctttcagttggaggaacagaaacaaccccagtttcatcatgggtagcatcacgcccacagactacaccctctccaagtgctacctcccacgtgaggatgtggttttgatcatctactgtggagtggtgggcttccttgtggtcctcacactcactcactttgggcttctagcctcaccttttctttctggtttgaacttgctcggaaagcgtaagacaagatgaagagcaggcgccattataaatatcaaagcccaagaaatggaactttgggcagagatcatgttagaatcaagtggatgatgagaccaattacaggccgtctctctgcacagcacagaaattctcaatcactgaaatgagtaactgcaaaataaatagttgattgtactgttctcatgctataaaagtggacaggtactctacaacaaatctgttttctcatttttatcaaatatatgtatcatcaaaggttgcatctgtacagtatgtaaatgctattaatgtcgtcactcacatgcacgacagtccttgttcccccaggaagggcctggtggccccagcacacacttgggattatgtgtatacataaataaatattgggctgtttccctcttcctgtgaagtggttctcaaattcctatgtactgtaaagctgtacccttaaaagtacagatgtggccgggcacagtggctcacacctgtaatcccagcactttgggaggctgaggcgggtggatcacttgaggtcaggagttcaagaccagcctggccaacatggtgaaacctcgtctccgctagaaatacaaaaattagccaagcatggtagcaagtgcctataataccagctgaggctgaggcaggagaatcccttgagcccgggaggcggaggttgcagtgagccaagatcatgccactgcactccagcctgggcaacagagtgagactccgtctcaaaaaatatatttaaaaaaaaaaaagtacagatgtgatgtgcagaacatattgttttcgtagatttttatacttgatcaattaatggaatcagatttttagataagtgtaattttctctataggagaccacgttgctacatctgttaatgcctgtcagtgatcaaaagaaacttaaaaagtggaatgggatatggcttttggtacctgaaaataaatgctttaataattgtaagccagataaaa

SEQ ID NO: 153069 - DNA, 1831 bp, Homo sapiens
  Payload ID: 10112
  Gene Symbol: MPPE1
  Gene Name: metallophosphoesterase 1
  ENST ID: ENST00000344987
  CDS Start-End: 330-1454
gccggctccggctgcagttcccgggtccctcggccaccgaagccaccctgccctggtgaaagggctcccgcaccgcccggtgctccccatctgcctggcgttgtgcgcagagctggaaagcatggctgttataaatgaattctgattttggggagcagatgccaacttagagcctcgtaccaatctctctgtctttaaaagatgaggtgacttggtgattttcctggaaaattataggtgcccagctaagacctgaatgccatcaccctccccagggctctgcagttttctcgtggtgaacccttgatggatttgttgttgcttgagaaatggcgatgatcgaattggggtttggaagacagaattttcatccattaaagaggaagagttcattgctgttgaaactcatagctgttgtctttgctgtgcttctattttgtgaatttttaatctattacttagcgatctttcagtgtaattggcctgaagtgaaaaccacagcctctgatggtgaacagaccacacgtgagcctgtgctcaaagccatgtttttggctgacacccatttgcttggggaattcctaggccactggctggacaaattacgaagggaatggcagatggagagagcgttccagacagctctgtggttgctgcagccggaagtcgtcttcatcctgggggatatctttgatgaagggaagtggagcacccctgaggcctgggcggatgatgtggagcggtttcagaaaatgttcagacacccaagtcatgtacagctgaaggtagttgctggaaaccatgacattggcttccattatgagatgaacacatacaaagtagaacgctttgagaaagtgttcagctctgaaagactgttttcttggaaaggcattaactttgtgatggtcaacagcgtggcgctgaacggggatggctgtggcatctgctctgaaacagaagcagagctcattgaagtttctcacagactgaactgctcccgagagcattatcctctgtatcggagaagtgatgctaactgttctggggaagacgctgctcctgcagaggaaagggacatcccatttaaggagaactatgacgtgctttcacgggaggcatcacaaaagctgctgtggtggctccagccgcgcctggttctcagtggccacacgcacagcgcctgcgaggtgcaccacgggggccgagtccccgagctcagcgtcccatctttcagttggaggaacagaaacaaccccagtttcatcatgggtagcatcacgcccacagactacaccctctccaagtgctacctcccacgtgaggatgtggttttgatcatctactgtggagtggtgggcttccttgtggtcctcacactcactcactttgggcttctagcctcaccttttctttctggtttgaacttgctcggaaagcgtaagacaagatgaagagcaggcgccattataaatatcaaagcccaagaaatggaactttgggcagagatcatgttagaatcaagtggatgatgagaccaattacaggccgtctctctgcacagcacagaaattctcaatcactgaaatgagtaactgcaaaataaatagttgattgtactgttctcatgctataaaagtggacaggtactctacaacaaatctgttttctcatttttatcaaatatatgtatcatcaaaggttgcatctgtacagtatgtaaatgctattaatgtcgtcactcacatgcacgacagtccttgttcccccaggaagggcctggtggccccagcacacacttgggattatgtgtatacataaataaatattg

SEQ ID NO: 153070 - DNA, 2427 bp, Homo sapiens
  Payload ID: 10112
  Gene Symbol: MPPE1
  Gene Name: metallophosphoesterase 1
  Uniprot ID: Q53F39
  ENST ID: ENST00000496196
  CDS Start-End: 317-1339
gcagttcccgggtccctcggccaccgaagccaccctgccctggtgaaagggctcccgcaccgcccggtgctccccatctgcctggcgttgtgcgcagagctggaaagcatggctgttataaatgaattctgattttggggagcagatgccaacttagagcctcgtaccaatctctctgtctttaaaagatgaggtgacttggtgattttcctggaaaattataggtgcccagctaagacctgaatgccatcaccctccccagggctctgcagttttctcgtggtgaacccttgatggatttgttgttgcttgagaaatggcgatgatcgaattggggtttggaagacagaattttcatccattaaagaggaagagttcattgctgttgaaactcatagctgttgtctttgctgtgcttctattttgtgaatttttaatctattacttagcgatctttcagtgtaattggcctgaagtgaaaaccacagcctctgatggtgaacagaccacacgtgagcctgtgctcaaagccatgtttttggctgacacccatttgcttggggaattcctaggccactggctggacaaattacgaagggaatggcagatggagagagcgttccagacagctctgtggttgctgcagccggaagtcgtcttcatcctgggggatatctttgatgaagggaagtggagcacccctgaggcctgggcggatgatgtggagcggtttcagaaaatgttcagacacccaagtcatgtacagctgaaggtagttgctggaaaccatgacattggcttccattatgagatgaacacatacaaagtagaacgctttgagaaagtgttcagctctgaaagactgttttcttggaaaggcattaactttgtgatggtcaacagcgtggcgctgaacggggatggctgtggcatctgctctgaaacagaagcagagctcattgaagtttctcacagactgaactgctcccgagaggcacgtggctccagccggtgtggacctgggcctctgctgcccacgtctgcccctgtcctcctgcagcattatcctctgtatcggagaagtgatgctaactgttctggggaagacgctgctcctgcagaggaaagggacatcccatttaaggagaactatgacgtgctttcacgggaggcatcacaaaagctgctgtggtggctccagccgcgcctggttctcagtggccacacgcacagcgcctgcgaggtgcaccacgggggccgagtccccgagctcagcgtcccatctttcagttggaggaacagaaacaaccccagtttcatcatgggaacagatgcttagttgagcatcaaggggcaggaagacacctttccctccttgttcctcgctgaccgatgaccctggaactccacggtgcctctctgaatctctgttatggatcccccactatatttgatgggaacccagtgagccaggggccagttttgacagggtagcatcacgcccacagactacaccctctccaagtgctacctcccacgtgaggatgtggttttgatcatctactgtggagtggtgggcttccttgtggtcctcacactcactcactttgggcttctagcctcaccttttctttctggtttgaacttgctcggaaagcgtaagacaagatgaagagcaggcgccattataaatatcaaagcccaagaaatggaactttgggcagagatcatgttagaatcaagtggatgatgagaccaattacaggccgtctctctgcacagcacagaaattctcaatcactgaaatgagtaactgcaaaataaatagttgattgtactgttctcatgctataaaagtggacaggtactctacaacaaatctgttttctcatttttatcaaatatatgtatcatcaaaggttgcatctgtacagtatgtaaatgctattaatgtcgtcactcacatgcacgacagtccttgttcccccaggaagggcctggtggccccagcacacacttgggattatgtgtatacataaataaatattgggctgtttccctcttcctgtgaagtggttctcaaattcctatgtactgtaaagctgtacccttaaaagtacagatgtggccgggcacagtggctcacacctgtaatcccagcactttgggaggctgaggcgggtggatcacttgaggtcaggagttcaagaccagcctggccaacatggtgaaacctcgtctccgctagaaatacaaaaattagccaagcatggtagcaagtgcctataataccagctgaggctgaggcaggagaatcccttgagcccgggaggcggaggttgcagtgagccaagatcatgccactgcactccagcctgggcaacagagtgagactccgtctcaaaaaatatatttaaaaaaaaaaaa

SEQ ID NO: 153071 - DNA, 582 bp, Homo sapiens
  Payload ID: 10112
  Gene Symbol: MPPE1
  Gene Name: metallophosphoesterase 1
  ENST ID: ENST00000592306
  CDS Start-End: 1-246
ctgacttgtacccagcaggcacgtggctccagccggtgtggacctgggcctctgctgcccacgtctgcccctgtcctcctgcagcattatcctctgtatcggagaagtgatgctaactgttctggggaagacgctgctcctgcagaggaaagggacatcccatttaaggagaactatgacgtgctttcacgggaggcatcacaaaaggaaagaagcgatggccagcggccgtctgctgagcggtgagagcctggttgaggatgagctaacagcctgctttgctgtcttctcggccactgtcagctgctgtggtggctccagccgcgcctggttctcagtggccacacgcacagcgcctgcgaggtgcaccacgggggccgagtccccgagctcagcgtcccatctttcagttggaggaacagaaacaaccccagtttcatcatgggtagcatcacgcccacagactacaccctctccaagtgctacctcccacgtgaggatgtggttttgatcatctactgtggagtggtgggcttccttgtggtcctcacactcactcactttgggcttctagcctcacct

SEQ ID NO: 153072 - DNA, 885 bp, Homo sapiens
  Payload ID: 10112
  Gene Symbol: MPPE1
  Gene Name: metallophosphoesterase 1
  ENST ID: ENST00000589267
  CDS Start-End: 461-885
gcgctaccgcggaaacaggaagttggctgggtgcgcgccggctccggctgcagttcccgggtccctcggccaccgaagccaccctgccctggtgaaagggctcccgcaccgcccggtgctccccatctgcctggcgttgtgcgcagagctggaaagcatggctgttataaatgaattctgattttggggagcagatgccaacttagagcctcgtaccaatctctctgtctttaaaagatgaggtgacttggtgattttcctggaaaattatagaatattaatgaaactttatcatcttggtgagaaaagcattctaatagctttattctgacatacggaggtatggagagcttgaaggagtcagagaggtgcccagctaagacctgaatgccatcaccctccccagggctctgcagttttctcgtggtgaacccttgatggatttgttgttgcttgagaaatggcgatgatcgaattggggtttggaagacagaattttcatccattaaagaggaagagttcattgctgttgaaactcatagctgttgtctttgctgtgcttctattttgtgaatttttaatctattacttagcgatctttcagtgtaattggcctgaagtgaaaaccacagcctctgatggtgaacagaccacacgtgagcctgtgctcaaagccatgtttttggctgacacccatttgcttggggaattcctaggccactggctggacaaattacgaagggaatggcagatggagagagcgttccagacagctctgtggttgctgcagccggaagtcgtcttcatcctgggggatatctttgatgaagggaagtggagcacccctgaggcctgggcggatgatgtggagcggtttcagaaaat

SEQ ID NO: 153073 - DNA, 4236 bp, Homo sapiens
  Payload ID: 10112
  Gene Symbol: MPPE1
  Gene Name: metallophosphoesterase 1
  Uniprot ID: Q53F39
  ENST ID: ENST00000588072
  CDS Start-End: 1223-2413
aagcaagtgcataataaatattatagttatcctgattgtctcctttattcatcacacacttcctaagcacatctctggagggcactttccaaggctccgggggaggagaggaaagaggcgcagccaggcctggtgggtcccggaggggcagcgcggcgcgggaggggaacggggaggcacggcctggctgccaccgcgcgcggaacccgggagcggctccggggctgtcagctgcccgcctggctcctccaaggcctggagctcggacgcgggctctgggggcttctggggcgcggaagcgggctcgcggggagcagtggccgcccccggccgccgcggtggctgtgctcagaagccggccctggcgtcaggaggccgggcgcgcggcgcggggcgcgagttcccctgcccgcctgtgcgccccgcaacgggcctttcctgggccctaacgacagctcgcccgtgcttcgccctcgcagctctcctgtgtccccaaaatgcctttcccgcgtcccccgcccttcagcggtgactgcccaggggactctgtaacgcgacactcagactgccgagcctgccaggcacttcgcggagggcgctaggggccgggacgcggccgccgagcgtaggttccggcctttactccgagttgcgcacggagccccagctgcggttgtccgctctggggatcacaggccgcggagacccgggagccacccgccgggccccttcagacgacccgcttccgcaaaccggccgtgggactccggcgccgggcggacgaagcggctccgggaagactcggtcttccccgcccgcctgaggtcgccggggcggggcttcagtgacaggcccgcgcgctaccgcggaaacaggaagttggctgggtgcgcgccggctccggctgcagttcccgggtccctcggccaccgaagccaccctgccctggtgaaagggctcccgcaccgcccggtgctccccatctgcctggcgttgtgcgcagagctggaaagcatggctgttataaatgaattctgattttggggagcagatgccaacttagagcctcgtaccaatctctctgtctttaaaagatgaggtgacttggtgattttcctggaaaattataggtgcccagctaagacctgaatgccatcaccctccccagggctctgcagttttctcgtggtgaacccttgatggatttgttgttgcttgagaaatggcgatgatcgaattggggtttggaagacagaattttcatccattaaagaggaagagttcattgctgttgaaactcatagctgttgtctttgctgtgcttctattttgtgaatttttaatctattacttagcgatctttcagtgtaattggcctgaagtgaaaaccacagcctctgatggtgaacagaccacacgtgagcctgtgctcaaagccatgtttttggctgacacccatttgcttggggaattcctaggccactggctggacaaattacgaagggaatggcagatggagagagcgttccagacagctctgtggttgctgcagccggaagtcgtcttcatcctgggggatatctttgatgaagggaagtggagcacccctgaggcctgggcggatgatgtggagcggtttcagaaaatgttcagacacccaagtcatgtacagctgaaggtagttgctggaaaccatgacattggcttccattatgagatgaacacatacaaagtagaacgctttgagaaagtgttcagctctgaaagactgttttcttggaaaggcattaactttgtgatggtcaacagcgtggcgctgaacggggatggctgtggcatctgctctgaaacagaagcagagctcattgaagtttctcacagactgaactgctcccgagaggcacgtggctccagccggtgtggacctgggcctctgctgcccacgtctgcccctgtcctcctgcagcattatcctctgtatcggagaagtgatgctaactgttctggggaagacgctgctcctgcagaggaaagggacatcccatttaaggagaactatgacgtgctttcacgggaggcatcacaaaagctgctgtggtggctccagccgcgcctggttctcagtggccacacgcacagcgcctgcgaggtgcaccacgggggccgagtccccgagctcagcgtcccatctttcagttggaggaacagaaacaaccccagtttcatcatgggtagcatcacgcccacagactacaccctctccaagtgctacctcccacgtgaggatgtggttttgatcatctactgtggagtggtgggcttccttgtggtcctcacactcactcactttgggcttctagcctcaccttttctttctggtttgaacttgctcggaaagcgtaagacaagatgaagagcaggcgccattataaatatcaaagcccaagaaatggaactttgggcagagatcatgttagaatcaagtggatgatgagaccaattacaggccgtctctctgcacagcacagaaattctcaatcactgaaatgagtaactgcaaaataaatagttgattgtactgttctcatgctataaaagtggacaggtactctacaacaaatctgttttctcatttttatcaaatatatgtatcatcaaaggttgcatctgtacagtatgtaaatgctattaatgtcgtcactcacatgcacgacagtccttgttcccccaggaagggcctggtggccccagcacacacttgggattatgtgtatacataaataaatattgggctgtttccctcttcctgtgaagtggttctcaaattcctatgtactgtaaagctgtacccttaaaagtacagatgtggccgggcacagtggctcacacctgtaatcccagcactttgggaggctgaggcgggtggatcacttgaggtcaggagttcaagaccagcctggccaacatggtgaaacctcgtctccgctagaaatacaaaaattagccaagcatggtagcaagtgcctataataccagctgaggctgaggcaggagaatcccttgagcccgggaggcggaggttgcagtgagccaagatcatgccactgcactccagcctgggcaacagagtgagactccgtctcaaaaaatatatttaaaaaaaaaaaagtacagatgtgatgtgcagaacatattgttttcgtagatttttatacttgatcaattaatggaatcagatttttagataagtgtaattttctctataggagaccacgttgctacatctgttaatgcctgtcagtgatcaaaagaaacttaaaaagtggaatgggatatggcttttggtacctgaaaataaatgctttaataattgtaagccagataaaagttattctttttgttttttttcttaacagtctggctgttgtttgaattaaactcttaaacaggatgtttagttagagggtaattgttgagtaatgatgcatacaacagcatacttccctttcttgctgggggtgcagcttttcagttttcttgttttactttgacagtgcaaggggaactgaaaataatttccattgtattatttatcttagttcagctgagggctttatgagacagtggatggggaggcagtaagacggtgatgagataaaatgtgtgtgttgcactgactgtctataaagttatcctttcttcatgaaaaagtagcatttaaatctggatgagtttataaaggattacaaaatgctgatttatagagtaaactttaaaatattaaagactaaagactaaaagaagagtaataatgaagtaatgtaggctgtcacttctctagatttgtattgttgaaaatttaactttggacatctttatagattattattttagacctacaaaaactaccctcaactctgtggctacagctagaatatgaagcatcattgctacaccagttcttactttctagatattgttggtgtgtcataatgtttgaggctgtatttgtaagtcttgcaagtgtgagaaagagccgtatcttttgactttatacttcagattaaggttttgtaatgtttcttcttcaaaaggcaagtgaagctgtcatcctcattctcctaggccagacacaaacattgacacgtcaaggttttttttttttttttttttggcctgagtctcactttgatgtccaggctggagtgcgatggcacgacctcggctcactgcaat

SEQ ID NO: 153074 - DNA, 622 bp, Homo sapiens
  Payload ID: 10112
  Gene Symbol: MPPE1
  Gene Name: metallophosphoesterase 1
  ENST ID: ENST00000587724
  CDS Start-End: 1-486
ggaaaccatgacattggcttccattatgactttgtgatggtcaacagcgtggcgctgaacggggatggctgtggcatctgctctgaaacagaagcagagctcattgaagtttctcacagactgaactgctcccgagagcaggcacgtggctccagccggtgtggacctgggcctctgctgcccacgtctgcccctgtcctcctgcagcattatcctctgtatcggagaagtgatgctaactgttctggggaagacgctgctcctgcagaggaaagggacatcccatttaaggagaactatgacgtgctttcacgggaggcatcacaaaagctgctgtggtggctccagccgcgcctggttctcagtggccacacgcacagcgcctgcgaggtgcaccacgggggccgagtccccgagctcagcgtcccatctttcagttggaggaacagaaacaaccccagtttcatcatgggaacagatgcttagttgagcatcaaggggcaggaagacacctttccctccttgttcctcgctgaccgatgaccctggaactccacggtgcctctctgaatctctgttatggatcccccactatatttgatgggaacccagtgagccaggg

SEQ ID NO: 153075 - DNA, 602 bp, Homo sapiens
  Payload ID: 10112
  Gene Symbol: MPPE1
  Gene Name: metallophosphoesterase 1
  ENST ID: ENST00000592331
  CDS Start-End: 86-602
ttttggctgacacccatttgcttggggaattcctaggccactggctggacaaattacgaagagatggagttttgctgtgttgcccatgctggttttgaactcctggcctcaagtgatcctccctccttggcctcccaaagcattgaaattacagatggagagagcgttccagacagctctgtggttgctgcagccggaagtcgtcttcatcctgggggatatctttgatgaagggaagtggagcacccctgaggcctgggcggatgatgtggagcggtttcagaaaatgttcagacacccaagtcatgtacagctgaaggtagttgctggaaaccatgacattggcttccattatgagatgaacacatacaaagtagaacgctttgagaaagtgttcagctctgaaagactgttttcttggaaaggcattaactttgtgatggtcaacagcgtggcgctgaacggggatggctgtggcatctgctctgaaacagaagcagagctcattgaagtttctcacagactgaactgctcccgagagcaggcacgtggctccagccggtgtggacctgggcctctgctgcccacgtctgcccctgtcc

SEQ ID NO: 153076 - DNA, 379 bp, Homo sapiens
  Payload ID: 10112
  Gene Symbol: MPPE1
  Gene Name: metallophosphoesterase 1
  ENST ID: ENST00000593001
  CDS Start-End: 301-379
tcggccaccgaagccaccctgccctggtgaaagggctcccgcaccgcccggtgctccccatctgcctggcgttgtgcgcagagctggaaagcatggctgttataaatgaattctgattttggggagcagatgccaacttagagcctcgtaccaatctctctgtctttaaaagatgaggtgacttggtgattttcctggaaaattataggtgcccagctaagacctgaatgccatcaccctccccagggctctgcagttttctcgtggtgaacccttgatggatttgttgttgcttgagaaatggcgatgatcgaattggggtttggaagacagaattttcatccattaaagaggaagagttcattgctgttgaaactca

SEQ ID NO: 153077 - DNA, 1152 bp, Homo sapiens
  Payload ID: 10112
  Gene Symbol: MPPE1
  Gene Name: metallophosphoesterase 1
  ENST ID: ENST00000588191
  CDS Start-End: 659-1152
gaagttggctgggtgcgcgccggctccggctgcagttcccgggtccctcggccaccgaagccaccctgccctggtgaaagggctcccgcaccgcccggtgctccccatctgcctggcgttgtgcgcagagctggaaagcatggctgttataaatgaattctgattttggggagcagatgccaacttagagcctcgtaccaatctctctgtctttaaaagatgaggtgacttggtgattttcctggaaaattatagaagcactgaggtggacactgcgggttgtgaggttcaggaggggtaagtggctggcacaaggtcacagagcagcgctgccatttggctactttccaattcagcatagctgccctctctgctggtggtattcacagcatgcaagataaaatactcaccaaggaacaagtggctaactcctcacagagctctcacggtttcctctttcctgacaaaaagaatattaatgaaactttatcatcttggtgagaaaagcattctaatagctttattctgacatacggaggtatggagagcttgaaggagtcagagaggtgcccagctaagacctgaatgccatcaccctccccagggctctgcagttttctcgtggtgaacccttgatggatttgttgttgcttgagaaatggcgatgatcgaattggggtttggaagacagaattttcatccattaaagaggaagagttcattgctgttgaaactcatagctgttgtctttgctgtgcttctattttgtgaatttttaatctattacttagcgatctttcagtgtaattggcctgaagtgaaaaccacagcctctgatggtgaacagaccacacgtgagcctgtgctcaaagccatgtttttggctgacacccatttgcttggggaattcctaggccactggctggacaaattacgaagggaatggcagatggagagagcgttccagacagctctgtggttgctgcagccggaagtcgtcttcatcctgggggatatctttgatgaagggaagtggagcacccctgaggcctgggcggatgatgtggagcggtttcagaaaatgttcagacacccaagtcatgtacagctgaaggtagttgctggaaaccatgacattggcttccattatga

SEQ ID NO: 153078 - DNA, 567 bp, Homo sapiens
  Payload ID: 10112
  Gene Symbol: MPPE1
  Gene Name: metallophosphoesterase 1
  ENST ID: ENST00000589859
  CDS Start-End: 359-567
ttttgcgcctcttagtcataactgctcaaacaaggctcactctgatgaagagaagggggtgtagaagaggaattatcaaggtgtcattctggtatttcatcttgggaaaccagaaacctaccaaacagcaagggtttgcatactggaagactcctcagcctgccccagaagaatattaatgaaactttatcatcttggtgagaaaagcattctaatagctttattctgacatacggaggtatggagagcttgaaggagtcagagaggtgcccagctaagacctgaatgccatcaccctccccagggctctgcagttttctcgtggtgaacccttgatggatttgttgttgcttgagaaatggcgatgatcgaattggggtttggaagacagaattttcatccattaaagaggaagagttcattgctgttgaaactcatagctgttgtctttgctgtgcttctattttgtgaatttttaatctattacttagcgatctttcagtgtaattggcctgaagtgaaaaccacagcctctgatggtgaacagaccacacgtgagcctgtgct

SEQ ID NO: 153079 - DNA, 1099 bp, Homo sapiens
  Payload ID: 10112
  Gene Symbol: MPPE1
  Gene Name: metallophosphoesterase 1
  ENST ID: ENST00000588186
  CDS Start-End: 566-1099
aggaagttggctgggtgcgcgccggctccggctgcagttcccgggtccctcggccaccgaagccaccctgccctggtgaaagggctcccgcaccgcccggtgctccccatctgcctggcgttgtgcgcagagctggaaagcatggctgttataaatgaattctgattttggggagcagatgccaacttagagcctcgtaccaatctctctgtctttaaaagatgaggtgacttggtgattttcctggaaaattatagaagcactgaggtggacactgcgggttgtgaggttcaggaggggtaagtggctggcacaaggtcacagagcagcgctgccatttggctactttccaattcagcatagctgccctctctgctggtggtattcacagcatgcaagataaaatactcaccaaggaacaagtggctaactcctcacagagctctcacggtttcctctttcctgacaaaaaggtgcccagctaagacctgaatgccatcaccctccccagggctctgcagttttctcgtggtgaacccttgatggatttgttgttgcttgagaaatggcgatgatcgaattggggtttggaagacagaattttcatccattaaagaggaagagttcattgctgttgaaactcatagctgttgtctttgctgtgcttctattttgtgaatttttaatctattacttagcgatctttcagtgtaattggcctgaagtgaaaaccacagcctctgatggtgaacagaccacacgtgagcctgtgctcaaagccatgtttttggctgacacccatttgcttggggaattcctaggccactggctggacaaattacgaagggaatggcagatggagagagcgttccagacagctctgtggttgctgcagccggaagtcgtcttcatcctgggggatatctttgatgaagggaagtggagcacccctgaggcctgggcggatgatgtggagcggtttcagaaaatgttcagacacccaagtcatgtacagctgaaggtagttgctggaaaccatgacattggcttccattatgagatgaacacatacaaagtagaacgctttgagaaagtgttc

SEQ ID NO: 153080 - DNA, 698 bp, Homo sapiens
  Payload ID: 10112
  Gene Symbol: MPPE1
  Gene Name: metallophosphoesterase 1
  ENST ID: ENST00000588103
  CDS Start-End: 423-698
cgccggctccggctgcagttcccgggtccctcggccaccgaagccaccctgccctggtgaaagggctcccgcaccgcccggtgctccccatctgcctggcgttgtgcgcagagctggaaagcatggctgttataaatgaattctgattttggggagcagatgccaacttagagcctcgtaccaatctctctgtctttaaaagatgaggtgacttggtgattttcctggaaaattatagaggctctccagcagagaacccaggcccttcaccatactggtgcatggttcctgccacttgtgcagtccattccgaagtttcttacagatgaggtgcccagctaagacctgaatgccatcaccctccccagggctctgcagttttctcgtggtgaacccttgatggatttgttgttgcttgagaaatggcgatgatcgaattggggtttggaagacagaattttcatccattaaagaggaagagttcattgctgttgaaactcatagctgttgtctttgctgtgcttctattttgtgaatttttaatctattacttagcgatctttcagtgtaattggcctgaagtgaaaaccacagcctctgatggtgaacagaccacacgtgagcctgtgctcaaagccatgtttttggctgacacccatttgcttggggaattcctaggccactggctggacaaatta

SEQ ID NO: 153081 - DNA, 564 bp, Homo sapiens
  Payload ID: 10112
  Gene Symbol: MPPE1
  Gene Name: metallophosphoesterase 1
  ENST ID: ENST00000586844
  CDS Start-End: 359-564
gcagttcccgggtccctcggccaccgaagccaccctgccctggtgaaagggctcccgcaccgcccggtgctccccatctgcctggcgttgtgcgcagagctggaaagcatggctgttataaatgaattctgattttggggagcagatgccaacttagagcctcgtaccaatctctctgtctttaaaagatgaggtgacttggtgattttcctggaaaattatagaagcactgaggtggacactgcgggttgtgaggttcaggaggggtgcccagctaagacctgaatgccatcaccctccccagggctctgcagttttctcgtggtgaacccttgatggatttgttgttgcttgagaaatggcgatgatcgaattggggtttggaagacagaattttcatccattaaagaggaagagttcattgctgttgaaactcatagctgttgtctttgctgtgcttctattttgtgaatttttaatctattacttagcgatctttcagtgtaattggcctgaagtgaaaaccacagcctctgatggtgaacagaccacacgtgagcctgt

SEQ ID NO: 153082 - DNA, 1089 bp, Homo sapiens
  Payload ID: 10112
  Gene Symbol: MPPE1
  Gene Name: metallophosphoesterase 1
  ENST ID: ENST00000592977
  CDS Start-End: 166-1089
gaaagggctcccgcaccgcccggtgctccccatctgcctggcgttgtgcgcagagctggaaagcatggctgttgtgcccagctaagacctgaatgccatcaccctccccagggctctgcagttttctcgtggtgaacccttgatggatttgttgttgcttgagaaatggcgatgatcgaattggggtttggaagacagaattttcatccattaaagaggaagagttcattgctgttgaaactcatagctgttgtctttgctgtgcttctattttgtgaatttttaatctattacttagcgatctttcagtgtaattggcctgaagtgaaaaccacagcctctgatggtgaacagaccacacgtgagcctgtgctcaaagccatgtttttggctgacacccatttgcttggggaattcctaggccactggctggacaaattacgaagggaatggcagatggagagagcgttccagacagctctgtggttgctgcagccggaagtcgtcttcatcctgggggatatctttgatgaagggaagtggagcacccctgaggcctgggcggatgatgtggagcggtttcagaaaatgttcagacacccaagtcatgtacagctgaaggtagttgctggaaaccatgacattggcttccattatgagatgaacacatacaaagtagaacgctttgagaaagtgttcagctctgaaagactgttttcttggaaaggcattaactttgtgatggtcaacagcgtggcgctgaacggggatggctgtggcatctgctctgaaacagaagcagagctcattgaagtttctcacagactgaactgctcccgagaggcacgtggctccagccggtgtggacctgggcctctgctgcccacgtctgcccctgtcctcctgcagcattatcctctgtatcggagaagtgatgctaactgttctggggaagacgctgctcctgcagaggaaagggacatcccatttaaggagaactatgacgtgctttcacgggaggcatcacaaaagctgctgtggtggctccagccgcgcctggttctcagtggccacacgcacagcgcctgc

SEQ ID NO: 153083 - DNA, 818 bp, Homo sapiens
  Payload ID: 10112
  Gene Symbol: MPPE1
  Gene Name: metallophosphoesterase 1
  ENST ID: ENST00000590501
  CDS Start-End: 537-818
gggtccctcggccaccgaagccaccctgccctggtgaaagggctcccgcaccgcccggtgctccccatctgcctggcgttgtgcgcagagctggaaagcatggctgttataaatgaattctgattttggggagcagatgccaacttagagcctcgtaccaatctctctgtctttaaaagatgaggtgacttggtgattttcctggaaaattatagaagcactgaggtggacactgcgggttgtgaggttcaggagggaggctctccagcagagaacccaggcccttcaccatactggtgcatggttcctgccacttgtgcagtccattccgaagtttcttacagatgagaatattaatgaaactttatcatcttggtgagaaaagcattctaatagctttattctgacatacggaggtatggagagcttgaaggagtcagagaggtgcccagctaagacctgaatgccatcaccctccccagggctctgcagttttctcgtggtgaacccttgatggatttgttgttgcttgagaaatggcgatgatcgaattggggtttggaagacagaattttcatccattaaagaggaagagttcattgctgttgaaactcatagctgttgtctttgctgtgcttctattttgtgaatttttaatctattacttagcgatctttcagtgtaattggcctgaagtgaaaaccacagcctctgatggtgaacagaccacacgtgagcctgtgctcaaagccatgtttttggctgacacccatttgcttggggaattcctaggccactggctggacaaattacgaagg

SEQ ID NO: 153084 - DNA, 582 bp, Homo sapiens
  Payload ID: 10113
  Gene Symbol: MPPED1
  Gene Name: metallophosphoesterase domain containing 1
  ENST ID: ENST00000334209
  CDS Start-End: 225-582
cacttgcagcctcggacgcgcggcgaggcggccgccgccggaggagcccccgcccctgcgcgcctccctcccgggagcccctgcctccctcggtgcgcgctgctgctcgcagccgccgcggccgccgaagaggagcccggggccagtctgtttccaggtctggcggggggccgggctgcggtggcggcagcggtgggagatgccggggcggccggcggaggtccatgtggcgctctaggtgggatgccagcgtcctgaaggcggaggccctggccctcctcccctgcggcctgggcatggcattctcccagtcccacgtgatggccgctcggcggcaccagcacagccggctcatcatcgaggtggacgagtacagctccaaccccacccaggccttcaccttctacaacatcaaccagggccgcttccagccaccgcatgtgcagatggtggacccggtgcctcacgatgcccccaaacctccaggctacacccgcttcgtctgcgtctctgatacccactcgaggacggaccccatccagatgccgtacggcgacgtgctgatccacgctggggacttca

SEQ ID NO: 153085 - DNA, 3657 bp, Homo sapiens
  Payload ID: 10113
  Gene Symbol: MPPED1
  Gene Name: metallophosphoesterase domain containing 1
  Uniprot ID: O15442
  ENST ID: ENST00000417669
  CDS Start-End: 445-1425
agcaaggcagggcctctttacactgggtgtcgcgccgtctgagttcctgacttgtttacccatcccgttggggctccggccgctgcaggctacctgctgtgcccgggattggggacctgtgactcccgagtggaagagatggtggcccaggaggaggaccccgacctattcagactgggagctggggtcagagtgtctccgtctccggagggggaccttccagaccccgggcgggaggggcccacagcagggtgccccggcggccccaggagggggtccgggcctcgggcgaaggctgcggcgccccggaaggagccgcgcacgcccctgcacgcggtgcccgctgcggaggccacggatccggagtctgtttccaggtctggcggggggccgggctgcggtggcggcagcggtgggagatgccggggcggccggcggaggtccatgtggcgctctaggtgggatgccagcgtcctgaaggcggaggccctggccctcctcccctgcggcctgggcatggcattctcccagtcccacgtgatggccgctcggcggcaccagcacagccggctcatcatcgaggtggacgagtacagctccaaccccacccaggccttcaccttctacaacatcaaccagggccgcttccagccaccgcatgtgcagatggtggacccggtgcctcacgatgcccccaaacctccaggctacacccgcttcgtctgcgtctctgatacccactcgaggacggaccccatccagatgccgtacggcgacgtgctgatccacgctggggacttcactgagctggggctcccgagcgaggtgaagaagttcaacgagtggctgggcagcctgccctacgagtacaagatcgtgatcgcaggcaaccacgagctgacctttgaccaggagttcatggccgacctcatcaagcaggacttttactacttcccatctgtgtcgaagctgaagccggagaactatgagaatgtgcagtcgctgctgaccaactgcatctaccttcaggactcggaggtcaccgtgcggggcttccggatctatggctccccatggcagccctggttctacggctggggcttcaacctcccgcgaggccaagccctgctggagaaatggaacctcattcccgaaggcgtagacatcctgataacccatggaccaccactgggcttcctggactgggtccccaagaagatgcagcgggtgggctgtgtggagctgctcaacacggtgcagaggcgcgtccagccgcggttacatgtctttggccacatccacgaagggtatggtgtcatggcagatgggacgaccacctatgtgaatgcgtccgtatgcactgtgaactaccagcccgtgaacccgcccatagtcatcgacctccccacaccccggaactcctgactgctccccactgcccctgccctgcccgcccgtgtcagctccacaggcctggcccggccactgttccttccatgctgagttgcctggacgacccatctggctgcggggactggcctagcaggcaggtcagggccttggaacgactctttagccttctgtcacctggagttgggaccctgcgcatccccatcaggggttctgtgctcatttactttttctgcgtgtacatcctgcgtgtacctcgttaaaggacctactaagctcatggccctgtcatgtttgggaaatgactaaatcttcattcttctcccttggacgccctcctggtttgggaagctgctgctcttgaatgggttttggaagttacacaaaatctccctctaaccacgggtctgtgtggcggcatgcccctgggttggggtgggtgggaggattcgtgagctgcacacagacagtccctttctctcctcccaagtgagggaggagacaggcccaaggcggaggccctccgagggagcatttagggacatctcaggaattcagaccgcacctggccaggcccacagctgtttgcctggcattgttcccccctttttcttcccataggcatttttgtttacttgaacaatgacctgagtgtcctaggcattcactcggagcctggatgatgggggctggttctacagaatgagccactggcattcgtgcccaggaccagtgagagcgttcccagtcatggggggatgacccttggtcccacggggaacacactgctctgtagaatgcggtagcctggatggagggtctgcaggcttaggctgcagcaggcctgccatgggtgtgaacccatgtccaggcacgcaccgacacacatgcacgcacgcacccctcttaattgaaccaagtgggtcctgtgtttctcttttctgccccgtagtgaggttctgttccttggtgcggcttcccttgcaccgttaggattctgtctggcatgcctgcagccgaggaagcccaggaccagccggccctgtgaattggagggtggcacagggaccgagcgggccccaggctccagcagccccaccttggacagcttctttttcttctttgaattaggactggagggggtggggccagggcggtggtgggaaccggtagggcctagatgaggggcaggcagtcaggcagaaatgggcaagttcagggtcagattctgtcgttatttaatattttgttcatcatggactttttctgcatttattttgatttttaacgttgcattaaagtagtattatttgtcctgattggtgactttttttgcacccctttccgttgtacatctgagagaagggtgtcactccctcacccaggtcccagccctgggaaccagcctaccgtgagcccttttgcagatatagactcatttcatcctcagatggtccttcaaggtaggtactttagtcccattttagagatgagacgattgaggccagaggggtgtggtaacttgcctgggggctcacagcacaaaaggagccgaggcaggatctgacccttgttctctggcctcactgccctcactttgccatgacccgaagttatgtccctacaaagcaatgcatggtccaaggctctttttattgtatttttatttttaagggtcctgttcaaaactggtgtgagctctgaggagtcctgaaccctgggtgcagcatcctagcatcctgggagtccttttctgcccacactgagctgggctcctcgaggggtggggctgctgtccctggaagcctggcagcagcactgtatcgggttggctgaagctgagcgccgtggggtgcagggctccaggaatcccgtttggctgaaggggttcctgtagccagggatgtttatgaggtctctctgatgccccaggcgcaggacatgtgtgcgggtggagaaaagcaggccctttcagtgccagctccactcaatttctatgtggaccaagaacgataaacttaaaaaaatttttttcctaaggtatcttcagaatatggtgtatttttatgtggaaaagaaaagttatgaaggcagctgttactttaagagaaaattcattaaaagtcctcgaggtatgaagatgacggcgtgcttctcaatcattttggcataacttgattgtggctgtaatttttttttttttttttgtcaagcatgtcagacaataaagtctttgtaaaaagagaa

SEQ ID NO: 153086 - DNA, 2507 bp, Homo sapiens
  Payload ID: 10113
  Gene Symbol: MPPED1
  Gene Name: metallophosphoesterase domain containing 1
  Uniprot ID: O15442
  ENST ID: ENST00000443721
  CDS Start-End: 224-1204
acttgcagcctcggacgcgcggcgaggcggccgccgccggaggagcccccgcccctgcgcgcctccctcccgggagcccctgcctccctcggtgcgcgctgctgctcgcagccgccgcggccgccgaagaggagcccggggccagtctgtttccaggtctggcggggggccgggctgcggtggcggcagcggtgggagatgccggggcggccggcggaggtccatgtggcgctctaggtgggatgccagcgtcctgaaggcggaggccctggccctcctcccctgcggcctgggcatggcattctcccagtcccacgtgatggccgctcggcggcaccagcacagccggctcatcatcgaggtggacgagtacagctccaaccccacccaggccttcaccttctacaacatcaaccagggccgcttccagccaccgcatgtgcagatggtggacccggtgcctcacgatgcccccaaacctccaggctacacccgcttcgtctgcgtctctgatacccactcgaggacggaccccatccagatgccgtacggcgacgtgctgatccacgctggggacttcactgagctggggctcccgagcgaggtgaagaagttcaacgagtggctgggcagcctgccctacgagtacaagatcgtgatcgcaggcaaccacgagctgacctttgaccaggagttcatggccgacctcatcaagcaggacttttactacttcccatctgtgtcgaagctgaagccggagaactatgagaatgtgcagtcgctgctgaccaactgcatctaccttcaggactcggaggtcaccgtgcggggcttccggatctatggctccccatggcagccctggttctacggctggggcttcaacctcccgcgaggccaagccctgctggagaaatggaacctcattcccgaaggcgtagacatcctgataacccatggaccaccactgggcttcctggactgggtccccaagaagatgcagcgggtgggctgtgtggagctgctcaacacggtgcagaggcgcgtccagccgcggttacatgtctttggccacatccacgaagggtatggtgtcatggcagatgggacgaccacctatgtgaatgcgtccgtatgcactgtgaactaccagcccgtgaacccgcccatagtcatcgacctccccacaccccggaactcctgactgctccccactgcccctgccctgcccgcccgtgtcagctccacaggcctggcccggccactgttccttccatgctgagttgcctggacgacccatctggctgcggggactggcctagcaggcaggtcagggccttggaacgactctttagccttctgtcacctggagttgggaccctgcgcatccccatcaggggttctgtgctcatttactttttctgcgtgtacatcctgcgtgtacctcgttaaaggacctactaagctcatggccctgtcatgtttgggaaatgactaaatcttcattcttctcccttggacgccctcctggtttgggaagctgctgctcttgaatgggttttggaagttacacaaaatctccctctaaccacgggtctgtgtggcggcatgcccctgggttggggtgggtgggaggattcgtgagctgcacacagacagtccctttctctcctcccaagtgagggaggagacaggcccaaggcggaggccctccgagggagcatttagggacatctcaggaattcagaccgcacctggccaggcccacagctgtttgcctggcattgttcccccctttttcttcccataggcatttttgtttacttgaacaatgacctgagtgtcctaggcattcactcggagcctggatgatgggggctggttctacagaatgagccactggcattcgtgcccaggaccagtgagagcgttcccagtcatggggggatgacccttggtcccacggggaacacactgctctgtagaatgcggtagcctggatggagggtctgcaggcttaggctgcagcaggcctgccatgggtgtgaacccatgtccaggcacgcaccgacacacatgcacgcacgcacccctcttaattgaaccaagtgggtcctgtgtttctcttttctgccccgtagtgaggttctgttccttggtgcggcttcccttgcaccgttaggattctgtctggcatgcctgcagccgaggaagcccaggaccagccggccctgtgaattggagggtggcacagggaccgagcgggccccaggctccagcagccccaccttggacagcttctttttcttctttgaattaggactggagggggtggggccagggcggtggtgggaaccggtagggcctagatgaggggcaggcagtcaggcagaaatgggcaagttcagggtcagattctgtcgttatttaatattttgttcatcatggactttttctgcatttattttgatttttaacgttgcattaaagtagtattatttgtcctg

SEQ ID NO: 153087 - DNA, 728 bp, Homo sapiens
  Payload ID: 10113
  Gene Symbol: MPPED1
  Gene Name: metallophosphoesterase domain containing 1
  ENST ID: ENST00000447567
  CDS Start-End: 505-728
aaattgtatttgaatcctgagcaaccacagccctctagcctcttcccctccctagccatatctgaacagcttcccatttcaactccatagatacgtgactctccaagtgctttattttgaaaactaggacgtagcactttgcagaagaaaaatcagtccacttgctattatttatgtgatcgctgatctgctagatggatatagaaagcaccaagaattataataatttatggagtagagcactggtttacaaacatatttctctgcccgagctttgtgtgtttctttgcgtctcggggctcgttctgtgcaatgggaatggagaatattcagaatttgaagacaagcccggcgagccgactgcattcatagctaaaattaaaggaataagtgagcagctatttgtggcagacaggacatgatccatctgtttccaggtctggcggggggccgggctgcggtggcggcagcggtgggagatgccggggcggccggcggaggtccatgtggcgctctaggtgggatgccagcgtcctgaaggcggaggccctggccctcctcccctgcggcctgggcatggcattctcccagtcccacgtgatggccgctcggcggcaccagcacagccggctcatcatcgaggtggacgagtacagctccaaccccacccaggccttcaccttctacaacatcaaccagggccgcttccagccaccgcatgtgcagat

SEQ ID NO: 153088 - DNA, 2405 bp, Homo sapiens
  Payload ID: 10114
  Gene Symbol: MPPED2
  Gene Name: metallophosphoesterase domain containing 2
  Uniprot ID: Q15777
  ENST ID: ENST00000358117
  CDS Start-End: 124-1008
agaaatgcacagcggtattgatgagtagatccttggattcagaggttggctgaaacgcaccatgcctgcttccatcttttgctctgtaaagttgtgaattgctcatgcctatagggaggaaggatggcacatgggattccttctcaaggcaaagttaccataacggtggatgagtacagctcaaaccccacccaggcattcacgcactacaacatcaaccagagcagattccagcctccacatgtacatatggtcgaccccatcccatatgacactccaaaaccagcgggccacacgcggtttgtctgcatctcagacacacactccagaacagatggtatccagatgccttatggggacatccttctccacacaggcgatttcaccgagctgggactgccctcagaggttaagaagtttaatgactggttaggaaacctgccatatgaatataaaatagtgattgctgggaatcatgaactgacatttgataaggaattcatggcagaccttgttaaacaggactactaccgtttcccctctgtgtccaaattgaaaccagaggactttgacaatgttcagtccctcctgacaaacagtatttacttacaagattcggaggtaacagtgaagggattcaggatatacggtgcaccttggaccccgtggtttaatggatggggctttaacctacccagaggtcagtctctgctggacaagtggaacctcatccctgagggcattgacatactcatgacacatggacctcctctaggttttcgagactgggttccaaaggagcttcaaagagtgggctgtgtggagctgttaaacacggttcagaggcgagtccggcccaagctccatgtgtttggtggaatccatgaaggttatggcatcatgaccgacggttacacaacgtacatcaatgcctcgacgtgtacagtcagctttcaaccgaccaaccctccaattatatttgaccttccaaacccacagggttcctgaagctctaaatgccctattggaatgtgagggaaggtctataaactgccatttttctaattataaacttacattctcttacttatttacaaaccctgtgagttctttttgtaaattgttggaacacaaatgatgctagaggttgtgcttcttattttattttattttaaatggggcatccatttgaaatcagaggaacattgtgaatttgtaaaatgacttctgttttctcaaaggccatgccattgtaaattgttagtgttcgccaaaggacagccaagctttcttttaaaaagtgataaaagtcttattttaatatgctttaagctgaaagaaaaaaaaataagaaacaggcagtgttttaaaaaccaacacagatttgcacaactgtttaagagtattgtttgaaatattttaattttcaatgttttgttgttgttgttttcttggtaatgcttcttttttgcagatgtggtcccaatttatagcaatcttctcaacagaagtaggcatggaaaagacttcttttcatactctcactataaagaaagctgcattgagaagaaaatggctgtcatttaaaggatggtttaactagtgagattcctattgtggttatacaaggtctcattgtttgtttgtttcttttaaattatttcagctttaaaaatacagaaatggaatctgtcaagagcaggtatttcatacggttaaaaaaatgaacatgcagactccttttcaatatgggtttatatatataagtattttttgtgtattatgactacgttaggagtttattattgtcaaggacagtacaactgcaaagggatgctgtatagcaacacatcagaagtcggaaggaactgacacattctctcagagctcaaggtcttaaagagcttgagttaaatctaggtacagttacaggcatgtatagacttaaatggatgcaatggaagctaactaaaataaggcttagttgtcctttctatttaaataccccaagttgtcttcttacttcctctcccctctcccattttgcactgtgtgtcgatgcaatcttcgctagcacaaaatattgtcgctaatagtcatttctgttttcccattgtaaatgctgttgagctttattctattttatgttactttgttaatgaaatttaggaaagcagttgtttctttaaatttattgtgatattctatatctagcggcctttatatgcaaataaaattgcaagatttttaaattcgtgctgtttagagggttggatggtggaggatggtagtttcgtcctggggaaggagggatttattcatatgcaacatcagtaatgcctttcagaagaattagaataagtgatttttttccctaattttcaataaatttttattacccacca

SEQ ID NO: 153089 - DNA, 5591 bp, Homo sapiens
  Payload ID: 10114
  Gene Symbol: MPPED2
  Gene Name: metallophosphoesterase domain containing 2
  Uniprot ID: Q15777
  ENST ID: ENST00000448418
  CDS Start-End: 362-1195
cccagatcgaggctgctcgggtcctttctccccccgcctccctctagcgccgcgccccctggcccccagccccagcctgcggcgggacctccggggtcgaaggttctggcccgctcgcgcccctcgccgcccccgcgcgcccccagcgctcctccagccggctcgggccgctcggctatggatcgcctgctcgccgggcgctgaaggcatccccgggatccggagcgcagcccgggaaagaaatgcacagcggtattgatgagtagatccttggattcagaggttggctgaaacgcaccatgcctgcttccatcttttgctctgtaaagttgtgaattgctcatgcctatagggaggaaggatggcacatgggattccttctcaaggcaaagttaccataacggtggatgagtacagctcaaaccccacccaggcattcacgcactacaacatcaaccagagcagattccagcctccacatgtacatatggtcgaccccatcccatatgacactccaaaaccagcgggccacacgcggtttgtctgcatctcagacacacactccagaacagatggtatccagatgccttatggggacatccttctccacacaggcgatttcaccgagctgggactgccctcagaggttaagaagtttaatgactggttaggaaacctgccatatgaatataaaatagtgattgctgggaatcatgaactgacatttgataaggaattcatggcagaccttgttaaacaggactactaccgtttcccctctgtgtccaaattgaaaccagaggactttgacaatgttcagtccctcctgacaaacagtatttacttacaagattcggaggtaacagtgaagggattcaggatatacggtgcaccttggaccccgtggtttaatggatggggctttaacctacccagaggtcagtctctgctggacaagtggaacctcatccctgagggcattgacatactcatgacacatggacctcctctaggttttcgagactgggttccaaaggagcttcaaagagtgggctgtgtggagctgttaaacacggttcagaggcgagtccggcccaagctccatgtgtttggtggaatccatgaagtaaaccctgtgagcatctccaaggcactgaggacaaaaatatgttctctgccttcaaaaacttcctagtctagaggaaactggcatagacacaattaattgatgatctgatgaattagcattgtgtgagctacaatcctggcatgaatcaagaactagagaggcacacaggaaggaaggaagatgcctctccttggtgaagacaaagaaggcatgaggaggaggcgacagggaagctcacctggtggacaacaggaaagactgcggaggagggctctgctggaagaggaaacagactggggaggtggggccagtgcataaagggccactgcaggaaggggttgtaggagaaaaggaaagacagatcagtcactgatgaccccctccaccccaggtctgcagacagagctgattccttctctaagcctcggcatcccctaccaacagtccctcctgctccttctctcccaagtcctctaaacagcttcatgcccaaaccacaaagagaacattctcaggcctaaggcaggccttcccagcacagaatgtttggagccctctgtgggagagcggctggcccccttaactgtcccccttccctccgggagccaaggcaggcactgtgcacctgcccctgaattgtgtgcggcagttgccggcctggagctgagtgacacagcaggtgcctccagcctgaagacaattccatatttcaatggagcgtcgccaccaaagcttattatctagggcaataaagtttaggattagggggattcaggatgattgtgtgattctccacaaagcttatcttctaatagaccagctgctttattaggccgcccccacccgcaccaggcccttcccaaagcatcccaagtcccaggcagccgacgggggccttgaaggcggcagtggtagacagctgggggtatcatatcaccctcagtctccatctgcgattattaaattacgggcggcttccagctgggcacaccccagctcccaccttcctcctacaaagccagcatcatcgtcaggcatctgccaaggacacgatgtggctgcctctcccctgctgatccctactgttgaactctaaaagggccaggtctgggtatttacttgctattagggctgtcactgtcacagtgtggaatgcagtggagtggaggcctggagagagggggggaccatggaaatttctgttgcaaatggggctttgctgggactgttcactataaacaaaaaaagaagatggaatcatgcaccacagaacctcaaagaagctggcatgcttaccaagctcccacatatttctcccaaaatgaaattcattaacgttgagtgttctagggaccacctccacatgctccctgatcccattgctccgttccttttctgatgggagcagagcatgggatggtgtctctccaaccccgtgtggtcagcagcactgaggctactctcgtttcctatccctccctgacagtctcctttatcctcagcccctgacagactatctgttcagagtaggaatttatcaataagtactgataagcatgctgaaaggaatatgggggactgggaatatgcctgaaacataatgaatgtttcaaagaaatgaaacgttctgaaaatggaattttcaaagattctgacaagcacacagcatctgcttgcagattttaggaaaacttagtcatagaattattcagagttcacatttcagccatggggatgttgtgtgcctgttgacagcagaggtccctgtagacgtttgttttttactgtgtctatgtgtgattcactaatgagagagtggcttagatgctcagagtaattaattgtagtattgagataatagtggctttgaaatccagctgtgcttatatgcgtgcacgctgtgcagttagatgctcccaggttcagatctgcttccatcactactaactatgtggccttgttttctgatctgcaagccatggattgtattgcttactttgcgggactgtggtaaacgttaggcatatatgaggcaagtgcaatgcccaacatttggcagatgcttaataagtgttggctattattattactactactactactattgcttttgctattgctattatgtgtgacctgtataataatcctactaatatgagtgaaggcaagaatcatggactatgcacccagcataatcaggagggtttgactgttgtgaatgaattcaagggcaggacaagcagcgacaagagttactgaagttcatctgatttgagttctgttcattcatttatttgggatccaaattctgaaccccagctctgtgctagacactgttctaggtgctgggaaaacagtcatgtgttagtctgtttttgctgccataaaggaatccctgagactgggtattttataaagaaaagaggtttatttaaatcacagttctgcaagcctaacacctggtggaagctgccaaggcttacagcttataccctctcaagcagcaccctaatctataccttgagccaagactggaattggagctgccatgatgcaggaagcagtgtcccaaggatgtgcagagcagtggggtcctgaatgtggccccccaaaccattcttttctcctaggcctctaggcctgtgatgggggggtggccttgaaaatctctgaaatgccttcaaggcctttttcccattgtcttggttattagcacttggctcccctttagccatgctaatctgtctagcaagtggttgctccacagcctgctcatatttcactcctgaaaatgttctttccttctccaccacacaaccagtttgtgaattttccaaacttttatgctctgcttcccttttaattatcaatttcccagcctcagatattcctttatagtaatgcaaatggactaacagaagcaatgaataagaaggggtcctggcccctctacaactcatcttctattgagaaagaaagaagaaaaaatgaaaataagttaaaaaaactcaaattttgataaaccctatgaagaaaataagaaatgggatagaagttagctggcatggcagggtggagtgggtgagtgacattaaggagggtgacaacagagaaactttctgataaaaaacccagtaagtaaaggtctaagtgatgtggatgaggcagccacttgaagacctgggacaaaagtgttcaggcagagaatatagcaggtacagagctttttgtataagaaggtagcaaaaaggccagtatagccagagaacagaggaggtaaggagaaagataggggatgaggcaggtgctaactcatcaacatccttgcaggccttgatgagagttaagatttcattataattgcaataagaagacagtggaaggttttttggcgggggtgggggtggtcaatgacatgattggattgatatgttggaaaagcccatctggcgactgtgttcagtaacagtgtgcttgcatgaagatccctcacagcagcagacaacacaaatgccccctcccacccatcatgaaaatttggaaagccaagccaataggaaactgaagctacaaagacccagcccctagaaagcaatataaacaagaccagaaaaagcatgtgttcaggacaagttcacattgaagtaaaaccatattgacattgattgcattccctacctgcttaggggttttgcttcacctaaactagtaccttgagaatctgtaaaagcttacaatttgagaaaagcaagagatgacacctgattatcctttgaattggcttccatgtctgtggctgttttccctaagttcctgtcccttacacacacgttacaaaactttgtctcaattctttgcttttaaaggatttgactttaacaaattcacattgggtacttgcttagtaggaaaggaaataatgactctcaccccctatgttataaaacttttaggagtattacacacaggcacatacagggcacactggtatggcttgtcattttgtgacaaattcttgtcagtttgtggtctggtggaaagcatatggaattagcaatcaagaaaggtgagatttagttctggctctgcttctaactagcaatgcaatcttggacaagagatttattctttcaagtctcagtttcatcttgtcatatggacatagagtgatacttccttttaaaagaacctgggtatcctggccaggcgcggtggctcatgcctcccagcactttgggaggccgaggcgggtggatcacaaggtcaggagatcgagaccatcctggccaacatggtgaaaccccgtctctactaaaaatacaaaaattagttgggcgtggtagtcccagctactcgggagactgaggcaggagaatttcttgaaccctggaggcggaggtagcagtgagccccgaggtcgtgccactgaactccagcctggcaacagagcgagactctgtct

SEQ ID NO: 153090 - DNA, 497 bp, Homo sapiens
  Payload ID: 10114
  Gene Symbol: MPPED2
  Gene Name: metallophosphoesterase domain containing 2
  ENST ID: ENST00000528686
  CDS Start-End: 253-497
agatcagcagatgggagggaacctagggtcgccttcctaggtctgagcgaagtgtcccagccgctccccttacccctgcggtgagccctgcgtcctggaacggtgccaggactcctgacagagcctggcagaaatgcacagcggtattgatgagtagatccttggattcagaggttggctgaaacgcaccatgcctgcttccatcttttgctctgtaaagttgtgaattgctcatgcctatagggaggaaggatggcacatgggattccttctcaaggcaaagttaccataacggtggatgagtacagctcaaaccccacccaggcattcacgcactacaacatcaaccagagcagattccagcctccacatgtacatatggtcgaccccatcccatatgacactccaaaaccagcgggccacacgcggtttgtctgcatctcagacacacactccagaacagatggtatccagatgccttatggggacatccttct

SEQ ID NO: 153091 - DNA, 1469 bp, Homo sapiens
  Payload ID: 10114
  Gene Symbol: MPPED2
  Gene Name: metallophosphoesterase domain containing 2
  ENST ID: ENST00000526437
  CDS Start-End: 200-553
tccggagaaaagtcttgccctccctctccgaaagaatgtgtcacccgggtgtccgcagtgctggagacaagttcaggtaaatgcacagcggtattgatgagtagatccttggattcagaggttggctgaaacgcaccatgcctgcttccatcttttgctctgtaaagttgtgaattgctcatgcctatagggaggaaggatggcacatgggattccttctcaaggcaaagttaccataacggtggatgagtacagctcaaaccccacccaggcattcacgcactacaacatcaaccagagcagattccagcctccacatgtacatatggtcgaccccatcccatatgacactccaaaaccagcgggccacacgcggtttgtctgcatctcagacacacactccagaacagatggtatccagatgccttatggggacatccttctccacacaggcgatttcaccgagctgggactgccctcagaggttaagaagtttaatgactggttagacctggtttcccattgcaagcatggaagaaaccctaatgcatgagtttcagaggagaaggtagcagtctgaacctgctgtgtggctccatcagcaagtgaaacctgccatatgaatataaaatagtgattgctgggaatcatgaactgacatttgataaggaattcatggcagaccttgttaaacaggactactaccgtttcccctctgtgtccaaattgaaaccagaggactttgacaatgttcagtccctcctgacaaacagtatttacttacaagattcggaggtaacagtgaagggattcaggatatacggtgcaccttggaccccgtggtttaatggatggggctttaacctacccagaggtcagtctctgctggacaagtggaacctcatccctgagggcattgacatactcatgacacatggacctcctctaggttttcgagactgggttccaaaggagcttcaaagagtgggctgtgtggagctgttaaacacggttcagaggcgagtccggcccaagctccatgtgtttggtggaatccatgaaggttatggcatcatgaccgacggttacacaacgtacatcaatgcctcgacgtgtacagtcagctttcaaccgaccaaccctccaattatatttgaccttccaaacccacagggttcctgaagctctaaatgccctattggaatgtgagggaaggtctataaactgccatttttctaattataaacttacattctcttacttatttacaaaccctgtgagttctttttgtaaattgttggaacacaaatgatgctagaggttgtgcttcttattttattttattttaaatggggcatccatttgaaatcagaggaacattgtgaatttgtaaaatgacttctgttttctcaaaggccatgccattgtaaattgttagtgttcgccaaaggacagccaagctttctttt

SEQ ID NO: 153092 - DNA, 396 bp, Homo sapiens
  Payload ID: 10115
  Gene Symbol: MT1A
  Gene Name: metallothionein 1A
  Uniprot ID: P04731
  ENST ID: ENST00000290705
  CDS Start-End: 74-259
accaagccttccacgtgcgccttatagcctctcaacttcttgcttgggatctccaacctcaccgcggctcgaaatggaccccaactgctcctgcgccactggtggctcctgcacctgcactggctcctgcaaatgcaaagagtgcaaatgcacctcctgcaagaagagctgctgctcctgctgccccatgagctgtgccaagtgtgcccagggctgcatctgcaaaggggcatcagagaagtgcagctgctgtgcctgatgtccggacagccctgctcgaagatatagaaagagtgacctgcacaaacttggaattttttttccatacaaccctgacccatttactgtattttttttaatgaaatatgtgaatgataataaaagttgctgacttaa

SEQ ID NO: 153093 - DNA, 411 bp, Homo sapiens
  Payload ID: 10115
  Gene Symbol: MT1A
  Gene Name: metallothionein 1A
  Uniprot ID: P04731
  ENST ID: ENST00000622334
  CDS Start-End: 74-259
accaagccttccacgtgcgccttatagcctctcaacttcttgcttgggatctccaacctcaccgcggctcgaaatggaccccaactgctcctgcgccactggtggctcctgcacctgcactggctcctgcaaatgcaaagagtgcaaatgcacctcctgcaagaagagctgctgctcctgctgccccatgagctgtgccaagtgtgcccagggctgcatctgcaaaggggcatcagagaagtgcagctgctgtgcctgatgtccggacagccctgctcgaagatatagaaagagtgacctgcacaaacttggaattttttttccatacaaccctgacccatttactgtattttttttaatgaaatatgtgaatgataataaaagttgcttgcttaaaaagaaaccaaaggg

SEQ ID NO: 153094 - DNA, 380 bp, Homo sapiens
  Payload ID: 10116
  Gene Symbol: MT1B
  Gene Name: metallothionein 1B
  Uniprot ID: P07438
  ENST ID: ENST00000334346
  CDS Start-End: 56-241
cctgccctgacttctcatatcttgcctaggaactccaggcttgtcttggctccaaatggatcccaactgctcctgcaccacaggtggctcctgtgcctgcgccggctcctgcaagtgcaaagagtgcaaatgtacctcctgcaagaagtgctgctgctcttgctgccccgtgggctgtgccaagtgtgcccagggctgtgtctgcaaaggctcatcagagaagtgccgctgctgtgcctgatgttgggagagccctgctcccagacataaatagagcaaccagtactaacctggatttttttttttaactaccctgaccggtttgctacattcttttttctattcaatatgtgaaagacaataaaacacttttgacttga

SEQ ID NO: 153095 - DNA, 351 bp, Homo sapiens
  Payload ID: 10116
  Gene Symbol: MT1B
  Gene Name: metallothionein 1B
  ENST ID: ENST00000562399
  CDS Start-End: 29-241
aggaactccaggcttgtcttggctccaaatggatcccaactgctcctgcaccacaggtggctcctgtgcctgcgccggctcctgcaagtgcaaagagtgcaaatgtacctcctgcaagaagctgctgctcttgctgccccgtgggctgtgccaagtgtgcccagggctgtgtctgcaaaggctcatcagagaagtgccgctgctgtgcctgatgttgggagagccctgctcccagacataaatagagcaaccagtactaacctggatttttttttttaactaccctgaccggtttgctacattcttttttctattcaatatgtgaaagacaataaaacacttttgacttga

SEQ ID NO: 153096 - DNA, 704 bp, Homo sapiens
  Payload ID: 10117
  Gene Symbol: MT1E
  Gene Name: metallothionein 1E
  Uniprot ID: P04732
  ENST ID: ENST00000306061
  CDS Start-End: 378-563
cggaacacgctgggaggagggtggaaggcaacctcggggaaactgggaaaggcggcctggacttcgggaacaccgcgtacctgcgggggcacagccccacccgagcgaacgggctccaaaggggaggtcccgcggtgcccaccgcgcagagctcagggggtggtgcgcccggcccttctgcggcgcacagcccagcccaggaacgcgggcggtgcggactcagcgggccgggtgcaggcgcggagctgggcctctgcgcccggcccgacctccgtctataaatagagcagccagttgcagggctccattctgctttccaactgcctgactgcttgttcgtctcactggtgtgagctccagcatcccctttgctcgaaatggaccccaactgctcttgcgccactggtggctcctgcacgtgcgccggctcctgcaagtgcaaagagtgcaaatgcacctcctgcaagaagagctgctgttcctgctgccccgtgggctgtgccaagtgtgcccagggctgcgtctgcaaaggggcatcggagaagtgcagctgctgtgcctgatgtgggaacagctcttctcccagatgtaaatagaacaacctgcacaacctggatttttttaaaaatacaacactgagccatttgctgcatttctttttatactaaatatgtgactgacaataaaaacaattttgactttaa

SEQ ID NO: 153097 - DNA, 729 bp, Homo sapiens
  Payload ID: 10117
  Gene Symbol: MT1E
  Gene Name: metallothionein 1E
  Uniprot ID: P04732
  ENST ID: ENST00000330439
  CDS Start-End: 55-438
cctgactgcttgttcgtctcactggtgtgagctccagcatcccctttgctcgaaatggaccccaactgctcttgcgccactggtggctcctgcacgtgcgccggctcctgcaagtgcaaagagtgcaaatgcacctcctgcaagaagagtgagtgcggggccatctccaggaatctggggctgtggctcaggttgggagggaactcaaggctggccctgagtgcatccttctggggaactgggctttctttgccctcattgcccgtgtcattccctctccaggctttctgccctaaattcagatggggcaggacagcatttttctcgtgggacacaaaccccaactgtaccccctatggtttcagaacagagctgtgccagacgaaaaaaagcatcctctgggtctgggttctgagctcgagccaggcttgctattagggcagggaggtgcccggtcaagtctactgccacctctcactctccccttcttccccaggctgctgttcctgctgccccgtgggctgtgccaagtgtgcccagggctgcgtctgcaaaggggcatcggagaagtgcagctgctgtgcctgatgtgggaacagctcttctcccagatgtaaatagaacaacctgcacaacctggatttttttaaaaatacaacactgagccatttgctgcatttctttttatactaaatatgtgactgacaataaaaacaattttgactttaa

SEQ ID NO: 153098 - DNA, 332 bp, Homo sapiens
  Payload ID: 10117
  Gene Symbol: MT1E
  Gene Name: metallothionein 1E
  ENST ID: ENST00000568293
  CDS Start-End: 72-191
attctgctttccaactgcctgactgcttgttcgtctcactggtgtgagctccagcatcccctttgctcgaaatggaccccaactgctcttgcgccactggctgctgttcctgctgccccgtgggctgtgccaagtgtgcccagggctgcgtctgcaaaggggcatcggagaagtgcagctgctgtgcctgatgtgggaacagctcttctcccagatgtaaatagaacaacctgcacaacctggatttttttaaaaatacaacactgagccatttgctgcatttctttttatactaaatatgtgactgacaataaaaacaattttgactttaa

SEQ ID NO: 153099 - DNA, 690 bp, Homo sapiens
  Payload ID: 10118
  Gene Symbol: MT1F
  Gene Name: metallothionein 1F
  Uniprot ID: P04733
  ENST ID: ENST00000334350
  CDS Start-End: 366-551
caaggggcgggtgtagcaggcaatcttggcgaaactgggaagggcgggcaggagggcagggaagccgctcacccaggcacaaagcgcctcccgcttgagcggactccaaagggacggtccgcggtgtgcagcgagctgcgctcaggggaccttgcgcccggcccttctgctgcacacagcccacccaggacctcccgcagcgctgacaggcggggcgggtgcaaagacggggcggggtctctgcgcccggccccctcccctgactatcaaagcagcggccggctgttggggtccaccacgccttccacctgccccactgcttcttcgcttctctcttggaaagtccagtctctcctcggcttgcaatggaccccaactgctcctgcgccgctggtgtctcctgcacctgcgctggttcctgcaagtgcaaagagtgcaaatgcacctcctgcaagaagagctgctgctcctgctgccccgtgggctgtagcaagtgtgcccagggctgtgtttgcaaaggggcgtcagagaagtgcagctgctgcgactgatgccaggacaacctttctcccagatgtaaacagagagacatgtacaaacctggattttttttttataccaccttgacccatttgctacattccttttcctgtgaaatatgtgagtgataattaaacactttagacctga

SEQ ID NO: 153100 - DNA, 416 bp, Homo sapiens
  Payload ID: 10118
  Gene Symbol: MT1F
  Gene Name: metallothionein 1F
  ENST ID: ENST00000568475
  CDS Start-End: 48-182
gcttcttcgcttctctcttggaaagtccagtctctcctcggcttgcaatggaccccaactgctcctgcgccgctggtgtctcctgcacctgcgctggttcctgcaagtgcaaagagtgcaaatgcacctcctgcaagaagagtgagtgtgaggccatctccatggtctggggctgtggctaaggctgctgctcctgctgccccgtgggctgtagcaagtgtgcccagggctgtgtttgcaaaggggcgtcagagaagtgcagctgctgcgactgatgccaggacaacctttctcccagatgtaaacagagagacatgtacaaacctggattttttttttataccaccttgacccatttgctacattccttttcctgtgaaatatgtgagtgataattaaacactttagacctgatt

SEQ ID NO: 153101 - DNA, 405 bp, Homo sapiens
  Payload ID: 10119
  Gene Symbol: MT1G
  Gene Name: metallothionein 1G
  Uniprot ID: P13640
  ENST ID: ENST00000379811
  CDS Start-End: 73-261
actccgccttccacgtgcacccactgcctcttcccttctcgcttgggaactctagtctcgcctcgggttgcaatggaccccaactgctcctgtgccgctgcaggtgtctcctgcacctgcgccagctcctgcaagtgcaaagagtgcaaatgcacctcctgcaagaagagctgctgctcctgctgccctgtgggctgtgccaagtgtgcccagggctgcatctgcaaaggggcatcggagaagtgcagctgctgcgcctgatgtcgggacagccctgctcccaagtacaaatagagtgacccgtaaaatccaggattttttgttttttgctacaatcttgacccctttgctacattcctttttttctgtgaaatatgtgaataataattaaacacttagacttga

SEQ ID NO: 153102 - DNA, 406 bp, Homo sapiens
  Payload ID: 10119
  Gene Symbol: MT1G
  Gene Name: metallothionein 1G
  Uniprot ID: P13640
  ENST ID: ENST00000444837
  CDS Start-End: 73-258
actccgccttccacgtgcacccactgcctcttcccttctcgcttgggaactctagtctcgcctcgggttgcaatggaccccaactgctcctgtgccgctggtgtctcctgcacctgcgccagctcctgcaagtgcaaagagtgcaaatgcacctcctgcaagaagagctgctgctcctgctgccctgtgggctgtgccaagtgtgcccagggctgcatctgcaaaggggcatcggagaagtgcagctgctgcgcctgatgtcgggacagccctgctcccaagtacaaatagagtgacccgtaaaatccaggattttttgttttttgctacaatcttgacccctttgctacattcctttttttctgtgaaatatgtgaataataattaaacacttagacttgattcc

SEQ ID NO: 153103 - DNA, 305 bp, Homo sapiens
  Payload ID: 10119
  Gene Symbol: MT1G
  Gene Name: metallothionein 1G
  ENST ID: ENST00000569500
  CDS Start-End: 42-161
tcccttctcgcttgggaactctagtctcgcctcgggttgcaatggaccccaactgctcctgtgccgctggctgctgctcctgctgccctgtgggctgtgccaagtgtgcccagggctgcatctgcaaaggggcatcggagaagtgcagctgctgcgcctgatgtcgggacagccctgctcccaagtacaaatagagtgacccgtaaaatccaggattttttgttttttgctacaatcttgacccctttgctacattcctttttttctgtgaaatatgtgaataataattaaacacttagacttga

SEQ ID NO: 153104 - DNA, 628 bp, Homo sapiens
  Payload ID: 10119
  Gene Symbol: MT1G
  Gene Name: metallothionein 1G
  ENST ID: ENST00000568675
  CDS Start-End: 29-235
gggaactctagtctcgcctcgggttgcaatggaccccaactgctcctgtgccgctggtgtctcctgcacctgcgccagctcctgcaagtgcaaagagtgcaaatgcacctcctgcaagaagagtgagtgcggggccatctccaggaatctggggctgtggctaaggttgggagggaacccaaggctgtccctgagtgcgtgcttctggggaaccggccttcctttgtccctgtaggttgtcactgcctgtctagtcttctgcactttccagggcttatgtgaggtggggcagctttctcaaaggaagacccattccaatgtccaccagttgtctcctgacaaaaaccatgccatcatgaactaagggtcctctggggctggagggatggagacaggcctctgttggggcagggagttctctgatcgagtctgctctgacctctcaatctcctttcctccccaggctgctgctcctgctgccctgtgggctgtgccaagtgtgcccagggctgcatctgcaaaggggcatcggagaagtgcagctgctgcgcctgatgtcgggacagccctgctcccaagtacaaatagagtgacccgtaaaatccaggattttttgttttttgctaca

SEQ ID NO: 153105 - DNA, 397 bp, Homo sapiens
  Payload ID: 10120
  Gene Symbol: MT1H
  Gene Name: metallothionein 1H
  Uniprot ID: P80294
  ENST ID: ENST00000332374
  CDS Start-End: 72-257
accacgccctccacgtgttccactgcctcttctcttctcgcttgggaactccagtctcacctcggcttgcaatggaccccaactgctcctgcgaggctggtggctcctgcgcctgcgccggctcctgcaagtgcaaaaagtgcaaatgcacctcctgcaagaagagctgctgctcctgttgccccctgggctgtgccaagtgtgcccagggctgcatctgcaaaggggcgtcagagaagtgcagctgctgtgcctgatgtcgggacagccctgctgtcagatgaaaacagaatgacacgtaaaatccaggattttttttttctacaactccgactcatttgctacattcctttttttctgtgaaatatgtgaataataattaaacacttagacttga

SEQ ID NO: 153106 - DNA, 697 bp, Homo sapiens
  Payload ID: 10120
  Gene Symbol: MT1H
  Gene Name: metallothionein 1H
  ENST ID: ENST00000569155
  CDS Start-End: 46-303
ctcttctcttctcgcttgggaactccagtctcacctcggcttgcaatggaccccaactgctcctgcgaggctggtggctcctgcgcctgcgccggctcctgcaagtgcaaaaagtgcaaatgcacctcctgcaagaagagtgagtgcggggccatctccaggaatctggggctgtggctaaggttgggagggaacccaaggctggccctgagtgcctgcttcctttgtccccctaggccgtcactgcctttccagtcttctgctctgtccagggctcctgtggggctgggcagtctctcataggaagactcaccccaatatccaccagtcgtctcctgaaaaagctgtgccatcctgaactaaggatcctctggggctggagtctgagcttgagccaggcctgctgttgggagagggagctccctggtcaagtctgctgtgacttctctctccctttttccccaggctgctgctcctgttgccccctgggctgtgccaagtgtgcccagggctgcatctgcaaaggggcgtcagagaagtgcagctgctgtgcctgatgtcgggacagccctgctgtcagatgaaaacagaatgacacgtaaaatccaggattttttttttctacaactccgactcatttgctacattcctttttttctgtgaaatatgtgaataataattaaacacttagacttga

SEQ ID NO: 153107 - DNA, 316 bp, Homo sapiens
  Payload ID: 10121
  Gene Symbol: MT1HL1
  Gene Name: metallothionein 1H-like 1
  Uniprot ID: P0DM35
  ENST ID: ENST00000464121
  CDS Start-End: 47-232
cctcttctcttctcgcttgggaacgccggtctcacctcggcttgcaatggaccccaactgctcctgcgccgctggaggctcctacgcctgcgccggctcctgcaagtgcaaaaagtgcaaatgcacctcctgcaagaagagctgctgctcctgttgccccctgggctgtgccaagtgtgcccagggctgcatccgcaaaggggcttcggaaaagtgcagctgctgtgcctgatgtcgggactgccctgctctcggatgaaaacagaatgacacgtaaagtccgggatttttttttctacaaccccgacccatttgc

SEQ ID NO: 153108 - DNA, 829 bp, Homo sapiens
  Payload ID: 10122
  Gene Symbol: MT1M
  Gene Name: metallothionein 1M
  Uniprot ID: Q8N339
  ENST ID: ENST00000379818
  CDS Start-End: 500-685
cggggactggagcaggagggctgcaccgggactccgggacaggcccagttgaaaacggcggggcgagggggtggggtggagacgcccgcgacgccaaggctggggtcccggaaagcgcggggaggagggtggaaggcaaaggcaacttcggggaaactgggaaaggcggccgggacctcggggacactgcgtaccacccggcgcacagcccctcccgcgcaaacccgagccaaaggggcggtcgagcggcgcactcggagcggagctcaggggatggtgcgcccggcacttatgctgggctcagcccagcccagcccaggaccgctggcggtgcgaacccagccgggcgggtgcaagcgcggggcagggcctctgcgcccggccccctcccctgagtagaaaagcagccgcaggctgtggcgctccaccacgccgtccgggtgggcctagcagtcgctccatttatcgcttgagatctccagccttaccgcggctcgaaatggaccccaactgctcctgcaccactggtgtctcctgcgcctgcaccggctcctgcacgtgcaaagagtgcaaatgcacctcctgcaagaagagctgctgctcctgctgccccgtgggctgtgccaagtgtgcccacggctgtgtctgcaaagggacgttggagaactgcagctgctgtgcctgatgtgggaacagctcttctcccagatgttaatagaacaagctgcacaacctggattttttttcaatacgatactgagccatttgctgcatttctttttatattaaatatgtgagtgacaataaaacaattttgacttgaatctta

SEQ ID NO: 153109 - DNA, 232 bp, Homo sapiens
  Payload ID: 10122
  Gene Symbol: MT1M
  Gene Name: metallothionein 1M
  ENST ID: ENST00000570233
  CDS Start-End: 26-232
atctccagccttaccgcggctcgaaatggaccccaactgctcctgcaccactggtgtctcctgcgcctgcaccggctcctgcacgtgcaaagagtgcaaatgcacctcctgcaagaagagtgagtgcggggccatctccaggaatctggggctgtggctgagattgggagggaacccaaggctggccctgagtgcatccttctggggaactgggctttctttgccctcattg

SEQ ID NO: 153110 - DNA, 450 bp, Homo sapiens
  Payload ID: 10123
  Gene Symbol: MT1X
  Gene Name: metallothionein 1X
  Uniprot ID: P80297
  ENST ID: ENST00000394485
  CDS Start-End: 118-303
ggccctcttcccggactataaagagagccgccggcttctgggctccaccacgcttttcatctgtcccgctgcgtgttttcctcttgatcgggaactcctgcttctccttgcctcgaaatggaccccaactgctcctgctcgcctgttggctcctgtgcctgtgccggctcctgcaaatgcaaagagtgcaaatgcacctcctgcaagaagagctgctgctcctgctgccctgtgggctgtgccaagtgtgcccagggctgcatctgcaaagggacgtcagacaagtgcagctgctgtgcctgatgccaggacagctgtgctctcagatgtaaatagagcaacctatataaacctggattttttttttttttttttttgtacaaccctgacccgtttgctacatctttttttctatgaaatatgtgaatggcaataaattcatctagacta

SEQ ID NO: 153111 - DNA, 549 bp, Homo sapiens
  Payload ID: 10123
  Gene Symbol: MT1X
  Gene Name: metallothionein 1X
  ENST ID: ENST00000564974
  CDS Start-End: 61-201
catctgtcccgctgcgtgttttcctcttgatcgggaactcctgcttctccttgcctcgaaatggaccccaactgctcctgctcgcctgttggctcctgtgcctgtgccggctcctgcaaatgcaaagagtgcaaatgcacctcctgcaagaagagtgagtgcagggccttccctgcgaatctgggggatgggccaagttagagcagggaacccagagctctgcaggcaggggcaggccaatgaccagcttccccaaacccctccttcaacacctgattcagaatcagacctcaaattgccttaaaaatgggctgctgctcctgctgccctgtgggctgtgccaagtgtgcccagggctgcatctgcaaagggacgtcagacaagtgcagctgctgtgcctgatgccaggacagctgtgctctcagatgtaaatagagcaacctatataaacctggattttttttttttttttttttgtacaaccctgacccgtttgctacatctttttttctatgaaatatgtgaatggcaataaattcatctagacta

SEQ ID NO: 153112 - DNA, 538 bp, Homo sapiens
  Payload ID: 10123
  Gene Symbol: MT1X
  Gene Name: metallothionein 1X
  ENST ID: ENST00000562939
  CDS Start-End: 72-212
accacgcttttcatctgtcccgctgcgtgttttcctcttgatcgggaactcctgcttctccttgcctcgaaatggaccccaactgctcctgctcgcctgttggctcctgtgcctgtgccggctcctgcaaatgcaaagagtgcaaatgcacctcctgcaagaagagtgagtgcagggccttccctgcgaatctgggggatgggccaagttagagcagggaacccagagctctgcaggcaggggcaggccaatgaccagcttccccaaacccctccttcaacacctgattcagaatcagacctcaaattgccttaaaaatgggtgagtcccagcctcttattaccaaactagaaactgaggcccagagaggttaccagatagtgttgggaacaaagctggaatgtgaacctaggtctcctgcctcctgatgcagccttcttcacccttctgggtcctgaagcacttaaggcccaggatctggaagaccccgggtgatttcaaacctaatgatccagtcctttcctgcaggggtagccca

SEQ ID NO: 153113 - DNA, 786 bp, Homo sapiens
  Payload ID: 10124
  Gene Symbol: MT2A
  Gene Name: metallothionein 2A
  Uniprot ID: P02795
  ENST ID: ENST00000245185
  CDS Start-End: 458-643
aagcagcattcccaagtcccgctttcacccgcgcgctaacggctcaggttcgagtacaggacaggagggaggggagctgtgcacacggcggaggcgcacggcgtgggcacccagcacccggtacactgtgtcctcccgctgcacccagccccttccgcgccgaggcgtccccgaggcgcaagtgggccgccttcagggaactgaccgcccgcggcccgtgtgcagagccgggtgcgcccggcccagtgcgcgcggccgggtgtttcgcctggagccgcaagtgactcagcgcggggcgtgtgcaggcagcgcccggccggggcggggcttttgcactcgtcccggctctttctagctataaacactgcttgccgcgctgcactccaccacgcctcctccaagtcccagcgaacccgcgtgcaacctgtcccgactctagccgcctcttcagctcgccatggatcccaactgctcctgcgccgccggtgactcctgcacctgcgccggctcctgcaaatgcaaagagtgcaaatgcacctcctgcaagaaaagctgctgctcctgctgccctgtgggctgtgccaagtgtgcccagggctgcatctgcaaaggggcgtcggacaagtgcagctgctgcgcctgatgctgggacagccccgctcccagatgtaaagaacgcgacttccacaaacctggattttttatgtacaaccctgaccgtgaccgtttgctatattcctttttctatgaaataatgtgaatgataataaaacagctttgacttga

SEQ ID NO: 153114 - DNA, 581 bp, Homo sapiens
  Payload ID: 10124
  Gene Symbol: MT2A
  Gene Name: metallothionein 2A
  ENST ID: ENST00000561491
  CDS Start-End: 51-272
gcgaacccgcgtgcaacctgtcccgactctagccgcctcttcagctcgccatggatcccaactgctcctgcgccgccggtgactcctgcacctgcgccggctcctgcaaatgcaaagagtgcaaatgcacctcctgcaagaaaagtaagtgggatcctctctttcctctaccccttccctgtcctccagcctgtcccctctccaccatcctcaggggaattaaagcagtctggggatgccccattgcgcggaaattgttgcctcctcagtgatccttatcagggagagcaggaatccttattcccggtgtcgctagtactcatctctgccgcctcctgtctgcccccaggctgctgctcctgctgccctgtgggctgtgccaagtgtgcccagggctgcatctgcaaaggggcgtcggacaagtgcagctgctgcgcctgatgctgggacagccccgctcccagatgtaaagaacgcgacttccacaaacctggattttttatgtacaaccctgaccgtgaccgtttgctatattcctttttctatgaaataatgtgaatgataataaaacagctttgact

SEQ ID NO: 153115 - DNA, 569 bp, Homo sapiens
  Payload ID: 10125
  Gene Symbol: MT3
  Gene Name: metallothionein 3
  Uniprot ID: P25713
  ENST ID: ENST00000200691
  CDS Start-End: 224-430
acacacggcaggggcgggcgacagatgcagtgcgtgcgccggagcccaagcgcacaaacggaaagagcgggcgcggtgcgcaggggcgggcgcccagcgggcttggcatgcgcgcccccgcccgaggctataaaagcatcgccacctgctgccactagccaagccgcgcgtccagttgcttggagaagcccgttcaccgcctccagctgctgctctcctcgacatggaccctgagacctgcccctgcccttctggtggctcctgcacctgcgcggactcctgcaagtgcgagggatgcaaatgcacctcctgcaagaagagctgctgctcctgctgccctgcggagtgtgagaagtgtgccaaggactgtgtgtgcaaaggcggagaggcagctgaggcagaagcagagaagtgcagctgctgccagtgagaaggcacccctccgtgtggagcacgtggagatagtgccaggtggctcagtgccacctatgcctgtggtgaagtgtggctggtgtccccttcccctgctgaccttggaggaatgacaataaatcccatgaacagcatga

SEQ ID NO: 153116 - DNA, 514 bp, Homo sapiens
  Payload ID: 10125
  Gene Symbol: MT3
  Gene Name: metallothionein 3
  ENST ID: ENST00000561640
  CDS Start-End: 47-388
ttcagcaacccgtctgaacagatctggcgtcctggagaattctagaatgaaggggaagagaggcagggaagagctgggaaatacgcaaagcgcctttttctccactttcggagatgccaagccgcgcgtccagttgcttggagaagcccgttcaccgcctccagctgctgctctcctcgacatggaccctgagacctgcccctgcccttctggtggctcctgcacctgcgcggactcctgcaagtgcgagggatgcaaatgcacctcctgcaagaagagctgctgctcctgctgccctgcggagtgtgagaagtgtgccaaggactgtgtgtgcaaaggcggagaggcagctgaggcagaagcagagaagtgcagctgctgccagtgagaaggcacccctccgtgtggagcacgtggagatagtgccaggtggctcagtgccacctatgcctgtggtgaagtgtggctggtgtccccttcccctgctgaccttggaggaatgacaataaatccc

SEQ ID NO: 153117 - DNA, 421 bp, Homo sapiens
  Payload ID: 10125
  Gene Symbol: MT3
  Gene Name: metallothionein 3
  ENST ID: ENST00000565838
  CDS Start-End: 47-292
ttcagcaacccgtctgaacagatctggcgtcctggagaattctagaatgaaggggaagagaggcagggaagagctgggaaatacgcaaagcgcctttttctccactttcggagatggtggctcctgcacctgcgcggactcctgcaagtgcgagggatgcaaatgcacctcctgcaagaagagctgctgctcctgctgccctgcggagtgtgagaagtgtgccaaggactgtgtgtgcaaaggcggagaggcagctgaggcagaagcagagaagtgcagctgctgccagtgagaaggcacccctccgtgtggagcacgtggagatagtgccaggtggctcagtgccacctatgcctgtggtgaagtgtggctggtgtccccttcccctgctgaccttggaggaatgacaataaatcccatg

SEQ ID NO: 153118 - DNA, 579 bp, Homo sapiens
  Payload ID: 10125
  Gene Symbol: MT3
  Gene Name: metallothionein 3
  ENST ID: ENST00000570176
  CDS Start-End: 52-330
cagttgcttggagaagcccgttcaccgcctccagctgctgctctcctcgacatggaccctgagacctgcccctgcccttctggtggctcctgcacctgcgcggactcctgcaagtgcgagggatgcaaatgcacctcctgcaagaagagtgagtgcggggacccttcccctctgccgccgccccctctgctctgcggagtcggtgtctcaccacgcaggatgtggagagacagccaggccccgatcccgtggtttctgactcttgctggaatagaaccacccgggcagacattaaaatacagatgcccctgccccacacccaggaattgatggcctaggcgtgggacgagaggtttttgtaaatccccagaagactccaatggcagctgggattgaggactgccacactggtccaacctttcccgacccatccctcaaaaactccccaaaacctggggaagccattagtgaggctgcggctcagctctggagttccggtcccttggcctctctccggccttacggatcctctcagtttgatctcaaaatctccccagctcacggcagtgtaatatgcat

SEQ ID NO: 153119 - DNA, 294 bp, Homo sapiens
  Payload ID: 10126
  Gene Symbol: MT4
  Gene Name: metallothionein 4
  Uniprot ID: P47944
  ENST ID: ENST00000219162
  CDS Start-End: 81-269
atggggagcctctggctgctgctcactcagcctcccttccccagccgtgacagcactggagcctttcggacacctggaccatggaccccagggaatgtgtctgcatgtctggaggaatctgcatgtgtggagacaactgcaaatgcacaacctgcaactgtaaaacatattggaagagctgctgtccctgctgccccccgggctgtgccaaatgtgcccggggctgcatctgcaaaggaggctcagacaagtgcagctgctgcccatgaaagccatccatcgtgcccacccctt

SEQ ID NO: 153120 - DNA, 2579 bp, Homo sapiens
  Payload ID: 10127
  Gene Symbol: MTL5
  Gene Name: metallothionein-like 5, testis-specific (tesmin)
  Uniprot ID: Q9Y4I5
  ENST ID: ENST00000255087
  CDS Start-End: 185-1711
actgcccgggcgcctcttcccctccccccaggttcctgtccctcacccttcccccttctccaaccgccaacggccgcctgcgcctgaggcccggcccacgccccatcccgctcgctccacgctgcggcagccccggcggccccaggtgcgcggcccccgccatcccgccccgccgccctgcgccatggaggagggccctctgccgggcgggctgcccagccccgaggatgcgatggtgacggagctcttaagccccgagggtccgttcgcttcggagaacatcggcctgaaggcccccgtgaagtacgaggaggacgagttccacgtcttcaaagaagcgtacctgggcccggcggaccccaaggaacccgtcctgcacgcgttcaaccccgcgctgggcgccgactgcaagggccaggtcaaggcgaagctcgcggggggcgacagcgacggcggggagctcctcggggagtaccccgggatcccagagctcagcgcgctggaggacgtcgcgctcctgcaggccccgcagccgcccgcctgcaacgtgcacttcctgtcctcgctgctacccgcgcaccgcagcccggcggtgttgcccctgggcgcctgggtcctggaaggagcctcccacccgggcgtccgcatgatcccagttgaaatcaaggaagcaggtggtactactacaagtaataatccggaagaagcaactttgcagaatcttcttgctcaggaatcctgttgcaagttcccatcgtcccaggaactagaggatgcctcctgctgttctcttaagaaagattccaacccaatggtgatatgccaattgaaagggggcacacaaatgctatgtatagacaattctagaacaagagaactaaaagcactccatttggttcctcagtatcaagatcaaaataattatctacagtcagatgtccctaaaccaatgactgctttagtagggagatttttgccagcatcaacaaaattaaatctcattacacaacaacttgagggagccttaccatcggtagtcaacgggtctgctttcccctcgggatcaactcttccaggaccaccaaaaataactttggctgggtactgtgactgctttgccagtggggacttttgcaacaactgcaattgtaataattgttgcaacaacttgcatcatgatattgaacggtttaaagccattaaggcatgtcttggtagaaatccagaagctttccagccaaaaattgggaagggccaattgggcaatgtcaagccccagcacaacaaagggtgcaactgcaggaggtcaggctgcctgaagaattactgcgagtgctatgaggcccaaattatgtgttcttctatttgcaaatgcattggttgcaaaaattatgaagaaagcccagaacgaaagacactaatgagcatgccaaactacatgcagactggaggtttggaaggcagccattacctgccaccaacgaaattttcaggacttccaagattcagtcacgataggcggccttcctcatgcatctcctgggaggtggtggaggccacatgcgcctgcctgcttgctcagggagaagaggccgagaaagaacactgctccaagtgcctggcagagcagatgatcctggaggaatttggaaggtgcttatcacagattctccacactgagtttaaatctaagggattgaaaatggagtagagtataaagtgtgaatgcatgttgattttgtcttagtctagaaatctctagtttagaaaggatgtttaggggaacatgaggctggctctgcagcaacaaccaggctcccctgcatccctgggcccagggagtttactcagagctctctgaagatgtggcaacccatgcccccttttctgaggaggtgcatggcctgagcattgtttgtctggcccagaggagagagcttgggttcccatagtcctgggagagtgtctgcagggcggcggagggcagagcagggcaggggagggcacagcaggccctgcgaagggcagagcggggcaggggagggcagagcaggccctgcggagagctcactctggtcgactcttcctctcagagaatgttgctctggaggctgctctgcatgaaaaccctaatggtttcttgtttgtttttcaaattatttagaaataagttctccggatgggctgttgtgataccacttaaaatctctagagaactactgaacacctaaagattttctgtagcgtagatatttccccagaggcacgcgaactgtcagtctttcctaaggcccccgggagacgcaggcaatggggcctcgcaggccaggcttgcaccagcatgtcttgagttagaggacttaaaattatccagtttcttctgtgtttctacttgaattgtggaaaagctctattatccaattaacttctccataattattgttgtaatattattattgtttgtaaaacatggttcacataactagcttgtggaaaccagcaggtaaaatgaattcttaagttgacgcttttggttctgttgtaaagcaaagatgaataaaaatttccaatgtcttcaa

SEQ ID NO: 153121 - DNA, 3495 bp, Homo sapiens
  Payload ID: 10127
  Gene Symbol: MTL5
  Gene Name: metallothionein-like 5, testis-specific (tesmin)
  Uniprot ID: Q9Y4I5
  ENST ID: ENST00000443940
  CDS Start-End: 88-843
acgccccatcccgctcgctccacgctgcggcagccccggcggccccaggtgcgcggcccccgccatcccgccccgccgccctgcgccatggaggagggccctctgccgggcgggctgcccagccccgaggatgcgatggtgacggagctcttaagccccgagggtccgttcgcttcggagaacatcggcctgaaggcccccgtgaagtacgaggaggacgagttccacgtcttcaaagaagcgtacctgggcccggcggaccccaaggaacccgtcctgcacgcgttcaaccccgcgctgggcgccgactgcaagggccaggtcaaggcgaagctcgcggggggcgacagcgacggcggggagctcctcggggagtaccccgggatcccagagctcagcgcgctggaggacgtcgcgctcctgcaggccccgcagccgcccgcctgcaacgtgcacttcctgtcctcgctgctacccgcgcaccgcagcccggcggtgttgcccctgggcgcctgggtcctggaaggagcctcccacccgggcgtccgcatgatcccagttgaaatcaaggaagcaggtggtactactacaagtaataatccggaagaagcaactttgcagaatcttcttgctcaggaatcctgttgcaagttcccatcgtcccaggaactagaggatgcctcctgctgttctcttaagaaagattccaacccaatggtgatatgccaattgaaagggggcacacaaatgctatgtatagacaattctagaacaagagaactaaaagcactccatttggttcctcagtatcaagatcaaaataattatctacagtcagcttgagggagccttaccatcggtagtcaacgggtctgctttcccctcgggatcaactcttccaggaccaccaaaaataactttggctgggtaaggattagaagcaatacattgtcactctaatgtaataatttaagagactcttggatacgttcacgattttcttctatactataaaatgagcttcactgcacaccttcatgacttctgagaaatgtttttaccatcagcaatgccactaacggtgttgctgtctgtgtctggtttcactggggctgcaaaggctgctggaaagtctggcccataacctgcatctgtccctgtcctcctgtccgctgtcctatgttggtgtttctgaggcttgttgccatttatagctctttgtcttcattccatgttgattcaaactgtactggcctctcttttttgctgtcgtccgtggaaataatggtgtggcagccatgcagcatgaacggggggctgcagagtgccctccagctgcctccgcccgctgccttccatgctgagttggctcgagctctatggcaggtgctaatgcatgatctgtcttcacatctccaggtggacataggctgcacttatctgggacctcatcttgctatttcttgcctgtcttgtgtttataatcttgctatttcttgcctgtcttgtgtttataattgttgctaattaaactaatcagctggttgaaattatcaggttaacatttatgtattaacagtggtttgggcaaccctctccattcgttgagccctgtagttgattatggagatcagcatattcctgcctccaagaggtgtttgtttgtttgtttgttttttcttgttttttgtttgtttgtttgttttgtttttttgagacggactcttgctctgtcacccaggctggaatacaatggcatgatctctgctcactgcaacctccgcctcctgggttcaagcaattctccttcctcagcctcccgagtagctgggaccacaggcgcataccactataccaggctaatttttgtattttttagtagagactgggttttaccatgttggccaggctggtcttgaaatactgacctcagatgatccgcccatctcagcctcccaaagtgctgggattacaggcgtgcccggcctgcctgcaggagttctttgggcccacagtctaaggcaaacacataccctgggcctgagagacagcagtcaaacaccttacaggatacagcccgcagcctccagtgctttccaggctcctgcagagttctgccatcgggcatggcttcgtgatggccttggtaagtgtgaggagagtggtttggggctggaatgaaaggccgtgaatctggaaacacactggaaccgatcaacgctatcagccctcatggtcgctgaagggcgttggttgctcctgggcaccgctgcttcagtttctgcagtggctctttcagctgttgtaattctgtgcctaggctgttgacaacttttgctgagttggacagaataagactgtgggccatgctgcttgcttcactctctgggtgtgatggatcggtgagggtgcagttgctatgattgtaattggtcatctcatcatggctgttaacatttctggaccaaacaaaaatgacttcagctacttccagattctgctgatacattacacaggatgatctaaaaggctacagttctgaagatactcatctttcttgtaatctgggggcatctggtcaatagtattgcctctgtgctgtattgtgtctagaacattcaaggacatttgatacttctcatactttaattgcgtgctctcccagttgcagcaccctctgaggcttctatgtgttgcagccgatgggcatttgcacagagcagcagtcatgacagcgttttcagggcagctatttctccttttcccccttttcctctcccccggcttcccattctcctcctcctccttcctcttctcgtcccctcctcctcctctttgttctcctccccctgctcttcttcctctctccttttcctccttctgtgtctatactagattattttcaatcagtcacatgtttttctttattttgaatgttacaaaatatttctctattgtaaacggtgtgccaggaaaaacatgagatgtgtatttgtattttttatgcacataattacttaatccaatgcctctccacttaattgggcctgatgatttttatctcgacatctgcaatactgatgatatactggaatctctaccaatttatttttggtggtaagaaagcagtcagagaacgttttgctggttatttcattccgtgtgagttcccaaccaagactgtcagcccagtgtggttcagccatatctaacctatagaggccatagaagcagttcagcttaggctggaggccagcaggctgagtgtgcgagctgacccgatggtcatttgttagggttggggggtgaactggctaacttattaactagcttatcatattaataaaaactctttaatacaaatccttgtcctgacactctgtagctttaataatcctattaccaatctggtaataaatgtgaattctgacacattgttgatgctactggttttagtaacataatgaacatcataataaagaatattcaagagtc

SEQ ID NO: 153122 - DNA, 1235 bp, Homo sapiens
  Payload ID: 10127
  Gene Symbol: MTL5
  Gene Name: metallothionein-like 5, testis-specific (tesmin)
  Uniprot ID: Q9Y4I5
  ENST ID: ENST00000544963
  CDS Start-End: 81-1001
atcccgctcgctccacgctgcggcagccccggcggccccaggtgcgcggcccccgccatcccgccccgccgccctgcgccatggaggagggccctctgccgggcgggctgcccagccccgaggatgcgatggtgacggagctcttaagccccgagggtccgttcgcttcggagaacatcggcctgaaggcccccgtgaagtacgaggaggacgagttccacgtcttcaaagaagcgtacctgggcccggcggaccccaaggaacccgtcctgcacgcgttcaaccccgcgctgggcgccgactgcaagggccaggtcaaggcgaagctcgcggggggcgacagcgacggcggggagctcctcggggagtaccccgggatcccagagctcagcgcgctggaggacgtcgcgctcctgcaggccccgcagccgcccgcctgcaacgtgcacttcctgtcctcgctgctacccgcgcaccgcagcccggcggtgttgcccctgggcgcctgggtcctggaaggagcctcccacccgggcgtccgcatgatcccagttgaaatcaaggaagcaggtggtactactacaagtaataatccggaagaagcaactttgcagaatcttcttgctcaggaatcctgttgcaagttcccatcgtcccaggaactagaggatgcctcctgctgttctcttaagaaagattccaacccaatggtgatatgccaattgaaagggggcacacaaatgctatgtatagacaattctagaacaagagaactaaaagcactccatttggttcctcagtatcaagatcaaaataattatctacagtcagatgtccctaaaccaatgactgctttagtagggagatttttgccagcatcaacaaaattaaatctcattacacaacaacttgagggagccttaccatcggtagtcaacgggtctgctttcccctcgggatcaactcttccaggaccaccaaaaataactttggctgggtaaggattagaagcaatacattgtcactctaatgtaataatttaagagactcttggatacgttcacgattttcttctatactataaaatgagcttcactgcacaccttcatgacttctgagaaatgtttttaccatcagcaatgccactaacggtgttgctgtctgtgtctggtttcactggggctgcaaaggctgctggaaagtctggcccataacctgcatctgtccctgtcctc

SEQ ID NO: 153123 - DNA, 843 bp, Homo sapiens
  Payload ID: 10127
  Gene Symbol: MTL5
  Gene Name: metallothionein-like 5, testis-specific (tesmin)
  ENST ID: ENST00000543240
  CDS Start-End: 1-614
gtgactgctttgccagtggggacttttgcaacaactgcaattgtaataattgttgcaacaacttgcatcatgatattgaacggtttaaagccattaaggcatgtcttggtagaaatccagaagctttccagccaaaaattgggaagggccaattgggcaatgtcaagccccagcacaacaaagggtgcaactgcaggaggtcaggctgcctgaagaattactgcgagtgctatgaggcccaaattatgtgttcttctatttgcaaatgcattggttgcaaaaattatgaagaaagcccagaacgaaagacactaatgagcatgccaaactacatgcagactggaggtttggaaggcagccattacctgccaccaacgaaattttcaggacttccaagattcagtcacgataggcggccttcctcatgcatctcctgggaggtggtggaggccacatgcgcctgcctgcttgctcagggagaagaggccgagaaagaacactgctccaagtgcctggcagagcagatgatcctggaggaatttggaagaaataagttctccggatgggctgttgtgataccacttaaaatctctagagaactactgaacacctaaagattttctgtagcgtagatatttccccagaggcacgcgaactgtcagtctttcctaaggcccccgggagacgcaggcaatggggcctcgcaggccaggcttgcaccagcatgtcttgagttagaggacttaaaattatccagtttcttctgtgtttctacttgaattgtggaaaagctctattatccaattaacttctccataattattgttgtaatattattattgt

SEQ ID NO: 153124 - DNA, 7972 bp, Homo sapiens
  Payload ID: 10128
  Gene Symbol: MTF1
  Gene Name: metal-regulatory transcription factor 1
  Uniprot ID: Q14872
  ENST ID: ENST00000373036
  CDS Start-End: 142-2403
ggaagtgacgttaggggaaggtgggggcaatcatggtgccgctggggaggggagaagctgctgctgccgccgttgccgggagccgcggagacaagtcattacgttttcatttctcacaactgggctgagcacaactgaaccatgggggaacacagtccagacaacaacatcatctactttgaggcagaggaagatgagctgacccccgatgataaaatgctcaggtttgtggataaaaacggactggtgccttcctcatctggaactgtttatgataggaccactgttcttattgagcaggaccctggcactttggaggatgaagatgacgacggacagtgcggagaacacttgccttttctagtagggggtgaagagggctttcacctgatagatcatgaagcaatgtcccagggttatgtgcagcacattatctcaccagatcagattcatttgacaataaaccctggttccacacccatgccaagaaatattgaaggtgcaaccctcactctgcagtcggaatgtccggaaacaaaacgtaaagaagtaaagcggtaccaatgtacctttgagggctgtccccgcacctacagcacagcaggcaacctgcgaacccaccagaagactcaccgaggagagtacacctttgtctgtaatcaggagggctgtggcaaagccttccttacctcttacagcctcaggatccacgtgcgagtgcacacgaaggagaagccatttgagtgtgacgtgcagggctgtgagaaggcattcaacacactgtacaggctgaaagcacatcagaggcttcacacagggaaaacgtttaactgtgaatctgaaggctgcagcaaatacttcaccacactcagtgatctgaggaagcacattcgaactcatacaggggaaaagccatttcggtgcgatcacgatggctgtggaaaagcatttgcagcaagccaccaccttaaaactcacgttcgtacacatactggtgaaagacccttcttctgccccagtaatggctgtgagaaaacattcagcactcaatacagtctcaaaagtcacatgaaaggtcatgataacaaaggacactcatacaatgcacttccacaacacaatggatcagaggatacaaatcactcactttgtctaagtgacttgagccttctgtccacagattctgaattgcgagaaaattccagtacgacccagggccaggacctcagcacaatttcaccagcaatcatctttgaatcaatgttccagaattcagatgatacggcaattcaggaagatcctcaacagacagcttccttgactgaaagttttaatggtgatgcagagtcagtcagtgatgttccgccatccacaggaaattcagcatctttatctcttccacttgtactgcaacctggcctctccgagccaccccagcctctactacctgcctcagctccgtctgctcctccgcctgctccctccctaggacctggctcccagcaagctgcatttggcaacccccctgctctcttacaacctccagaagtgcctgttccccacagcacacagtttgctgctaatcatcaagagtttcttccgcacccccaggcaccgcagcccattgtaccaggactttctgttgttgctggggcttctgcatcagcagcggcagtggcatcagctgtggcagcaccagccccaccacaaagtactactgagcccctgccagccatggtccagactctgcccctgggtgccaactctgtcctaactaataatcccacaataaccatcaccccaactcccaacacagctatcctgcagtccagcctagtcatgggagaacagaacttacaatggatattaaatggtgccaccagttctccacaaaaccaagaacaaattcagcaagcatctaaagttgagaaggtgttttttaccactgcagtaccagtagccagtagcccagggagctctgtccagcagattggcctcagtgttcctgtgatcatcatcaaacaagaagaggcatgtcagtgtcagtgtgcatgccgggactctgcaaaggagcgggcatccagcaggagaaagggctgctcctccccaccccctccagagccgagcccccaggctcctgatgggcccagcctgcagctcccagcgcagactttctcttcagcccctgttcccgggtcatcatcctctaccttgccctcctcctgtgagcaaagccgacaagcagagactccttcagaccctcagacagaaacattaagtgccatggatgtgtcagagtttctatccctccagagcctggacaccccgtccaatctgattcccattgaagcactactgcagggggaggaggagatgggcctcaccagcagcttctccaagtgaagggcccatgtgtgctcacctctgggaaaagcgggtgagcaggaggcatgaggtacaatgcctgccatcatgggtcagaaatttgaaggatgaagaaatctactgtttgaaatcctcacctttcagacgtattttctttattcacatcccaggagcatccattttaaggaactattctttggaaaaaaacaaaaaacaaaaaaaacaacaaaaaaagctaagttataagtgaactgtttggctgcactgtatgtcacttttgcttgttgtcatgtgaacttggaaactaaggttactcgtgtgcataaaaattctaaatgaaagggtgtggtttccatcaatctgatgctgcccatcgcttgcactggggtctttgtggatcgggcaggagttttcagtgtgttgggtgttgctccttcctatgtgtcttttgaatctgaggctgacatttgcttggaaggccagacccttgctccatcagagagggcagtggcaaaggccagtgaggcagctgtgagttggacagggttcaggtgagatggtgttgtcatttgtgcttagtgttggtggtgctcagggtggataacacgggtcgttctgcagcccgcttcagcacaaataggcagcttaaggcctggctcacaggctgtggggttgatctggctctgcagaggccctaggcagcttgttgactgctgtctgttgatgacgtgtgtgcaaagcaggctctagcaacatgatcactgtccttgccttcctggttctttctctcggttggttgccagggcttgcagatcgcagtgaattttccttggggaacatcgctgttttgtcctagagtgaacttgtggcttatggccagtgctgtttggtggtctgccttctttttaatggtattttcttcctcagagcagaagggctgcattttgcttatcagaagaaggtgcagatttaagggaattcatatgaggtggcatgtaattggcaggccaggtgtcctggttccaggttccagccaggctttgggttgccccctccatctctgcccccctctggattttgcatacagcctcatacagtgcaaacaaggatgtgacttgctcagcttagtcatgtgatttatttaaaaaaaaaaaaaaaagaaacacaaaacgatgatcttctactcagggtatagcaaaacaaaaaaattccctttccaccaaaaagcctgaaatgttgcaataagttatctcatttggaatgtttcattaagttgtgttataggaaaaaattgtgtgtgtgtgttatagaattatatccatatgtctgcctttggctccaagtcattgcctcttaaaataaaagatacaatccatactagcatgaaaagtttccctcaacaggctatattaacatagtcatgagtgctgaccaaactcaccgagctcagaggccaggcatggcctgaggtgcagaataggcctctgcctcccaagagccctttccttgccctgagcaaggagtggtgttccacaaacaaggctgctcttctaagccaacagtgtcaggcaggaagcagccataattttgccttgcattttcattccctaatgtaaagggatctgcattggtcactctcctgttctctgagccattgctcagggccagccaagatattattgagaacagataatttaccttggagccagaggccctccctgcctttagcaaggatgttcagggacagacaaagagggcagtggtggtgaatgttgttactgccatgaggagaaatggcagtaagaaatcttaactacaagcagccaatttctcattccaggaccctagccagaataattgacttctttttttttttgagacagagttttgcttttgttgccctggctggagtgcagtggcgcaatcttggctcaccgcaacctccacttcccaggttcaagcaattctgcctcagcctcccgagtagctgggattacaggcatgcgccaccacgcctggctaattttgtatttttagtagagacggggtttctccatgttggtcaggctggtctcgaactcccaacgtcaggtgatcctcccgcctcagtctcccaaagtgctgggattacaggtgtgagccaccatgcctggtctagggaattgacttctttttgaccttctgcactcccttccccaaaaggattgtggcttctgttgaccattgacctcagcagaagttgataaggcaggaggtttccagtcctcctggaaaaccaactgctgagcatgagttgtccttggctgtctctgggcctcgcacccatgggaagttttgaggtagggcccttgctgtttacaacttctgagagagtagtgatgggaccccaaagtaagcttgtatcagagggcagtaatgaccttcccatatccccatcctgtggtcacctgggatttgggttccctggggcggaagtgggaaataggagcccagggaaggacatctgaagcacccacagtttaaatagcgactcttcttggttagccagggctgtgctcatgttgggccctacccaggtcagtggccttttcactctcaaagatcgggggtgacgaagcagcatcttaaacagtgtttaggctgacagatttttccagttgaagaagctgaagtatctgccttttgagggtgactctagattacaagagagactatcagatccaatcagcttttgaaaaatcaggaatgtgcttaaaatgccagtgagtggttgtgaagatcaggtttatttcccaggataggcagtctttctttccctccttttccagttctcttttcctacctgtccttccataagcctggtctctagtgccgaggaccttggagaagagagggcccctagctaagctggagccagaaagaaccttcatggtgagtgtggtttcccaaacttgggaaatgaacctagggtgaggttagggaggatttgtagaattctagcaggtaaaaatcaagcctttttcccctcccatagtaaacttaaccattttcaccctgtacgttatcttctagctcctactaacatctccaattagacaaccgcttcaaagggtgcttagcaccagggattggggttcatggacttaggaggtggtaaggaaactggctggcaccaccaaactgccttagtgaacttggcccttcccaggcaggtaggttgggcattgagggaaggtggcccagtctttgctggcagggtctggccagtctcatgggggcaccaccagtttggtgacagaagtggtgtcatttattgaattccacctccgtttagaaggagatcatggtacaaagcccaggaggggccttaagatgtgaagatctctctgagtaaaaggcaaggggcttctcttcttcacctctgggatagttggtagatcggagagttttattttcagggtcaaggctgtggactgatggggatattggagggtgggtgggttttcctgagagactttgtataatgctgaatgtgtccagagggacaagtttgcagaacctcatattggtatattaaagaaataataaaataaaaaagcactttaggttattttatctttaacccgattgctgcaatttcttttgtgtgtatatatacatatatatactttccacaaagttttattttttgctcagaataaaaagttaaattgaggtgtgaaaagaaaagcacttaccttggtgcaatatgtgtagcttgatggtcgttgtcccatgtggccctggcctggcagcgtttttccgctcaatcagccctgtgctgtgagactgtccatagggaaacactattatgcattctcagcaaccgctcaatctatgcaagccttccctgtgtgccccagggcgccccctcaggctctctgaagaactgctgtgggtcctgttttctgctgactgttgaggccctttttcatcacttcttggtctctcgccatcttttccctcttcaccattacaaaatgatgcctgaaaggaaggaacagattgttcctaggtagaaacctggcaccttctagacttttatatttgtaatcacatccattgtccttaaagacttttccagagtgattgaaaccattgatttgtggaactgcaacaatatttctcaagagtttacaattgtcttacaccaccaatcagaaatatgtttggggaggcatgggtggcagggggcaacatgagccatttccatactgctccccatactacctgtgttggttccttaagcaaaaaggcctccagccttcattaaatcctataaacaaacattacatcccatgaatcattatcaactttcttcctttactccacctcccccattttatcttcaattctcaggctatagaatagacaagttttagaatatacttcagccaaagcagaaggattttcatagatccaatatgcaaatagttctgctgtgacatagatcagaaattgtctgttccttaatatttgggggtggaggcaacaaaactgaagcatatttctgattggttagccattttggcctgtttcctcttgcatgttttttagggagagagggaaacagtcctgtatttcttctgatgccctttggggaagccgacgaccactgggcatttctcactgttactcctgttcaagagagggcttctcagtctgcactgaaaaatgcaaattaaactggatctttatgtcaatgtgtacatagtacaagcttttttactggaattgaggtttaaaaccacacactgcccttttggtggtgtgcctgttgggccaaaaattgggtgataatgtagtgtcactttctcagctcaatgcagtttctactttttcttatgggaaaatttttcataaaacctttttgcaccaaaacccaggggtgttttttgcaatatccttgttatcctcgtagtgtgccaagtcagaggctttctcttgcccttttcctgctgtgttctcaggcctcccaagggctatttgactcaacagtctacatccttcgttgtgttttggagaatgtgggggtgggggtcagagttcaaggtgtctgttcccttttcctgtgaactctttctagtccctatttggggagggtggctggaaacagatttttgctgaatttctggctcagatcttctagccaggaaaggcaagagcccccaagagcccttttttttgacatacactaatcattggccggggtcttggtgacaacttttaaaatcccaaatagttttatttggattatgtaaaagtaagtgtgaaacatgggaacaacggacttccactgagcgatgtgaaaacgttacaggttcagtacttccaaaggaagaaacctccaaacccaaaaaagaataaatatgaatttgtatttttgaagaatgtgaaataatggtgtttgcttaattgctcattttgtataaacttaatattgtactttaaaatatctgctaaaaagtgaaaatttaactttttggaattgaaaaagcaatattaaatactaatgaaatcctaattaaatgcttatttaaatctggta

SEQ ID NO: 153125 - DNA, 2876 bp, Homo sapiens
  Payload ID: 10129
  Gene Symbol: MTA1
  Gene Name: metastasis associated 1
  Uniprot ID: Q13330
  ENST ID: ENST00000331320
  CDS Start-End: 215-2362
tcctcctcttcctctcccgcccgcgccgcggccctcccgtccctgcgcggcctcggcggcctcggcggcggcggcggcggcggcggcggcagcagcgcggcccctttaaacgcctgcggcgccccccgcccccgccatcgcgcctccattttcccggccgcccgcgccgagcgccgcgcccgccccgggcccctccgccgccgccggcccggacatggccgccaacatgtacagggtcggagactacgtctactttgagaactcctccagcaacccatacctgatccggagaatcgaggagctcaacaagacggccaatgggaacgtggaggccaaagtggtgtgcttctaccggaggcgggacatctccagcaccctcatcgccctggccgacaagcacgcaaccctgtcagtctgctataaggccggaccgggggcggacaacggcgaggaaggggaaatagaagaggaaatggagaacccggaaatggtggacctgcccgagaaactaaagcaccagctgcggcatcgggagctgttcctctcccggcagctggagtctctgcccgccacgcacatcaggggcaagtgcagcgtcaccctgctcaacgagaccgagtcgctcaagtcctacctggagcgggaggatttcttcttctattctctagtctacgacccacagcagaagaccctgctggcagataaaggagagattcgagtaggaaaccggtaccaggcagacatcaccgacttgttaaaagaaggcgaggaggatggccgagaccagtccaggttggagacccaggtgtgggaggcgcacaacccactcacagacaagcagatcgaccagttcctggtggtggcccgctctgtgggcaccttcgcacgggccctggactgcagcagctccgtccgacagcccagcctgcacatgagcgccgcagctgcctcccgagacatcaccctgttccacgccatggatactctccacaagaacatctacgacatctccaaggccatctcggcgctggtgccgcagggcgggcccgtgctctgcagggacgagatggaggagtggtctgcatcagaggccaaccttttcgaggaagccctggaaaaatatgggaaggatttcacggacattcagcaagattttctcccgtggaagtcgctgaccagcatcattgagtactactacatgtggaagaccaccgacagatacgtgcagcagaaacgcttgaaagcagctgaagctgagagcaagttaaagcaagtttatattcccaactataacaagccaaatccgaaccaaatcagcgtcaacaacgtcaaggccggtgtggtgaacggcacgggggcgccgggccagagccctggggctggccgggcctgcgagagctgttacaccacacagtcttaccagtggtattcttggggtccccctaacatgcagtgtcgtctctgcgcatcttgttggacatattggaagaaatatggtggcttgaaaatgccaacccggttagatggagagaggccaggaccaaaccgcagtaacatgagtccccacggcctcccagcccggagcagcgggagccccaagtttgccatgaagaccaggcaggctttctatctgcacacgacgaagctgacgcggatcgcccggcgcctgtgccgtgagatcctgcgcccgtggcacgctgcgcggcacccctacctgcccatcaacagcgcggccatcaaggccgagtgcacggcgcggctgcccgaagcctcccagagcccgctggtgctgaagcaggcggtacgcaagccgctggaagccgtgcttcggtatcttgagacccacccccgcccccccaagcctgaccccgtgaaaagcgtgtccagcgtgctcagcagcctgacgcccgccaaggtggcccccgtcatcaacaacggctcccccaccatcctgggcaagcgcagctacgagcagcacaacggggtggacggcaacatgaagaagcgcctcttgatgcccagtaggggtctggcaaaccacggacaggccaggcacatgggaccaagccggaacctcctgctcaacgggaagtcctaccccaccaaagtgcgcctgatccgggggggctccctgcccccagtcaagcggcggcggatgaactggatcgacgccccggatgacgtgttctacatggccacagaggagaccaggaagatccgcaagctgctctcatcctcggaaaccaagcgtgctgcccgccggccctacaagcccatcgccctgcgccagagccaggccctgccgccgcggccaccgccacctgcgcccgtcaacgacgagcccatcgtcatcgaggactaggggccgcccccacctgcggccgccccccgcccctcgcccgcccacacggccccttcccagccagcccgccgcccgcccctcagtttggtagtgccccacctcccgccctcacctgcagagaaacgcgctccttggcggacactgggggaggagaggaagaagcgcggctaacttattccgagaatgccgaggagttgtcgtttttagctttgtgtttactttttggctggagcggagatgaggggccaccccgtgcccctgtgctgcggggccttttgcccggaggccgggccctaaggttttgttgtgttctgttgaaggtgccattttaaattttatttttattactttttttgtagatgaacttgagctctgtaacttacacctggaatgttaggatcgtgcggccgcggccggccgagctgcctggcggggttggcccttgtcttttcaagtaattttcatattaaacaaaaacaaagaaaaaaaatcttataaaaaggaaaaaaaccaa

SEQ ID NO: 153126 - DNA, 2709 bp, Homo sapiens
  Payload ID: 10129
  Gene Symbol: MTA1
  Gene Name: metastasis associated 1
  Uniprot ID: Q13330
  ENST ID: ENST00000405646
  CDS Start-End: 99-2195
cggcgccccccgcccccgccatcgcgcctccattttcccggccgcccgcgccgagcgccgcgcccgccccgggcccctccgccgccgccggcccggacatggccgccaacatgtacagggtcggagactacgtctactttgagaactcctccagcaacccatacctgatccggagaatcgaggagctcaacaagacggccaatgggaacgtggaggccaaagtggtgtgcttctaccggaggcgggacatctccagcaccctcatcgccctggccgacaagcacgcaagggaaatagaagaggaaatggagaacccggaaatggtggacctgcccgagaaactaaagcaccagctgcggcatcgggagctgttcctctcccggcagctggagtctctgcccgccacgcacatcaggggcaagtgcagcgtcaccctgctcaacgagaccgagtcgctcaagtcctacctggagcgggaggatttcttcttctattctctagtctacgacccacagcagaagaccctgctggcagataaaggagagattcgagtaggaaaccggtaccaggcagacatcaccgacttgttaaaagaaggcgaggaggatggccgagaccagtccaggttggagacccaggtgtgggaggcgcacaacccactcacagacaagcagatcgaccagttcctggtggtggcccgctctgtgggcaccttcgcacgggccctggactgcagcagctccgtccgacagcccagcctgcacatgagcgccgcagctgcctcccgagacatcaccctgttccacgccatggatactctccacaagaacatctacgacatctccaaggccatctcggcgctggtgccgcagggcgggcccgtgctctgcagggacgagatggaggagtggtctgcatcagaggccaaccttttcgaggaagccctggaaaaatatgggaaggatttcacggacattcagcaagattttctcccgtggaagtcgctgaccagcatcattgagtactactacatgtggaagaccaccgacagatacgtgcagcagaaacgcttgaaagcagctgaagctgagagcaagttaaagcaagtttatattcccaactataacaagccaaatccgaaccaaatcagcgtcaacaacgtcaaggccggtgtggtgaacggcacgggggcgccgggccagagccctggggctggccgggcctgcgagagctgttacaccacacagtcttaccagtggtattcttggggtccccctaacatgcagtgtcgtctctgcgcatcttgttggacatattggaagaaatatggtggcttgaaaatgccaacccggttagatggagagaggccaggaccaaaccgcagtaacatgagtccccacggcctcccagcccggagcagcgggagccccaagtttgccatgaagaccaggcaggctttctatctgcacacgacgaagctgacgcggatcgcccggcgcctgtgccgtgagatcctgcgcccgtggcacgctgcgcggcacccctacctgcccatcaacagcgcggccatcaaggccgagtgcacggcgcggctgcccgaagcctcccagagcccgctggtgctgaagcaggcggtacgcaagccgctggaagccgtgcttcggtatcttgagacccacccccgcccccccaagcctgaccccgtgaaaagcgtgtccagcgtgctcagcagcctgacgcccgccaaggtggcccccgtcatcaacaacggctcccccaccatcctgggcaagcgcagctacgagcagcacaacggggtggacggcaacatgaagaagcgcctcttgatgcccagtaggggtctggcaaaccacggacaggccaggcacatgggaccaagccggaacctcctgctcaacgggaagtcctaccccaccaaagtgcgcctgatccgggggggctccctgcccccagtcaagcggcggcggatgaactggatcgacgccccggatgacgtgttctacatggccacagaggagaccaggaagatccgcaagctgctctcatcctcggaaaccaagcgtgctgcccgccggccctacaagcccatcgccctgcgccagagccaggccctgccgccgcggccaccgccacctgcgcccgtcaacgacgagcccatcgtcatcgaggactaggggccgcccccacctgcggccgccccccgcccctcgcccgcccacacggccccttcccagccagcccgccgcccgcccctcagtttggtagtgccccacctcccgccctcacctgcagagaaacgcgctccttggcggacactgggggaggagaggaagaagcgcggctaacttattccgagaatgccgaggagttgtcgtttttagctttgtgtttactttttggctggagcggagatgaggggccaccccgtgcccctgtgctgcggggccttttgcccggaggccgggccctaaggttttgttgtgttctgttgaaggtgccattttaaattttatttttattactttttttgtagatgaacttgagctctgtaacttacacctggaatgttaggatcgtgcggccgcggccggccgagctgcctggcggggttggcccttgtcttttcaagtaattttcatattaaacaaaaacaaagaaaaaaaatcttataaaaaggaaaaaaaccaa

SEQ ID NO: 153127 - DNA, 2770 bp, Homo sapiens
  Payload ID: 10129
  Gene Symbol: MTA1
  Gene Name: metastasis associated 1
  ENST ID: ENST00000406191
  CDS Start-End: 145-2256
gcggcggcggcggcggcggcagcagcgcggcccctttaaacgcctgcggcgccccccgcccccgccatcgcgcctccattttcccggccgcccgcgccgagcgccgcgcccgccccgggcccctccgccgccgccggcccggacatggccgccaacatgtacagggtcggagactacgtctactttgagaactcctccagcaacccatacctgatccggagaatcgaggagctcaacaagacggccaatgggaacgtggaggccaaagtggtgtgcttctaccggaggcgggacatctccagcaccctcatcgccctggccgacaagcacgcaaccctgtcagtctgctataaggccggaccgggggcggacaacggcgaggaaggggaaatagaagaggaaatggagaacccggaaatggtggacctgcccgagaaactaaagcaccagctgcggcatcgggagctgttcctctcccggcagctggagtctctgcccgccacgcacatcaggggcaagtgcagcgtcaccctgctcaacgagaccgagtcgctcaagtcctacctggagcgggaggatttcttcttctattctctagtctacgacccacagcagaagaccctgctggcagataaaggagagattcgagtaggaaaccggtaccaggcagacatcaccgacttgttaaaagaaggcgaggaggatggccgagaccagtccaggttggagacccaggtgtgggaggcgcacaacccactcacagacaagcagatcgaccagttcctggtggtggcccgctctgtgggcaccttcgcacgggccctggactgcagcagctccgtccgacagcccagcctgcacatgagcgccgcagctgcctcccgagacatcaccctgttccacgccatggatactctccacaagaacatctacgacatctccaaggccatctcggcgctggtgccgcagggcgggcccgtgctctgcagggacgagatggaggagtggtctgcatcagaggccaaccttttcgaggaagccctggaaaaatatgggaaggatttcacggacattcagcaagattttctcccgtggaagtcgctgaccagcatcattgagtactactacatgtggaagaccaccgacagatacgtgcagcagaaacgcttgaaagcagctgaagctgagagcaagttaaagcaagtttatattcccaactataacaagccaaatccgaaccaaatcagcgtcaacaacgtcaaggccggtgtggtgaacggcacgggggcgccgggccagagccctggggctggccgggcctgcgagagctgttacaccacacagtcttaccagtggtattcttggggtccccctaacatgcagtgtcgtctctgcgcatcttgttggacatattggaagaaatatggtggcttgaaaatgccaacccggttagatggagagaggccaggaccaaaccgcagtaacatgagtccccacggcctcccagcccggagcagcgggagccccaagtttgccatgaagaccaggcaggctttctatctgcacacgacgaagctgacgcggatcgcccggcgcctgtgccgtgagatcctgcgcccgtggcacgctgcgcggcacccctacctgcccatcaacagcgcggccatcaaggccgagtgcacggcgcggctgcccgaagcctcccagagcccgctggtgctgaagcaggcggtacgcaagccgctggaagccgtgcttcggtatcttgagacccacccccgcccccccaagcctgaccccgtgaaaagcgtgtccagcgtgctcagcagcctgacgcccgccaaggtggcccccgtcatcaacaacggctcccccaccatcctgggcaagcgcagctacgagcagcacaacggggtggacggtctggcaaaccacggacaggccaggcacatgggaccaagccggaacctcctgctcaacgggaagtcctaccccaccaaagtgcgcctgatccgggggggctccctgcccccagtcaagcggcggcggatgaactggatcgacgccccggatgacgtgttctacatggccacagaggagaccaggaagatccgcaagctgctctcatcctcggaaaccaagcgtgctgcccgccggccctacaagcccatcgccctgcgccagagccaggccctgccgccgcggccaccgccacctgcgcccgtcaacgacgagcccatcgtcatcgaggactaggggccgcccccacctgcggccgccccccgcccctcgcccgcccacacggccccttcccagccagcccgccgcccgcccctcagtttggtagtgccccacctcccgccctcacctgcagagaaacgcgctccttggcggacactgggggaggagaggaagaagcgcggctaacttattccgagaatgccgaggagttgtcgtttttagctttgtgtttactttttggctggagcggagatgaggggccaccccgtgcccctgtgctgcggggccttttgcccggaggccgggccctaaggttttgttgtgttctgttgaaggtgccattttaaattttatttttattactttttttgtagatgaacttgagctctgtaacttacacctggaatgttaggatcgtgcggccgcggccggccgagctgcctggcggggttggcccttgtcttttcaagtaattttcatattaaacaaaaacaaagaaaaaaaatcttataaaaaggaaaaaaaccaa

SEQ ID NO: 153128 - DNA, 2888 bp, Homo sapiens
  Payload ID: 10129
  Gene Symbol: MTA1
  Gene Name: metastasis associated 1
  ENST ID: ENST00000435036
  CDS Start-End: 1609-2376
gctcctcctcttcctctcccgcccgcgccgcggccctcccgtccctgcgcggcctcggcggcctcggcggcggcggcggcggcggcggcggcagcagcgcggcccctttaaacgcctgcggcgccccccgcccccgccatcgcgcctccattttcccggccgcccgcgccgagcgccgcgcccgccccgggcccctccgccgccgccggcccggacatggccgccaacatgtacagggtcggagactacgtctactttgagaactcctccagcaacccatacctgatccggagaatcgaggagctcaacaagacggccaatgggaacgtggaggccaaagtggtgtgcttctaccggaggcgggacatctccagcaccctcatcgccctggccgacaagcacgcaaccctgtcagtctgctataaggccggaccgggggcggacaacggcgaggaaggggaaatagaagaggaaatggagaacccggaaatggtggacctgcccgagaaactaaagcaccagctgcggcatcgggagctgttcctctcccggcagctggagtctctgcccgccacgcacatcaggggcaagtgcagcgtcaccctgctcaacgagaccgagtcgctcaagtcctacctggagcgggaggatttcttcttctattctctagtctacgacccacagcagaagaccctgctggcagataaaggagagattcgagtaggaaaccggtaccaggcagacatcaccgacttgttaaaagaaggcgaggaggatggccgagaccagtccaggttggagacccaggtgtgggaggcgcacaacccactcacagacaagcagatcgaccagttcctggtggtggcccgctctgtgggcaccttcgcacgggccctggactgcagcagctccgtccgacagcccagcctgcacatgagcgccgcagctgcctcccgagacatcaccctgttccacgccatggatactctccacaagaacatctacgacatctccaaggccatctcggcgctggtgccgcagggcgggcccgtgctctgcagggacgagatggaggagtggtctgcatcagaggccaaccttttcgaggaagccctggaaaaatatgggaaggatttcacggacattcagcaagattttctcccgtggaagtcgctgaccagcatcattgagtactactacatgtggaagaccaccgacagatacgtgcagcagaaacgcttgaaagcagctgaagctgagagcaagttaaagcaagtttatattcccaactataacaagccaaatccgaaccaaatcagcgtcaacaacgtcaaggccggtgtggtgaacggcacgggggcgccgggccagagccctggggctggccgggcctgcgagagctgttacaccacacagtcttaccagtggtattcttggggtccccctaacatgcagtgtcgtctctgcgcatcttgttggacatattggaagaaatatggtggcttgaaaatgccaacccggttagatggagagaggccaggaccaaaccgcagtaacatgagtccccacggcctcccagcccggagcagcgggagccccaagtttgccatgaagaccaggcaggctttctatctgcacacgacgaagctgacgcggatcgcccggcgcctgtgccgtgagatcctgcgcccgtggcacgctgcgcggcacccctacctgcccatcaacagcgcggccatcaaggccgagtgcacggcgcggctgcccgaagcctcccagagcccgctggtgctgaagcaggcggtacgcaagccgctggaagccgtgcttcggtatcttgagacccacccccgcccccccaagcctgaccccgtgaaaagcgtgtccagcgtgctcagcagcctgacgcccgccaaggtggcccccgtcatcaacaacggctcccccaccatcctgggcaagcgcagctacgagcagcacaacggggtggacggcaacatgaagaagcgcctcttgatgcccagtaggggcacttacctgggtctggcaaaccacggacaggccaggcacatgggaccaagccggaacctcctgctcaacgggaagtcctaccccaccaaagtgcgcctgatccgggggggctccctgcccccagtcaagcggcggcggatgaactggatcgacgccccggatgacgtgttctacatggccacagaggagaccaggaagatccgcaagctgctctcatcctcggaaaccaagcgtgctgcccgccggccctacaagcccatcgccctgcgccagagccaggccctgccgccgcggccaccgccacctgcgcccgtcaacgacgagcccatcgtcatcgaggactaggggccgcccccacctgcggccgccccccgcccctcgcccgcccacacggccccttcccagccagcccgccgcccgcccctcagtttggtagtgccccacctcccgccctcacctgcagagaaacgcgctccttggcggacactgggggaggagaggaagaagcgcggctaacttattccgagaatgccgaggagttgtcgtttttagctttgtgtttactttttggctggagcggagatgaggggccaccccgtgcccctgtgctgcggggccttttgcccggaggccgggccctaaggttttgttgtgttctgttgaaggtgccattttaaattttatttttattactttttttgtagatgaacttgagctctgtaacttacacctggaatgttaggatcgtgcggccgcggccggccgagctgcctggcggggttggcccttgtcttttcaagtaattttcatattaaacaaaaacaaagaaaaaaaatcttataaaaaggaaaaaaacc

SEQ ID NO: 153129 - DNA, 2144 bp, Homo sapiens
  Payload ID: 10129
  Gene Symbol: MTA1
  Gene Name: metastasis associated 1
  Uniprot ID: Q13330
  ENST ID: ENST00000438610
  CDS Start-End: 21-1313
ccgccgccgccggcccggacatggccgccaacatgtacagggtcggagactacgtctactttgagaactcctccagcaacccatacctgatccggagaatcgaggagctcaacaagacggccaatgggaacgtggaggccaaagtggtgtgcttctaccggaggcgggacatctccagcaccctcatcgccctggccgacaagcacgcaaccctgtcagtctgctataaggccggaccgggggcggacaacggcgaggaaggggaaatagaagaggaaatggagaacccggaaatggtggacctgcccgagaaactaaagcaccagctgcggcatcgggagctgttcctctcccggcagctggagtctctgcccgccacgcacatcaggggcaagtgcagcgtcaccctgctcaacgagaccgagtcgctcaagtcctacctggagcgggaggatttcttcttctattctctagtctacgacccacagcagaagaccctgctggcagataaaggagagattcgagtaggaaaccggtaccaggcagacatcaccgacttgttaaaagaaggcgaggaggatggccgagaccagtccaggttggagacccaggtgtgggaggcgcacaacccactcacagacaagcagatcgaccagttcctggtggtggcccgctctgtgggcaccttcgcacgggccctggactgcagcagctccgtccgacagcccagcctgcacatgagcgccgcagctgcctcccgagacatcaccctgttccacgccatggatactctccacaagaacatctacgacatctccaaggccatctcggcgctggtgccgcagggcgggcccgtgctctgcagggacgagatggaggagtggtctgcatcagaggccaaccttttcgaggaagccctggaaaaatatgggaaggatttcacggacattcagcaagattttctcccgtggaagtcgctgaccagcatcattgagtactactacatgtggaagaccaccgacagatacgtgcagcagaaacgcttgaaagcagctgaagctgagagcaagttaaagcaagtttatattcccaactataacaagccaaatccgaaccaaatcagcgtcaacaacgtcaaggccggtgtggtgaacggcacgggggcgccgggccagagccctggggctggccgggcctgcgagagctgttacatgtcgtctctgcgcatcttgttggacatattggaagaaatatggtggcttgaaaatgccaacccggttagatggagagaggccaggaccaaaccgcagtaacatgagtccccacggcctcccagcccggagcagcgggagccccaagtttgccatgaagaccaggcaggctttctatctgcacacgacgaagctgacgcggatcgcccggcgcctgtgccgtgagatcctgcgcccgtggcacgctgcgcggcacccctacctgcccatcaacagcgcggccatcaaggccgagtgcacggcgcggctgcccgaagcctcccagagcccgctggtgctgaagcaggcggtacgcaagccgctggaagccgtgcttcggtatcttgagacccacccccgcccccccaagcctgaccccgtgaaaagcgtgtccagcgtgctcagcagcctgacgcccgccaaggtggcccccgtcatcaacaacggctcccccaccatcctgggcaagcgcagctacgagcagcacaacggggtggacggcaacatgaagaagcgcctcttgatgcccagtaggggtctggcaaaccacggacaggccaggcacatgggaccaagccggaacctcctgctcaacgggaagtcctaccccaccaaagtgcgcctgatccgggggggctccctgcccccagtcaagcggcggcggatgaactggatcgacgccccggatgacgtgttctacatggccacagaggagaccaggaagatccgcaagctgctctcatcctcggaaaccaagcgtgctgcccgccggccctacaagcccatcgccctgcgccagagccaggccctgccgccgcggccaccgccacctgcgcccgtcaacgacgagcccatcgtcatcgaggactaggggccgcccccacctgcggccgc

SEQ ID NO: 153130 - DNA, 2050 bp, Homo sapiens
  Payload ID: 10129
  Gene Symbol: MTA1
  Gene Name: metastasis associated 1
  ENST ID: ENST00000434050
  CDS Start-End: 1-1536
cagatcgaccagttcctggtggtggcccgctctgtgggcaccttcgcacgggccctggactgcagcagctccgtccgacagcccagcctgcacatgagcgccgcagctgcctcccgagacatcaccctgttccacgccatggatactctccacaagaacatctacgacatctccaaggccatctcggcgctggtgccgcagggcgggcccgtgctctgcagggacgagatggaggagtggtctgcatcagaggccaaccttttcgaggaagccctggaaaaatatgggaaggatttcacggacattcagcaagattttctcccgtggaagtcgctgaccagcatcattgagtactactacatgtggaagaccaccgacagatacgtgcagcagaaacgcttgaaagcagctgaagctgagagcaagttaaagcaagtttatattcccaactataacaagccaaatccgaaccaaatcagcgtcaacaacgtcaaggccggtgtggtgaacggcacgggggcgccgggccagagccctggggctggccgggcctgcgagagctgttacaccacacagtcttaccagtggtattcttggggtccccctaacatgcagtgtcgtctctgcgcatcttgttggacatattggaagaaatatggtggcttgaaaatgccaacccggttagatggagagaggccaggaccaaaccgcagtaacatgagtccccacggcctcccagcccggagcagcgggagccccaagtttgccatgaagaccaggcaggctttctatctgcacacgacgaagctgacgcggatcgcccggcgcctgtgccgtgagatcctgcgcccgtggcacgctgcgcggcacccctacctgcccatcaacagcgcggccatcaaggccgagtgcacggcgcggctgcccgaagcctcccagagcccgctggtgctgaagcaggcggtacgcaagccgctggaagccgtgcttcggtatcttgagacccacccccgcccccccaagcctgaccccgtgaaaagcgtgtccagcgtgctcagcagcctgacgcccgccaaggtggcccccgtcatcaacaacggctcccccaccatcctgggcaagcgcagctacgagcagcacaacggggtggacggcaacatgaagaagcgcctcttgatgcccagtaggggcacttacctgggtctggcaaaccacggacaggccaggcacatgggaccaagccggaacctcctgctcaacgggaagtcctaccccaccaaagtgcgcctgatccgggggggctccctgcccccagtcaagcggcggcggatgaactggatcgacgccccggatgacgtgttctacatggccacagaggagaccaggaagatccgcaagctgctctcatcctcggaaaccaagcgtgctgcccgccggccctacaagcccatcgccctgcgccagagccaggccctgccgccgcggccaccgccacctgcgcccgtcaacgacgagcccatcgtcatcgaggactaggggccgcccccacctgcggccgccccccgcccctcgcccgcccacacggccccttcccagccagcccgccgcccgcccctcagtttggtagtgccccacctcccgccctcacctgcagagaaacgcgctccttggcggacactgggggaggagaggaagaagcgcggctaacttattccgagaatgccgaggagttgtcgtttttagctttgtgtttactttttggctggagcggagatgaggggccaccccgtgcccctgtgctgcggggccttttgcccggaggccgggccctaaggttttgttgtgttctgttgaaggtgccattttaaattttatttttattactttttttgtagatgaacttgagctctgtaacttacacctggaatgttaggatcgtgcggccgcggccggccgagctgcctggcggggttggcccttgtcttttcaagtaattttcatattaaacaaaaacaaagaaaaaaaatcttataaaaaggaaaaaaaccaa

SEQ ID NO: 153131 - DNA, 904 bp, Homo sapiens
  Payload ID: 10129
  Gene Symbol: MTA1
  Gene Name: metastasis associated 1
  ENST ID: ENST00000424723
  CDS Start-End: 1-166
ccggagaatcgaggagctcaacaagacggccaatgggaacgtggaggccaaagtggtgtgcttctaccggaggcgggacatctccagcaccctcatcgccctggccgacaagcacgcaatgggcgggggtgtcctggctccgtttcctcgggggctgggtgaatgaagtcctcgcacgccccccggagtggtctgtctctcactggcatcctctgcaagcttgtcatggtgtggctgggtgtgggcatcattgatcgaggcttctttttcccttctatgatgacttctggagactttccaggctgccctgtcagtctgctataaggccggaccgggggcggacaacggcgaggaaggggaaatagaagaggaaatggagaacccggaaatggtggacctgcccgagaaactaaagcaccagctgcggcatcgggagctgttcctctcccggcagctggagtctctgcccgccacgcacatcaggggcaagtgcagcgtcaccctgctcaacgagaccgagtcgctcaagtcctacctggagcgggaggatttcttcttctattctctagtctacgacccacagcagaagaccctgctggcagataaaggagagattcgagtaggaaaccggtaccaggcagacatcaccgacttgttaaaagaaggcgaggaggatggccgagaccagtccaggttggagacccaggtgtgggaggcgcacaacccactcacagacaagcagatcgaccagttcctggtggtggcccgctctgtgggcaccttcgcacgggccctggactgcagcagctccgtccgacagcccagcctgcacatgagcgccgcagctgcctcccgagacatcaccctgttccacgccatggatactctccacaagaacatctac

SEQ ID NO: 153132 - DNA, 461 bp, Homo sapiens
  Payload ID: 10129
  Gene Symbol: MTA1
  Gene Name: metastasis associated 1
  ENST ID: ENST00000551236
  CDS Start-End: 1-173
ccgccgccggcccggacatggccgccaacatgtacagggtcggagactacgtctactttgagaactcctccagcaacccatacctgatccggagaatcgaggagctcaacaagccctgtcagtctgctataaggccggaccgggggcggacaacggcgaggaaggggaaatagaagaggaaatggagaacccggaaatggtggacctgcccgagaaactaaagcaccagctgcggcatcgggagctgttcctctcccggcagctggagtctctgcccgccacgcacatcaggggcaagtgcagcgtcaccctgctcaacgagaccgagtcgctcaagtcctacctggagcgggaggatttcttcttctattctctagtctacgacccacagcagaagaccctgctggcagataaaggagagattcgagtaggaaaccggtaccaggcagacatcaccgact

SEQ ID NO: 153133 - DNA, 3058 bp, Homo sapiens
  Payload ID: 10130
  Gene Symbol: MTA2
  Gene Name: metastasis associated 1 family, member 2
  Uniprot ID: O94776
  ENST ID: ENST00000278823
  CDS Start-End: 391-2397
cgaaggtgttccggaaggaggcgaaccctgaggcgggcccggcaagccttccctgcggccggcagagcccaacgactagtgggactccgcgggggcgggggtagctggagcctggctctggcctggcaggagccgagctcgttccggaagaagccgagcggacgggggccagcctcagcgtcccgggagtgaggcgatagctgcggcggcgacagcgcgggccgggatgaaccgcgacggctgaggcagcggaggtgccggctgcgcgggccccagtgagactccctcgaagcggcagcccaccgttcggggctttgcctcgagccgagccctgcccccgcgagcctcccggacccctttgtgcggccggaggcggcggcgggaacggccatggcggccaacatgtaccgggtgggagattacgtctattttgagaactcttccagcaatccttacctggttagacggattgaggagctcaacaagactgcaaatggaaatgtggaggcaaaggttgtctgtcttttccggcgcagggacatttctagtagcctcaacagcctggctgatagtaatgccagggagtttgaagaggaatcaaagcagccaggggtgtctgagcagcagcgccatcaactgaagcaccgggaactttttctttctcggcaatttgaatcattaccagccacccacatacgggggaaatgcagtgtgaccctcttgaatgagacagatatcttgagccagtacctggaaaaggaggactgctttttttactcactggtgtttgaccccgtgcagaagacacttctcgctgatcagggcgagattagagttggttgcaaataccaagctgagatcccagatcgcctagtagagggagaatctgataatcggaaccagcagaagatggagatgaaggtctgggacccagacaaccctctcacagaccggcagatcgaccagtttcttgtggtggcccgagctgtgggaacctttgcaagagccctagattgtagcagctccattcggcagccaagcttgcacatgagtgcagctgctgcctcccgagatatcactctgtttcacgccatggataccttgcaaaggaacggctacgacctggctaaggccatgtcgaccctggtaccccagggaggcccggtgctgtgtcgggatgagatggaggaatggtcagcctcagaggccatgctatttgaggaggccctagagaagtatgggaaggacttcaatgatattcgccaggattttctaccctggaagtcacttgccagcatagtccagttttattacatgtggaaaaccacagaccggtatattcagcagaaaaggttgaaagctgctgaagcagacagcaaactgaaacaggtctacattcccacctacactaagccaaaccctaaccagatcatttctgtgggttcaaaacctggcatgaatggggctggatttcagaagggcctgacttgtgagagttgccacaccacacagtctgctcagtggtatgcctggggcccacctaacatgcagtgccgcctctgtgcttcctgttggatctactggaagaagtatgggggactgaagaccccaactcagcttgagggggccactcggggcaccacggagccacactcaaggggtcatttatccagacctgaagctcaaagtctctctccttacacaaccagcgccaacagggccaagctactggctaagaacagacaaactttcctgcttcagaccacaaagctgacccgtcttgccagacgcatgtgcagggacctattacagccaaggagggccgcccgacggccttatgctcctatcaatgccaatgccatcaaagcagagtgctccattcgacttcctaaggccgccaagactccattgaagattcaccctctggtgcggctgcccctggcaactatcgtcaaagatctggtggcccaggcacccctgaaaccaaaaacacctcggggtaccaagacaccgatcaacagaaaccagctgtcccagaaccggggactggggggcattatggtgaaacgggcctatgagactatggcaggggcaggggttcctttctctgccaatggaaggcctctggcttcagggattcgttcaagctcacagccagcagccaagcgtcagaaactaaacccagctgatgcccccaatcctgtggtgtttgtggccacaaaggataccagggccctacggaaggctctgacccatctggaaatgcggcgagctgctcgccgacccaacttgcccctgaaggtgaagccaacgctgattgcagtgcggccccctgtccctctacctgcaccctcacatcctgccagcaccaatgagcctattgtcctggaggactgagcacctgtggggaagggaggtgggctgagaggtagagggtggatgcccagggcacccaaacctcccttccctttcgtgtcgaagggagtgaggagtgaattaaggaagagagcaagtgagtgtgtgtccctggaggggttgggcgccctctggtgttaccacctcgagacttgtctcatgcctccatgcttgccgatggaggacagactgcaggaacttggcccatgtgggaacctagcctgttttggggggtaggacccacagatgtcttggacagttttggggggagggttttttaattttttaaaaattttgcctccctttgtgaaaggggatggggaggggaagagtaaacagataacaggtggtggtacctggttgggggaggggggcgtgcactgccatgtctttttttttttttttttttttttttttcctaattgggggtttctctttctgtccggtgtccggactttcctaattggagtttgaggcccctaagctggcatcaaccccaggccacgctcgctctttccttccctcccctccccctctgccttttgtacgccagttctcagaaataaagatcttttgtccgtttttttaacctcggattctgtaattggttcttatagtaacaaataaaaagctgttttcttca

SEQ ID NO: 153134 - DNA, 2577 bp, Homo sapiens
  Payload ID: 10130
  Gene Symbol: MTA2
  Gene Name: metastasis associated 1 family, member 2
  Uniprot ID: O94776
  ENST ID: ENST00000524902
  CDS Start-End: 430-1917
gcacaaccccccccttctccctgaggttgggaacaatacaccaatgagcctggggctgaggttcttctgctccctcccactttggttggcgcctagccaggggagtttgaagaggaatcaaagcagccaggggtgtctgagcagcagcgccatcaactgaagcaccgggaactttttctttctcggcaatttgaatcattaccagccacccacatacgggggaaatgcagtgtgaccctcttgaatgagacagatatcttgagccagtacctggaaaaggaggactgctttttttactcactggtgtttgaccccgtgcagaagacacttctcgctgatcagggcgagattagagttggttgcaaataccaagctgagatcccagatcgcctagtagagggagaatctgataatcggaaccagcagaagatggagatgaaggtctgggacccagacaaccctctcacagaccggcagatcgaccagtttcttgtggtggcccgagctgtgggaacctttgcaagagccctagattgtagcagctccattcggcagccaagcttgcacatgagtgcagctgctgcctcccgagatatcactctgtttcacgccatggataccttgcaaaggaacggctacgacctggctaaggccatgtcgaccctggtaccccagggaggcccggtgctgtgtcgggatgagatggaggaatggtcagcctcagaggccatgctatttgaggaggccctagagaagtatgggaaggacttcaatgatattcgccaggattttctaccctggaagtcacttgccagcatagtccagttttattacatgtggaaaaccacagaccggtatattcagcagaaaaggttgaaagctgctgaagcagacagcaaactgaaacaggtctacattcccacctacactaagccaaaccctaaccagatcatttctgtgggttcaaaacctggcatgaatggggctggatttcagaagggcctgacttgtgagagttgccacaccacacagtctgctcagtggtatgcctggggcccacctaacatgcagtgccgcctctgtgcttcctgttggatctactggaagaagtatgggggactgaagaccccaactcagcttgagggggccactcggggcaccacggagccacactcaaggggtcatttatccagacctgaagctcaaagtctctctccttacacaaccagcgccaacagggccaagctactggctaagaacagacaaactttcctgcttcagaccacaaagctgacccgtcttgccagacgcatgtgcagggacctattacagccaaggagggccgcccgacggccttatgctcctatcaatgccaatgccatcaaagcagagtgctccattcgacttcctaaggccgccaagactccattgaagattcaccctctggtgcggctgcccctggcaactatcgtcaaagatctggtggcccaggcacccctgaaaccaaaaacacctcggggtaccaagacaccgatcaacagaaaccagctgtcccagaaccggggactggggggcattatggtgaaacgggcctatgagactatggcaggggcaggggttcctttctctgccaatggaaggcctctggcttcagggattcgttcaagctcacagccagcagccaagcgtcagaaactaaacccagctgatgcccccaatcctgtggtgtttgtggccacaaaggataccagggccctacggaaggctctgacccatctggaaatgcggcgagctgctcgccgacccaacttgcccctgaaggtgaagccaacgctgattgcagtgcggccccctgtccctctacctgcaccctcacatcctgccagcaccaatgagcctattgtcctggaggactgagcacctgtggggaagggaggtgggctgagaggtagagggtggatgcccagggcacccaaacctcccttccctttcgtgtcgaagggagtgaggagtgaattaaggaagagagcaagtgagtgtgtgtccctggaggggttgggcgccctctggtgttaccacctcgagacttgtctcatgcctccatgcttgccgatggaggacagactgcaggaacttggcccatgtgggaacctagcctgttttggggggtaggacccacagatgtcttggacagttttggggggagggttttttaattttttaaaaattttgcctccctttgtgaaaggggatggggaggggaagagtaaacagataacaggtggtggtacctggttgggggaggggggcgtgcactgccatgtctttttttttttttttttttttttttttcctaattgggggtttctctttctgtccggtgtccggactttcctaattggagtttgaggcccctaagctggcatcaaccccaggccacgctcgctctttccttccctcccctccccctctgccttttgtacgccagttctcagaaataaagatcttttgtccgtttttttaacctcggattctgtaattggttcttatagtaacaaataaaaagctgttttcttc

SEQ ID NO: 153135 - DNA, 2265 bp, Homo sapiens
  Payload ID: 10130
  Gene Symbol: MTA2
  Gene Name: metastasis associated 1 family, member 2
  Uniprot ID: O94776
  ENST ID: ENST00000527204
  CDS Start-End: 745-2232
gagagggtgcggggaaccgcgacgcggcagggctccgagactcccagagagaagctgcgggcagccccgacggcactttcggggctgcgtcaggggctccccggggcacggagtggccttcggaaccggttccgaaggagctgacagggtagggagggaacgcgaggggctggggcgacggctttgccaccgcgggggagccgcccggaggtttcctcttcccaggcgttattgtgcgcctcgattcgaaaagattacgtctattttgagaactcttccagcaatccttacctggttagacggattgaggagctcaacaagactgcaaatggaaatgtggaggcaaaggttgtctgtcttttccggcgcagggacatttctagtagcctcaacagcctggctgatagtaatgccagggagtttgaagaggaatcaaagcagccaggggtgtctgagcagcagcgccatcaactgaagcaccgggaactttttctttctcggcaatttgaatcattaccagccacccacatacgggggaaatgcagtgtgaccctcttgaatgagacagatatcttgagccagtacctggaaaaggaggactgctttttttactcactggtgtttgaccccgtgcagaagacacttctcgctgatcagggcgagattagagttggttgcaaataccaagctgagatcccagatcgcctagtagagggagaatctgataatcggaaccagcagaagatggagatgaaggtctgggacccagacaaccctctcacagaccggcagatcgaccagtttcttgtggtggcccgagctgtgggaacctttgcaagagccctagattgtagcagctccattcggcagccaagcttgcacatgagtgcagctgctgcctcccgagatatcactctgtttcacgccatggataccttgcaaaggaacggctacgacctggctaaggccatgtcgaccctggtaccccagggaggcccggtgctgtgtcgggatgagatggaggaatggtcagcctcagaggccatgctatttgaggaggccctagagaagtatgggaaggacttcaatgatattcgccaggattttctaccctggaagtcacttgccagcatagtccagttttattacatgtggaaaaccacagaccggtatattcagcagaaaaggttgaaagctgctgaagcagacagcaaactgaaacaggtctacattcccacctacactaagccaaaccctaaccagatcatttctgtgggttcaaaacctggcatgaatggggctggatttcagaagggcctgacttgtgagagttgccacaccacacagtctgctcagtggtatgcctggggcccacctaacatgcagtgccgcctctgtgcttcctgttggatctactggaagaagtatgggggactgaagaccccaactcagcttgagggggccactcggggcaccacggagccacactcaaggggtcatttatccagacctgaagctcaaagtctctctccttacacaaccagcgccaacagggccaagctactggctaagaacagacaaactttcctgcttcagaccacaaagctgacccgtcttgccagacgcatgtgcagggacctattacagccaaggagggccgcccgacggccttatgctcctatcaatgccaatgccatcaaagcagagtgctccattcgacttcctaaggccgccaagactccattgaagattcaccctctggtgcggctgcccctggcaactatcgtcaaagatctggtggcccaggcacccctgaaaccaaaaacacctcggggtaccaagacaccgatcaacagaaaccagctgtcccagaaccggggactggggggcattatggtgaaacgggcctatgagactatggcaggggcaggggttcctttctctgccaatggaaggcctctggcttcagggattcgttcaagctcacagccagcagccaagcgtcagaaactaaacccagctgatgcccccaatcctgtggtgtttgtggccacaaaggataccagggccctacggaaggctctgacccatctggaaatgcggcgagctgctcgccgacccaacttgcccctgaaggtgaagccaacgctgattgcagtgcggccccctgtccctctacctgcaccctcacatcctgccagcaccaatgagcctattgtcctggaggactgagcacctgtggggaagggaggtgggctgagaggt

SEQ ID NO: 153136 - DNA, 5832 bp, Homo sapiens
  Payload ID: 10131
  Gene Symbol: MTA3
  Gene Name: metastasis associated 1 family, member 3
  ENST ID: ENST00000405592
  CDS Start-End: 671-2284
agcctcggtgccgcctgccagcccgcggagggaagcggtccccgacccggccccggcccccacgttctggggcgcgagtcctgagaaggcgcctaacgtgtagcgcgcctggaccctctcgagatgctgcccttagagtgggatgaaagtctggggaggaacgccttgtcaccggcaaaaacagcctttctcttggtcttcgtctgcatcctccttttcaaaatatcttgatttcccccgcgcacccctgacccggctgcagcaccggccctccgagcgggaagagccccgtgaaggctccgcagagcgatctaccccgcgctcttgtccgtgcccagaaagcgggttccacttggcagggattattttaaactgctaccagcaattcattcacctgacacccgacaccggcagcccagcccgccggaggcgagacaggattgtccggtgcccgctagaggtcgccaaacggagtccttttgcgctggttcttaagtggattcctagtgaaaaggcagacaactgaaaatattatgtctactttgagaattcctccagcaacccatacctaataagaaggatagaagaactcaacaagactgcaagtggcaacgtggaagcaaaagtagtatgcttttatagacgacgtgatatttccaacacacttataatgctcgcagataagcatgctaaagaaattgaggaagaatctgaaacaacagttgaggctgacttgaccgataagcagaaacatcagttgaaacatagggaactctttttgtcacgccagtatgaatctctgcccgcaacacatatcaggggaaagtgcagtgttgcccttctgaatgagacagaatcagtattgtcatatcttgataaggaggataccttcttctactcattggtctatgacccctcattgaaaacactattagctgacaaaggtgaaatcagagtgggacctagatatcaagcagacattccagaaatgctgttagaaggagaatcagatgagagggaacaatcaaaattggaagttaaagtttgggatccaaatagcccacttacggatcgacagattgaccagtttttagttgtagcacgtgctgttgggacattcgccagagccctggattgcagcagttctgtgaggcagcctagtttgcatatgagtgctgctgcagcttcccgagacatcaccttgtttcacgctatggatacattgtatagacacagctatgatttgagcagtgccattagtgtcttagtaccactcggaggacctgttttatgcagagatgaaatggaggaatggtcagcctctgaagctagcttatttgaagaggcactggaaaaatatggcaaagacttcaatgacatacggcaagattttcttccttggaaatcattgactagcatcattgaatattattacatgtggaaaactactgacagatatgtgcaacagaaacgtctaaaagcagcagaagctgagagtaaactgaaacaagtatatatcccaacctacaaaccaaatcccaaccaaatatccactagtaatgggaagcctggtgctgtgaatggagctgtggggaccacgttccagcctcagaatcctctcttagggagagcctgtgagagctgctatgctacacagtctcaccagtggtattcttggggcccacctaatatgcagtgtagattatgtgcaatttgttggctttattggaaaaaatatggaggcttgaaaatgcccacccagtcagaagaagagaagttatctcctagcccaactacagaggaccctcgtgttagaagtcacgtgtcccgccaggccatgcagggaatgccagtccgaaacactgggagtccaaagtctgcagtgaagacccgccaagctttcttccttcatactacatatttcacaaaatttgctcgtcaggtctgcaaaaataccctccggctgcggcaggcagcaagacggccgtttgttgctattaattatgctgccattagggcagaatatgcagacagacatgctgaactatctggaagtccactgaaaagcaaaagcactaggaagcctttggcatgtatcattgggtatttagagatccatcctgcaaagaaacctaatgtaattcgatctacaccaagcctgcaaaccccaactaccaagcggatgctaacaactccaaatcacacatctctgagcattctggggaaaagaaactacagtcatcacaatggtctggatgaactcacgtgctgtgtgtcagactgagctttccctgattcattctacaatccaagacttgctgcactgtcctgctgatgttcacagccgtgcctgggaagaaggcagccccactcccagtacatttcagtgggagacctctgcgtgcatccatggagacgcaatggggcggggaaggaactgtgggagtgcacgttccaaatcctgtgtctccacgtgtggatcagcagcacctcgctttcttgtcagagacctcgctgttacggagcgagacctgctgagaattgaggggctgagggaacccctccacctcctcccttctgcagcgccctgcgccccacccagcaacagcggccacttggcagtggggctgctgcaagctcagagccgctgccaccctgcatgtgtccgctcagctcggtcttatgctgtatagttactaaatatgtacaggagggccatggcatctttctgaatggatttttcttaagaaatgcgccagtgtttatgaggttcaaggtatttccctgtccttgctgttaccgtcactcagctttttctcgataggcttcatccttgtttttttgaaatgggggaatttgctgtttaccctctgcattcctatatgtgaccctccctcctactcctccaaggaacagaattaccgaggttctgacaaaagataagcctgtaaactcatcatctgtgttttgtggttggagagaaactggtgttctgcccggctctgcttggtcacagacagctccagcaagagcagttgttaaaagtgccaagcgtgtgtatcactgtgacaagccgtttgcttactgccctgttcccttgcagccaaaccagctgatgaagaactgctgccaggtgggtcctacagcaggtcacaaatgacctagtttcattttaagcagacagactctgtttggcctagaggtgtggagtgagagaactgtgtttgtgggtatgagtctgtgtggccaaccccatgacccccacccctccagcccaacatcttgtgagcacatgtgacctaggccccgggggacctgcctgctcctttggcttgggctcttcgtgtttcccacctgccctcggcacgagcccttggtggcatcacagttggccactcagctgtgctgagtagctgtgctacttgtgctggcagctgcaaggataggaatagctcagcgcccgatgagctccctgagcagatgtgaggctggcaactcccctgccctctgtttgcaggcacagggtcacagtcccaagaaagacaactggagtctgatctcccagccatctctggggttactaggaggcagctggatggcagatacgagaggcccaaatagccaagctgttgcaagacagagtggctacaattgaattgacaccctgggaagcacgaggtaacttggtaaggataatgatgctgtagatgtctgtgtcctcggaggctgagctccgcttggcagagagagcgtgctgtgtgaggtggagggcggttttgcagacatctcagcttcttttctgaggaggagttggttctcatcttaggcttctgcaagggcgagcatgggatgtctccaccaccacccactcttggagctgtgctgggtcttggcttggggcgctgagggtggggcctgtgtcagaagcatttggtgagaggggtggaggtggcaggcaggggttctcctcagggttcccactgaggggtcccttcagcaaagacctgggaggaggtgccgcatcacgtggatgtttcttccctaaagaaaaagacacaggaaagctgtctgtctgtaccctgctctggatttattgtcgtacttggacccagaaggggaaatgattccctcaccctttcactttctctctgaacccctactaagtggtgactgcagattctggaaacaattagctgcccgtgactcagctgccagcttcattttctctgccttttgggagaggccctctcacccaggcccaagagatttggagacaggagtcaggccaggtctgaagcaggagaagggaggcccctcctatctacccagttgacatttggctttgggaaaagcgcagcttgttcgagccacgtgtgccaagcaggcttttccttcctcttgtaagtaaagctcgtggttctgtagtccagtcatcctaggagggtgatgttgactgagacttcacgctctccctttgtctctggaaactgccccctcgttctgacagaatcccccaggcaatggaggaagggtgccgaggcgcctctagtctgtgcctttgccgttggaagcatttggtgctgagagggtttcccagccacccgctccctttctggggccatggtgtccctgctgtgtgtcagtggcatgtcactgtggttcagtgagcacatgggtggacgtgcagagactgtctgcgcagcccccagcagacatgcccctggggtgaggacacaggctctgcaggctatctccccctctggctcagtcatcgcctgcccacccttcacttcttaaaggtgcgcaagagaggagggccgactggagggtgtcgccggaaggtttcagcctgcccttcacaattccccttgtgcacagcccagtttccatctctcagggcccacccaggaaaatggatttcaagtgggggttttcatccagagatttgtttaacacaaaacaagaaaagctgagaggcaaaacaggggagtgaggggcaacccagaggtggggaacaacaacagcaagccgcccccatcctgagactggctgggcaccaggggaggacgcgtcaccagagcctggggccaaggccactgggggacctgccacactgtggacctgtctggtgggggctggagcctcgagaagccatgattcttgtcagaaacatttccccaggcagagagagggggccccagcctctcccctcctcttggcctccagagtcctgcaggtgcctcacagtagtgaaacccagttggaagcagctgccctgggagcctgggacaggcgacccaccgggtcagtcccctgccactcagagcagagcagggggctgagggcaagcaggtggggctgtgcgtggcctcagtgcactcggtgtcatgtctgagcctggtgtttatgccccactgctgtcctaagtccctggcgaggggaggtggaggagctgccccgtgggtgtttggagattctgttttactctgcctagagaggaaacggctttggggagggagggggaagcctttattctttactgttgtccctgttttcctttgggggaatttactcagttagcagcccctcctcaccattccccccaggaaggccatgtcccagttttctgtccacccctcctgttcctctgcactatgtctctgattttccctgccagggaagctaacccagagcacgcacctgtgctcatgagtgtttccgcaggataattcgttctgagcatgataccacagtgtggattgtctgtctgtaaggagatgccatctactaaccaatttgtattgtgtttccaataaattcctggaaattttg

SEQ ID NO: 153137 - DNA, 5484 bp, Homo sapiens
  Payload ID: 10131
  Gene Symbol: MTA3
  Gene Name: metastasis associated 1 family, member 3
  ENST ID: ENST00000406652
  CDS Start-End: 323-1936
tggcgaggcgggaagcacccggaatcttcctggccctagagcctgcaggctccaggccggccccttgaatctcaccgcgaggaaggcaccctgctgcctgcacttatttgcatccaagagtttgcattgagactggcgcttgcctactagggcagccacaggggggttccccagggacagagattatgtctactttgagaattcctccagcaacccatacctaataagaaggatagaagaactcaacaagactgcaagtggcaacgtggaagcaaaagtagtatgcttttatagacgacgtgatatttccaacacacttataatgctcgcagataagcatgctaaagaaattgaggaagaatctgaaacaacagttgaggctgacttgaccgataagcagaaacatcagttgaaacatagggaactctttttgtcacgccagtatgaatctctgcccgcaacacatatcaggggaaagtgcagtgttgcccttctgaatgagacagaatcagtattgtcatatcttgataaggaggataccttcttctactcattggtctatgacccctcattgaaaacactattagctgacaaaggtgaaatcagagtgggacctagatatcaagcagacattccagaaatgctgttagaaggagaatcagatgagagggaacaatcaaaattggaagttaaagtttgggatccaaatagcccacttacggatcgacagattgaccagtttttagttgtagcacgtgctgttgggacattcgccagagccctggattgcagcagttctgtgaggcagcctagtttgcatatgagtgctgctgcagcttcccgagacatcaccttgtttcacgctatggatacattgtatagacacagctatgatttgagcagtgccattagtgtcttagtaccactcggaggacctgttttatgcagagatgaaatggaggaatggtcagcctctgaagctagcttatttgaagaggcactggaaaaatatggcaaagacttcaatgacatacggcaagattttcttccttggaaatcattgactagcatcattgaatattattacatgtggaaaactactgacagatatgtgcaacagaaacgtctaaaagcagcagaagctgagagtaaactgaaacaagtatatatcccaacctacaaaccaaatcccaaccaaatatccactagtaatgggaagcctggtgctgtgaatggagctgtggggaccacgttccagcctcagaatcctctcttagggagagcctgtgagagctgctatgctacacagtctcaccagtggtattcttggggcccacctaatatgcagtgtagattatgtgcaatttgttggctttattggaaaaaatatggaggcttgaaaatgcccacccagtcagaagaagagaagttatctcctagcccaactacagaggaccctcgtgttagaagtcacgtgtcccgccaggccatgcagggaatgccagtccgaaacactgggagtccaaagtctgcagtgaagacccgccaagctttcttccttcatactacatatttcacaaaatttgctcgtcaggtctgcaaaaataccctccggctgcggcaggcagcaagacggccgtttgttgctattaattatgctgccattagggcagaatatgcagacagacatgctgaactatctggaagtccactgaaaagcaaaagcactaggaagcctttggcatgtatcattgggtatttagagatccatcctgcaaagaaacctaatgtaattcgatctacaccaagcctgcaaaccccaactaccaagcggatgctaacaactccaaatcacacatctctgagcattctggggaaaagaaactacagtcatcacaatggtctggatgaactcacgtgctgtgtgtcagactgagctttccctgattcattctacaatccaagacttgctgcactgtcctgctgatgttcacagccgtgcctgggaagaaggcagccccactcccagtacatttcagtgggagacctctgcgtgcatccatggagacgcaatggggcggggaaggaactgtgggagtgcacgttccaaatcctgtgtctccacgtgtggatcagcagcacctcgctttcttgtcagagacctcgctgttacggagcgagacctgctgagaattgaggggctgagggaacccctccacctcctcccttctgcagcgccctgcgccccacccagcaacagcggccacttggcagtggggctgctgcaagctcagagccgctgccaccctgcatgtgtccgctcagctcggtcttatgctgtatagttactaaatatgtacaggagggccatggcatctttctgaatggatttttcttaagaaatgcgccagtgtttatgaggttcaaggtatttccctgtccttgctgttaccgtcactcagctttttctcgataggcttcatccttgtttttttgaaatgggggaatttgctgtttaccctctgcattcctatatgtgaccctccctcctactcctccaaggaacagaattaccgaggttctgacaaaagataagcctgtaaactcatcatctgtgttttgtggttggagagaaactggtgttctgcccggctctgcttggtcacagacagctccagcaagagcagttgttaaaagtgccaagcgtgtgtatcactgtgacaagccgtttgcttactgccctgttcccttgcagccaaaccagctgatgaagaactgctgccaggtgggtcctacagcaggtcacaaatgacctagtttcattttaagcagacagactctgtttggcctagaggtgtggagtgagagaactgtgtttgtgggtatgagtctgtgtggccaaccccatgacccccacccctccagcccaacatcttgtgagcacatgtgacctaggccccgggggacctgcctgctcctttggcttgggctcttcgtgtttcccacctgccctcggcacgagcccttggtggcatcacagttggccactcagctgtgctgagtagctgtgctacttgtgctggcagctgcaaggataggaatagctcagcgcccgatgagctccctgagcagatgtgaggctggcaactcccctgccctctgtttgcaggcacagggtcacagtcccaagaaagacaactggagtctgatctcccagccatctctggggttactaggaggcagctggatggcagatacgagaggcccaaatagccaagctgttgcaagacagagtggctacaattgaattgacaccctgggaagcacgaggtaacttggtaaggataatgatgctgtagatgtctgtgtcctcggaggctgagctccgcttggcagagagagcgtgctgtgtgaggtggagggcggttttgcagacatctcagcttcttttctgaggaggagttggttctcatcttaggcttctgcaagggcgagcatgggatgtctccaccaccacccactcttggagctgtgctgggtcttggcttggggcgctgagggtggggcctgtgtcagaagcatttggtgagaggggtggaggtggcaggcaggggttctcctcagggttcccactgaggggtcccttcagcaaagacctgggaggaggtgccgcatcacgtggatgtttcttccctaaagaaaaagacacaggaaagctgtctgtctgtaccctgctctggatttattgtcgtacttggacccagaaggggaaatgattccctcaccctttcactttctctctgaacccctactaagtggtgactgcagattctggaaacaattagctgcccgtgactcagctgccagcttcattttctctgccttttgggagaggccctctcacccaggcccaagagatttggagacaggagtcaggccaggtctgaagcaggagaagggaggcccctcctatctacccagttgacatttggctttgggaaaagcgcagcttgttcgagccacgtgtgccaagcaggcttttccttcctcttgtaagtaaagctcgtggttctgtagtccagtcatcctaggagggtgatgttgactgagacttcacgctctccctttgtctctggaaactgccccctcgttctgacagaatcccccaggcaatggaggaagggtgccgaggcgcctctagtctgtgcctttgccgttggaagcatttggtgctgagagggtttcccagccacccgctccctttctggggccatggtgtccctgctgtgtgtcagtggcatgtcactgtggttcagtgagcacatgggtggacgtgcagagactgtctgcgcagcccccagcagacatgcccctggggtgaggacacaggctctgcaggctatctccccctctggctcagtcatcgcctgcccacccttcacttcttaaaggtgcgcaagagaggagggccgactggagggtgtcgccggaaggtttcagcctgcccttcacaattccccttgtgcacagcccagtttccatctctcagggcccacccaggaaaatggatttcaagtgggggttttcatccagagatttgtttaacacaaaacaagaaaagctgagaggcaaaacaggggagtgaggggcaacccagaggtggggaacaacaacagcaagccgcccccatcctgagactggctgggcaccaggggaggacgcgtcaccagagcctggggccaaggccactgggggacctgccacactgtggacctgtctggtgggggctggagcctcgagaagccatgattcttgtcagaaacatttccccaggcagagagagggggccccagcctctcccctcctcttggcctccagagtcctgcaggtgcctcacagtagtgaaacccagttggaagcagctgccctgggagcctgggacaggcgacccaccgggtcagtcccctgccactcagagcagagcagggggctgagggcaagcaggtggggctgtgcgtggcctcagtgcactcggtgtcatgtctgagcctggtgtttatgccccactgctgtcctaagtccctggcgaggggaggtggaggagctgccccgtgggtgtttggagattctgttttactctgcctagagaggaaacggctttggggagggagggggaagcctttattctttactgttgtccctgttttcctttgggggaatttactcagttagcagcccctcctcaccattccccccaggaaggccatgtcccagttttctgtccacccctcctgttcctctgcactatgtctctgattttccctgccagggaagctaacccagagcacgcacctgtgctcatgagtgtttccgcaggataattcgttctgagcatgataccacagtgtggattgtctgtctgtaaggagatgccatctactaaccaatttgtattgtgtttccaataaattcctggaaattttg

SEQ ID NO: 153138 - DNA, 2202 bp, Homo sapiens
  Payload ID: 10131
  Gene Symbol: MTA3
  Gene Name: metastasis associated 1 family, member 3
  Uniprot ID: Q9BTC8
  ENST ID: ENST00000407270
  CDS Start-End: 230-1777
cccactcggccttgctagcctggcgctgggggcgggcaccagcccccacccctcggcgtaccatcccctttacttcccccaccccctgtcccctcccttccctcccttcccccccgtggcgaggcagcagcgacggcggcggcggcagcggcggtcgcggctgaggctgaggaggaggcggcggcggcgggcggggctcggctcgggctccgcgggcgggcgggcggacatggcggccaacatgtaccgggtcggagattatgtctactttgagaattcctccagcaacccatacctaataagaaggatagaagaactcaacaagactgcaagtggcaacgtggaagcaaaagtagtatgcttttatagacgacgtgatatttccaacacacttataatgctcgcagataagcatgctaaagaaattgaggaagaatctgaaacaacagttgaggctgacttgaccgataagcagaaacatcagttgaaacatagggaactctttttgtcacgccagtatgaatctctgcccgcaacacatatcaggggaaagtgcagtgttgcccttctgaatgagacagaatcagtattgtcatatcttgataaggaggataccttcttctactcattggtctatgacccctcattgaaaacactattagctgacaaaggtgaaatcagagtgggacctagatatcaagcagacattccagaaatgctgttagaaggagaatcagatgagagggaacaatcaaaattggaagttaaagtttgggatccaaatagcccacttacggatcgacagattgaccagtttttagttgtagcacgtgctgttgggacattcgccagagccctggattgcagcagttctgtgaggcagcctagtttgcatatgagtgctgctgcagcttcccgagacatcaccttgtttcacgctatggatacattgtatagacacagctatgatttgagcagtgccattagtgtcttagtaccactcggaggacctgttttatgcagagatgaaatggaggaatggtcagcctctgaagctagcttatttgaagaggcactggaaaaatatggcaaagacttcaatgacatacggcaagattttcttccttggaaatcattgactagcatcattgaatattattacatgtggaaaactactgacagatatgtgcaacagaaacgtctaaaagcagcagaagctgagagtaaactgaaacaagtatatatcccaacctacagcaaaccaaatcccaaccaaatatccactagtaatgggaagcctggtgctgtgaatggagctgtggggaccacgttccagcctcagaatcctctcttagggagagcctgtgagagctgctatgctacacagtctcaccagtggtattcttggggcccacctaatatgcagtgtagattatgtgcaatttgttggctttattggaaaaaatatggaggcttgaaaatgcccacccagtcagaagaagagaagttatctcctagcccaactacagaggaccctcgtgttagaagtcacgtgtcccgccaggccatgcagggaatgccagtccgaaacactgggagtccaaagtctgcagtgaagacccgccaagctttcttccttcatactacatatttcacaaaatttgctcgtcaggtctgcaaaaataccctccggctgcggcaggcagcaagacggccgtttgttgctattaattatgctgccattagggcagaatgtaagatgcttttaaattcttaaccttatatgttgtgcttctgaccattttctcttttcctctctttccttttttttttgtttgtttgtttgcaataaacataagttcttgtgtacagccttttatttggtttattttttaacattgtttttgtgtgctgccatttgtatcatgccaacctggaaaaaaaaaatcaaaacattgaaacttctgtactctttaccagagagtagtgcttagcaaaagattggtgggaggtgatcctattccatggggttttgtgatggaattgcctgcagagcccttattgaagcacttttaccttttaggtagtgccacaatgtaacccctaaggatgctgttataatgagactccataatcgagacagtacagtccagtcttacatggattcattaggtttaaataaaatttgccaatttacactaa

SEQ ID NO: 153139 - DNA, 2041 bp, Homo sapiens
  Payload ID: 10131
  Gene Symbol: MTA3
  Gene Name: metastasis associated 1 family, member 3
  ENST ID: ENST00000406911
  CDS Start-End: 72-1616
ggctgaggctgaggaggaggcggcggcggcgggcggggctcggctcgggctccgcgggcgggcgggcggacatggcggccaacatgtaccgggtcggagattatgtctactttgagaattcctccagcaacccatacctaataagaaggatagaagaactcaacaagactgcaagtggcaacgtggaagcaaaagtagtatgcttttatagacgacgtgatatttccaacacacttataatgctcgcagataagcatgctaaagaaattgaggaagaatctgaaacaacagttgaggctgacttgaccgataagcagaaacatcagttgaaacatagggaactctttttgtcacgccagtatgaatctctgcccgcaacacatatcaggggaaagtgcagtgttgcccttctgaatgagacagaatcagtattgtcatatcttgataaggaggataccttcttctactcattggtctatgacccctcattgaaaacactattagctgacaaaggtgaaatcagagtgggacctagatatcaagcagacattccagaaatgctgttagaaggagaatcagatgagagggaacaatcaaaattggaagttaaagtttgggatccaaatagcccacttacggatcgacagattgaccagtttttagttgtagcacgtgctgttgggacattcgccagagccctggattgcagcagttctgtgaggcagcctagtttgcatatgagtgctgctgcagcttcccgagacatcaccttgtttcacgctatggatacattgtatagacacagctatgatttgagcagtgccattagtgtcttagtaccactcggaggacctgttttatgcagagatgaaatggaggaatggtcagcctctgaagctagcttatttgaagaggcactggaaaaatatggcaaagacttcaatgacatacggcaagattttcttccttggaaatcattgactagcatcattgaatattattacatgtggaaaactactgacagatatgtgcaacagaaacgtctaaaagcagcagaagctgagagtaaactgaaacaagtatatatcccaacctacaaaccaaatcccaaccaaatatccactagtaatgggaagcctggtgctgtgaatggagctgtggggaccacgttccagcctcagaatcctctcttagggagagcctgtgagagctgctatgctacacagtctcaccagtggtattcttggggcccacctaatatgcagtgtagattatgtgcaatttgttggctttattggaaaaaatatggaggcttgaaaatgcccacccagtcagaagaagagaagttatctcctagcccaactacagaggaccctcgtgttagaagtcacgtgtcccgccaggccatgcagggaatgccagtccgaaacactgggagtccaaagtctgcagtgaagacccgccaagctttcttccttcatactacatatttcacaaaatttgctcgtcaggtctgcaaaaataccctccggctgcggcaggcagcaagacggccgtttgttgctattaattatgctgccattagggcagaatgtaagatgcttttaaattcttaaccttatatgttgtgcttctgaccattttctcttttcctctctttccttttttttttgtttgtttgtttgcaataaacataagttcttgtgtacagccttttatttggtttattttttaacattgtttttgtgtgctgccatttgtatcatgccaacctggaaaaaaaaaatcaaaacattgaaacttctgtactctttaccagagagtagtgcttagcaaaagattggtgggaggtgatcctattccatggggttttgtgatggaattgcctgcagagcccttattgaagcacttttaccttttaggtagtgccacaatgtaacccctaaggatgctgttataatgagactccataatcgagacagtacagtccagtcttacatggattcattaggtttaaataaaatttgccaatttacactaa

SEQ ID NO: 153140 - DNA, 1785 bp, Homo sapiens
  Payload ID: 10131
  Gene Symbol: MTA3
  Gene Name: metastasis associated 1 family, member 3
  Uniprot ID: Q9BTC8
  ENST ID: ENST00000405094
  CDS Start-End: 1-1785
atggcggccaacatgtaccgggtcggagattatgtctactttgagaattcctccagcaacccatacctaataagaaggatagaagaactcaacaagactgcaagtggcaacgtggaagcaaaagtagtatgcttttatagacgacgtgatatttccaacacacttataatgctcgcagataagcatgctaaagaaattgaggaagaatctgaaacaacagttgaggctgacttgaccgataagcagaaacatcagttgaaacatagggaactctttttgtcacgccagtatgaatctctgcccgcaacacatatcaggggaaagtgcagtgttgcccttctgaatgagacagaatcagtattgtcatatcttgataaggaggataccttcttctactcattggtctatgacccctcattgaaaacactattagctgacaaaggtgaaatcagagtgggacctagatatcaagcagacattccagaaatgctgttagaaggagaatcagatgagagggaacaatcaaaattggaagttaaagtttgggatccaaatagcccacttacggatcgacagattgaccagtttttagttgtagcacgtgctgttgggacattcgccagagccctggattgcagcagttctgtgaggcagcctagtttgcatatgagtgctgctgcagcttcccgagacatcaccttgtttcacgctatggatacattgtatagacacagctatgatttgagcagtgccattagtgtcttagtaccactcggaggacctgttttatgcagagatgaaatggaggaatggtcagcctctgaagctagcttatttgaagaggcactggaaaaatatggcaaagacttcaatgacatacggcaagattttcttccttggaaatcattgactagcatcattgaatattattacatgtggaaaactactgacagatatgtgcaacagaaacgtctaaaagcagcagaagctgagagtaaactgaaacaagtatatatcccaacctacagcaaaccaaatcccaaccaaatatccactagtaatgggaagcctggtgctgtgaatggagctgtggggaccacgttccagcctcagaatcctctcttagggagagcctgtgagagctgctatgctacacagtctcaccagtggtattcttggggcccacctaatatgcagtgtagattatgtgcaatttgttggctttattggaaaaaatatggaggcttgaaaatgcccacccagtcagaagaagagaagttatctcctagcccaactacagaggaccctcgtgttagaagtcacgtgtcccgccaggccatgcagggaatgccagtccgaaacactgggagtccaaagtctgcagtgaagacccgccaagctttcttccttcatactacatatttcacaaaatttgctcgtcaggtctgcaaaaataccctccggctgcggcaggcagcaagacggccgtttgttgctattaattatgctgccattagggcagaatatgcagacagacatgctgaactatctggaagtccactgaaaagcaaaagcactaggaagcctttggcatgtatcattgggtatttagagatccatcctgcaaagaaacctaatgtaattcgatctacaccaagcctgcaaaccccaactaccaagcggatgctaacaactccaaatcacacatctctgagcattctggggaaaagaaactacagtcatcacaatggtctggatgaactcacgtgctgtgtgtcagactga

SEQ ID NO: 153141 - DNA, 2525 bp, Homo sapiens
  Payload ID: 10131
  Gene Symbol: MTA3
  Gene Name: metastasis associated 1 family, member 3
  ENST ID: ENST00000409019
  CDS Start-End: 9-1781
gggcggacatggcggccaacatgtaccgggtcggagattatgtctactttgagaattcctccagcaacccatacctaataagaaggatagaagaactcaacaagactgcaagtggcaacgtggaagcaaaagtagtatgcttttatagacgacgtgatatttccaacacacttataatgctcgcagataagcatgctaaagaaattgaggaagaatctgaaacaacagttgaggctgacttgaccgataagcagaaacatcagttgaaacatagggaactctttttgtcacgccagtatgaatctctgcccgcaacacatatcaggggaaagtgcagtgttgcccttctgaatgagacagaatcagtattgtcatatcttgataaggaggataccttcttctactcattggtctatgacccctcattgaaaacactattagctgacaaaggtgaaatcagagtgggacctagatatcaagcagacattccagaaatgctgttagaaggagaatcagatgagagggaacaatcaaaattggaagttaaagtttgggatccaaatagcccacttacggatcgacagattgaccagtttttagttgtagcacgtgctgttgggacattcgccagagccctggattgcagcagttctgtgaggcagcctagtttgcatatgagtgctgctgcagcttcccgagacatcaccttgtttcacgctatggatacattgtatagacacagctatgatttgagcagtgccattagtgtcttagtaccactcggaggacctgttttatgcagagatgaaatggaggaatggtcagcctctgaagctagcttatttgaagaggcactggaaaaatatggcaaagacttcaatgacatacggcaagattttcttccttggaaatcattgactagcatcattgaatattattacatgtggaaaactactgacagatatgtgcaacagaaacgtctaaaagcagcagaagctgagagtaaactgaaacaagtatatatcccaacctacaaaccaaatcccaaccaaatatccactagtaatgggaagcctggtgctgtgaatggagctgtggggaccacgttccagcctcagaatcctctcttagggagagcctgtgagagctgctatgctacacagtctcaccagtggtattcttggggcccacctaatatgcagtgtagattatgtgcaatttgttggctttattggaaaaaatatggaggcttgaaaatgcccacccagtcagaagaagagaagttatctcctagcccaactacagaggaccctcgtgttagaagtcacgtgtcccgccaggccatgcagggaatgccagtccgaaacactgggagtccaaagtctgcagtgaagacccgccaagctttcttccttcatactacatatttcacaaaatttgctcgtcaggtctgcaaaaataccctccggctgcggcaggcagcaagacggccgtttgttgctattaattatgctgccattagggcagaatatgcagacagacatgctgaactatctggaagtccactgaaaagcaaaagcactaggaagcctttggcatgtatcattgggtatttagagatccatcctgcaaagaaacctaatgtaattcgatctacaccaagcctgcaaaccccaactaccaagcggatgctaacaactccaaatcacacatctctgagcattctggggaaaagaaactacagtcatcacaatggtctggatgaaaagctcatgaagtgaagacacagctctgctccatcctgcagcccttccttggcatgctctgaggctgtgaagaactcacgtgctgtgtgtcagactgagctttccctgattcattctacaatccaagacttgctgcactgtcctgctgatgttcacagccgtgcctgggaagaaggcagccccactcccagtacatttcagtgggagacctctgcgtgcatccatggagacgcaatggggcggggaaggaactgtgggagtgcacgttccaaatcctgtgtctccacgtgtggatcagcagcacctcgctttcttgtcagagacctcgctgttacggagcgagacctgctgagaattgaggggctgagggaacccctccacctcctcccttctgcagcgccctgcgccccacccagcaacagcggccacttggcagtggggctgctgcaagctcagagccgctgccaccctgcatgtgtccgctcagctcggtcttatgctgtatagttactaaatatgtacaggagggccatggcatctttctgaatggatttttcttaagaaatgcgccagtgtttatgaggttcaaggtatttccctgtccttgctgttaccgtcactcagctttttctcgataggcttcatccttgtttttttgaaatgggggaatttgctgtttaccctctgcattcctatatgtgaccctccctcctactcctccaaggaacagaattaccgaggttctgacaaaagataagc

SEQ ID NO: 153142 - DNA, 706 bp, Homo sapiens
  Payload ID: 10131
  Gene Symbol: MTA3
  Gene Name: metastasis associated 1 family, member 3
  ENST ID: ENST00000433553
  CDS Start-End: 654-706
gtttgctctgctgcctgcctccttcccagtcttctgcggaagagagaaataaggtcaaacaaactttctccctactcacgacgccctcctccctctttcctggtaaaataataattcagataagtggcgtgtttgtatgagagactggctcttccttctctgctcattagccgagcttctgatggatggtggtgggaatggcctggctaaatgaggccactttgcagaagagagcggcgaaagagccactaagatagacaataacaatgcagctgcctttcggataaacacacagtgggaagtttccagcaagcctattagatgagaggaaaagccacacttgaaaaattttatccttttagttgaaagcctgcagcaatttcttaatcacaagacattaaatggatctggattaaatatggtaaaagggtaaaaaagatgctgatatcacccccagaacactttgcctcttagaagtgatcccccggcccccttttttcctcatcttcccagattatgtctactttgagaattcctccagcaacccatacctaataagaaggatagaagaactcaacaagactgcaagtggcaacgtggaagcaaaagtagtatgcttttatagacgacgtgatatttccaacacacttataatgctcgcagataagcatgctaaagaaattgaggaagaatctgaaacaacagt

SEQ ID NO: 153143 - DNA, 1702 bp, Homo sapiens
  Payload ID: 10131
  Gene Symbol: MTA3
  Gene Name: metastasis associated 1 family, member 3
  ENST ID: ENST00000454356
  CDS Start-End: 72-1250
ggctgaggctgaggaggaggcggcggcggcgggcggggctcggctcgggctccgcgggcgggcgggcggacatggcggccaacatgtaccgggtcggagattatgtctactttgagaattcctccagcaacccatacctaataagaaggatagaagaactcaacaagactgcaagtggcaacgtggaagcaaaagtagtatgcttttatagacgacgtgatatttccaacacacttataatgctcgcagataagcatgctaaagaaattgaggaagaatctgaaacaacagttgaggctgacttgaccgataagcagaaacatcagttgaaacatagggaactctttttgtcacgccagtatgaatctctgcccgcaacacatatcaggggaaagtgcagtgttgcccttctgaatgagacagaatcagtattgtcatatcttgataaggaggataccttcttctactcattggtctatgacccctcattgaaaacactattagctgacaaaggtgaaatcagagtgggacctagatatcaagcagacattccagaaatgctgttagaaggagaatcagatgagagggaacaatcaaaattggaagttaaagtttgggatccaaatagcccacttacggatcgacagattgaccagtttttagttgtagcacgtgctgttgggacattcgccagagccctggattgcagcagttctgtgaggcagcctagtttgcatatgagtgctgctgcagcttcccgagacatcaccttgtttcacgctatggatacattgtatagacacagctatgatttgagcagtgccattagtgtcttagtaccactcggaggacctgttttatgcagagatgaaatggaggaatggtcagcctctgaagctagcttatttgaagaggcactggaaaaatatggcaaagacttcaatgacatacggcaagattttcttccttggaaatcattgactagcatcattgaatattattacatgtggaaaactactgacagatatgtgcaacagaaacgtctaaaagcagcagaagctgagagtaaactgaaacaagtatatatcccaacctacaaaccaaatcccaaccaaatatccactagtaatgggaagcctggtgctgtgaatggagctgtggggaccacgttccagcctcagaatcctctcttagggagagcctgtgagagctgctatgtctcaccagtggtattcttggggcccacctaatatgcagtgtagattatgtgcaatttgttggctttattggaaaaaatatggaggcttgaaaatgcccacccagtcagaagaagagaagttatctcctagcccaactacagaggaccctcgtgttagaagtcacgtgtcccgccaggccatgcagggaatgccagtccgaaacactgggagtccaaagtctgcagtgaagacccgccaagctttcttccttcatactacatatttcacaaaatttgctcgtcaggtctgcaaaaataccctccggctgcggcaggcagcaagacggccgtttgttgctattaattatgctgccattagggcagaatgtaagatgcttttaaattcttaaccttatatgttgtgcttctgaccattttctcttttcctctctttccttttttttttgtttgtttgtttgcaataaacataagttcttgtgtaca

SEQ ID NO: 153144 - DNA, 758 bp, Homo sapiens
  Payload ID: 10131
  Gene Symbol: MTA3
  Gene Name: metastasis associated 1 family, member 3
  ENST ID: ENST00000430763
  CDS Start-End: 6-281
cggacatggcggccaacatgtaccgggtcggagattatgtctactttgagaattcctccagcaacccatacctaataagaaggatagaagaactcaacaagactgcaagtggcaacgtggaagcaaaagtagtatgcttttatagacgacgtgatatttccaacacacttataatgctcgcagataagcatgctaagacggagtttcgctcttgttgcccaggctggagtgcaatggcacgatctcggctcactgcaacctccacctcccaaatcaagtgattctcctgcctcagcctcctgagtagctgggattacagaagaaattgaggaagaatctgaaacaacagttgaggctgacttgaccgataagcagaaacatcagttgaaacatagggaactctttttgtcacgccagtatgaatctctgcccgcaacacatatcaggggaaagtgcagtgttgcccttctgaatgagacagaatcagtattgtcatatcttgataaggaggataccttcttctactcattggtctatgacccctcattgaaaacactattagctgacaaaggtgaaatcagagtgggacctagatatcaagcagacattccagaaatgctgttagaaggagaatcagatgagagggaacaatcaaaattggaagttaaagtttgggatccaaatagcccacttacggatcgacagattgaccagtttttagttgtagcacgtgctgttgggacattcgccagagccct

SEQ ID NO: 153145 - DNA, 2994 bp, Homo sapiens
  Payload ID: 10132
  Gene Symbol: MACC1
  Gene Name: metastasis associated in colon cancer 1
  Uniprot ID: Q6ZN28
  ENST ID: ENST00000332878
  CDS Start-End: 115-2673
atacggagcaaggcatgtttgaagagtacccgggtttggtagagtgacttctattcactaaaaccatgtgtctgaactgaagaagcttgggctcacttccacaaatgtggaaaaatgctaatcactgaaagaaaacattttcggtcaggaagaattgcacaaagtatgtctgaagcaaatttgattgacatggaagctggaaaactctcaaaaagttgcaatattacagaatgccaggacccagacttgcttcacaattggccggatgctttcacccttcgtggtaataatgcttccaaagttgcaaatccattctggaatcaactgtctgcttctaacccatttttggatgacataactcaactaagaaataacaggaagagaaataatatttccatcttaaaggaagatccttttcttttctgtagagaaatagaaaatggaaattcttttgattcctccggtgatgaacttgatgtgcatcagttacttaggcagacttcctcaagaaattctggaagatctaaaagtgtttcagaacttctggacattttagacgacacagcacatgcccatcagagtatacataactctgaccagatcctactacacgacttagagtggcttaaaaatgatcgggaggcttataaaatggcttggttaagtcaacgccagctggcccgctcctgccttgatttgaatacaattagtcagagccctggatgggcccagacacaacttgcggaggtcaccatagcttgcaaagtaaaccatcaaggagggtcagtacaattacctgaatcagacatcactgttcatgtgccccaaggtcatgtggctgtgggagaattccaagaggtgtctctaagggctttccttgatccgccacacatgcttaaccatgatctttcgtgcactgtgagcccgttgttggaaatcatgttaggcaacctcaatacaatggaagcccttttgctggagatgaaaattggggctgaagtaagaaaggatcctttcagccaagtcatgacagaaatggtgtgtttacacagcttgggtaaagaaggcccttttaaagttttaagcaactgctacatttataaagacaccatccaagtcaagctaatcgacttgagtcaggtaatgtatctagtggttgctgcacaagctaaagctcttccgtcaccagctgccaccatttgggattatatccacaaaaccacctcaattggaatttatggacccaaatatatccatcccagttttactgttgttttaacagtttgtggacacaattatatgccaggacagcttacaatttctgatattaagaagggtggaaaaaacatatctccagttgtgtttcagctctgggggaagcagtcatttttacttgacaagccacaagatttaagtatttctattttttcctgtgatcctgattttgaagtaaagacagaaggagaaaggaaagaaattaaacaaaagcagttggaagcaggtgaagtagttcatcaacaatttttattttctttagttgagcacagagagatgcacttgtttgatttttgtgttcaagtggagcctcccaatggtgaaccagttgcacagttctctatcactactcctgatccaaccccaaacctaaaaagactctcgaatctgccaggctatttgcagaagaaggaggaaatcaagtctgctcctttatcaccaaaaattcttgttaaatatcctacatttcaagataaaacattgaactttagcaactatggggtaaccctgaaggcagtgctaagacaaagcaagattgattacttccttgaatatttcaaaggggacacaatagctctcctcggggaaggtaaggtaaaagctattggtcagtccaaagtgaaagaatggtatgtaggagtcctcagaggtaagattggacttgtacactgcaaaaatgtcaaggtgatttcaaaggagcaagtaatgtttatgtcagatagtgtctttacaaccagaaatcttcttgaacagattgtcctgcctttaaaaaaattgacttatatctactcagttgtattaaccttggtgtcagaaaaagtttatgattggaaagttttagctgatgtcctgggttactcacatctgtccctggaagattttgatcaaattcaagcagacaaagaatcagagaaagtttcttatgttataaagaagttaaaggaagattgccacacagagagaaatacaaggaagtttctgtatgaacttattgtggctcttctgaaaatggattgccaagagttagtcgcacgtctcatccaagaagctgctgttctgacttcagctgtcaagcttggaaaaggctggagggaactagctgaaaagttagtacgactcacaaagcaacaaatggaggcatatgaaattcctcatcgaggaaacactggagatgttgctgttgagatgatgtggaaacctgcctatgattttctgtatacctggagtgctcactatggaaataactacagagatgtgttacaagaccttcagtcagctttggacagaatgaaaaaccctgtgactaaacactggagagaattaactggagttttaatactagtaaattctttggaggttttgagagtaactgcattctccacttctgaggaagtatagaaacaaagcgtgtgtttttgatgggagggaaaatgaggtaatggtgtgtgtgtgtgtgtgtctgtgtgtgtctgtgtgtgtctctgtgtgtctgtgtgtgtgtgtctgtgtgtgtgtgtctgtgtgtgtgtgtgtgtgtgtgtaggaaagaaagaatctcagaaaagcattatattaattttcttcatgctcaaaaccagtttttttttcctgatgaaagcacagcctaactgataaccaagatgggttttatcctcaaatatgtatttttgtgtatgtttcaaatacaagtattaggctgctttgttcttagaaaggaaa

SEQ ID NO: 153146 - DNA, 9159 bp, Homo sapiens
  Payload ID: 10132
  Gene Symbol: MACC1
  Gene Name: metastasis associated in colon cancer 1
  Uniprot ID: Q6ZN28
  ENST ID: ENST00000400331
  CDS Start-End: 310-2868
atgtttgaagagtacccgggtttggtagagtgacttctattcactaaaaccatgtgtctgaactgaagaagcttgggctcacttccacaaatgtagccttgtcagatgatatgcaaatgattcacatcagtgtttgaagttcaaaccaaggaaaactatcagaaaaggcttctgctttctttaaaaaataaaactacttgaaaagaaaaaaatcaagaattagaaagaagagtataacaataaagaaggaggggtcacaggtgaacgagatgtggtcaacacacacaaaggagaacaaaaagtggaaaaatgctaatcactgaaagaaaacattttcggtcaggaagaattgcacaaagtatgtctgaagcaaatttgattgacatggaagctggaaaactctcaaaaagttgcaatattacagaatgccaggacccagacttgcttcacaattggccggatgctttcacccttcgtggtaataatgcttccaaagttgcaaatccattctggaatcaactgtctgcttctaacccatttttggatgacataactcaactaagaaataacaggaagagaaataatatttccatcttaaaggaagatccttttcttttctgtagagaaatagaaaatggaaattcttttgattcctccggtgatgaacttgatgtgcatcagttacttaggcagacttcctcaagaaattctggaagatctaaaagtgtttcagaacttctggacattttagacgacacagcacatgcccatcagagtatacataactctgaccagatcctactacacgacttagagtggcttaaaaatgatcgggaggcttataaaatggcttggttaagtcaacgccagctggcccgctcctgccttgatttgaatacaattagtcagagccctggatgggcccagacacaacttgcggaggtcaccatagcttgcaaagtaaaccatcaaggagggtcagtacaattacctgaatcagacatcactgttcatgtgccccaaggtcatgtggctgtgggagaattccaagaggtgtctctaagggctttccttgatccgccacacatgcttaaccatgatctttcgtgcactgtgagcccgttgttggaaatcatgttaggcaacctcaatacaatggaagcccttttgctggagatgaaaattggggctgaagtaagaaaggatcctttcagccaagtcatgacagaaatggtgtgtttacacagcttgggtaaagaaggcccttttaaagttttaagcaactgctacatttataaagacaccatccaagtcaagctaatcgacttgagtcaggtaatgtatctagtggttgctgcacaagctaaagctcttccgtcaccagctgccaccatttgggattatatccacaaaaccacctcaattggaatttatggacccaaatatatccatcccagttttactgttgttttaacagtttgtggacacaattatatgccaggacagcttacaatttctgatattaagaagggtggaaaaaacatatctccagttgtgtttcagctctgggggaagcagtcatttttacttgacaagccacaagatttaagtatttctattttttcctgtgatcctgattttgaagtaaagacagaaggagaaaggaaagaaattaaacaaaagcagttggaagcaggtgaagtagttcatcaacaatttttattttctttagttgagcacagagagatgcacttgtttgatttttgtgttcaagtggagcctcccaatggtgaaccagttgcacagttctctatcactactcctgatccaaccccaaacctaaaaagactctcgaatctgccaggctatttgcagaagaaggaggaaatcaagtctgctcctttatcaccaaaaattcttgttaaatatcctacatttcaagataaaacattgaactttagcaactatggggtaaccctgaaggcagtgctaagacaaagcaagattgattacttccttgaatatttcaaaggggacacaatagctctcctcggggaaggtaaggtaaaagctattggtcagtccaaagtgaaagaatggtatgtaggagtcctcagaggtaagattggacttgtacactgcaaaaatgtcaaggtgatttcaaaggagcaagtaatgtttatgtcagatagtgtctttacaaccagaaatcttcttgaacagattgtcctgcctttaaaaaaattgacttatatctactcagttgtattaaccttggtgtcagaaaaagtttatgattggaaagttttagctgatgtcctgggttactcacatctgtccctggaagattttgatcaaattcaagcagacaaagaatcagagaaagtttcttatgttataaagaagttaaaggaagattgccacacagagagaaatacaaggaagtttctgtatgaacttattgtggctcttctgaaaatggattgccaagagttagtcgcacgtctcatccaagaagctgctgttctgacttcagctgtcaagcttggaaaaggctggagggaactagctgaaaagttagtacgactcacaaagcaacaaatggaggcatatgaaattcctcatcgaggaaacactggagatgttgctgttgagatgatgtggaaacctgcctatgattttctgtatacctggagtgctcactatggaaataactacagagatgtgttacaagaccttcagtcagctttggacagaatgaaaaaccctgtgactaaacactggagagaattaactggagttttaatactagtaaattctttggaggttttgagagtaactgcattctccacttctgaggaagtatagaaacaaagcgtgtgtttttgatgggagggaaaatgaggtaatggtgtgtgtgtgtgtgtgtctgtgtgtgtctgtgtgtgtctctgtgtgtctgtgtgtgtgtgtctgtgtgtgtgtgtctgtgtgtgtgtgtgtgtgtgtgtaggaaagaaagaatctcagaaaagcattatattaattttcttcatgctcaaaaccagtttttttttcctgatgaaagcacagcctaactgataaccaagatgggttttatcctcaaatatgtatttttgtgtatgtttcaaatacaagtattaggctgctttgttcttagaaaggaaagaaaaaagaaaagtgccctctctctctttcagtgttattttaaatttactaagtcaaagctgtttgaataattacatcacacagatatctgggtaaactagagactatcaacatgatcaaggcagtgttcccaggaggcagctagaaagaggggaagcaagcacacaccctgtggccagtcacggctgcccgctttccacacctgacctcttcagttcatcagtggggttcaccagcatcacccccatttttcatggggagaaactcagaagtggagagaacgtctgaggctacatagccagtacaaagtaggttttctgcttgaaaaacctgtttctatttctttttaaaaaatcatactgcataacagaatagtaaaaacaaaatgcgtgttaagacttacagggaaacagttgccgtttcattttaagtgagacttgctactctttttcatcgtctcttgaaagactgacagaaggaaaatatgacttatcagaaatctgttgtctgcatgcatggacctagtgttttcatcagctcccttcagcatcttgggacctctctaatcctgcctaatttgggactttttctgcaggattgtaatgtaaaatagttctttagctcttggagatttttaataatacgagttattaaaaaccaccaccaccagaaacttgattaacttgattaccctgttgagtagagaggtcttaaccaccgaaaacactgatatctttatgttggcatgctcatgcaaacacatgtgtgtgtgtgtgtgtgtgtgtgtgtgtgtgtgtgtaccacagtgttttataaagcacagcctaattgattatataggacaaaaattgtataggaccctgggtcagtataaatgctaatggctgacaaagttcacaaagagatgtattttgcttactcctctgttcaatcctctggttgcctgccagtgtttatgtgtgtatttggacagacattcatttattgtcattcagtcaataggtagagtatatgtgtctattttttggcaggcatatagatgcttgaggctaatgggaaaaaaccagcatgaactctgactttagtagtgctaagtaatagataattttaaaaaatgacaccgttaaatagaaaatggcatgcatactaacagttgcaatggagaggctgtgatgctacgagatataaacgtagagatgccatcatgtgaaactggaagtgggggtgggtcagggaaatttgttcttggaaagaaataatgaacctcaaggaagagtaggcattgtcctggtgtggtggggtgtaagcggtgatcccacaaagcactgaagctcttagatgggtgggagctgaataggtgcagatagcaggggtgaaggagtgaaaggataaaagattcaaggttgagatgaggatggagcaagaagaagccacattagggccattaaggctgctagaatttagaaagaaaacacacagcctcaaagaaatgtgggtaagccaaagaaggattttgttttgggaacctgaataaaagatgtccatttggctaaaaagtaaaagcagaatctttttagggcttttaatatacccaccctgggatatttggtatgctggcaatggtaattcaaattggcgtttaagaataatcttggccgggcgcgatggctcatgcctgaaatcccagcactttgggaggccgaggcgggcagatcactaggtcaggagatcgagaccatcctggctaacgcggtgaaaccccgtctctactaaaaatacaaaaaattagccgggcgtggtggcaggcgcctgtagtcccagctactcaggaggctgaggcaggagaatggcgtgaacccgggaggcggagcttgcagtgagccgagttcatgccactgcactccagcctgggtgacaggctgtctcaaaaaaaaaaaaaggaataatctgtacggctttcagtatttatatttgattataagggaacacagcctgaccaaataattatgtatacacattcaaggacagaatttattttaattaaaaataaattatgagagaaggaaaaaaaagcacagtttttactttcagaacacagtccttttttgtggtgattttgctttctttagaacattcttggaatcttattaacatgtcagctaaccagagaattttgggaagggatagtggggattaataactgggtttttccaggctccaagatctaagaagacagagatcttgttagctgattagtgtagtaagattaaataaataatttaaggtttacattgcatcatgtattatgattgtgattgagaataataagagtttaaaaaaatgaaaaacaagatctctgtaatttgaggatgaaacaatggttctaatattaatacacacaaatatattttataatcttgtaacaaatccttccaggggaaattttttttttttttttttttttttttttttgagccagagtctggctctgttgcccagactggagtgcggtgtttcaatcttgactcactgcaacctccacctcctgggttcaaaagatccttctgcctccgcctcccaagtagctgggattacaggcatgcaccaccttgtccgggtaatttttgtatttttagtggagacaaggttttaccattttggccagactggtctggaactcctgacctcaggtcatccacctgcctcggcctcccagagtgctaggattacaggcatgagccactgctcccagccttccagaggaattttaagcccatgtccaaacattctgtttgtataaatatattctaatttttaaataaatagtttctacttttctgaactttatattttttcttgctataatggattttcataatcagaaaagattaaattagtaatcatgaattgccttcaatatttggcagtaagtcaatgaaataataaggcacttatataccatctttgacatcattaaaagtatcaaatcccattaatctaaaacttctttaagcattttgaaagcagaaaatgtttacatggttctttcagttcctcaggctttttgtctaatgatgcgtgacttaggataagatttgaattaagtgcccagcttgaaacataataatttttctgtataagccacagatcctctacctcctttgtgttaaagcctttatatgaaacaattaagtagaagcattcaatagtgtgtcattaactgttcatactaataaatggatacagcacattttcatggcctgtaatgtagaacatactatataaagttctcagtttggggatgactaggtttctggaaggaatagaatgctaaatcaatggatggcattgggctgagaaacactgctgctactaatcagccttgaatgtgtaatgtgaacatgcaaaagagaacatgcatacactcaaatttgtacaatgctataactggaagttgaaggacttgaatttttatattgtgctattgttatgttttctgtaattgtttatatctaaggaatttttgaggtaatataaaagaaaaagagaataatgaacaatgatgtcactggagggtttttacattaaattagatcatttttcttcttattcacaataataatcttaatctttaagaattaattataatttaatattataattcataatctttaagaattaataattataatttaatattataattaataatctttaagaattaataatataatttaatattataattaataatctttaagaattaataattacaattaataattaataataatcttaatctttaagaattaataataatccttaatcgcaataataatcgcaaggaggagaagtaagtccctcctccttctgtatgaacttttctcccacatgctgctgtatggtttagtgagagtgaagttctaaagaacatcaatatgattggtgggataatccaaagacattttttcagaatcaaatggcatgtcgaaggtttgtttcttgcatatgtatttactggtccacagcacaaaataaagtgaccacatatacataggaaagttgaatttgtacacatacagcatctgaaatgtatctgatgttcagcatcaagatttcactgaacattgtagaaatgtgtatcttttgcatgtatattttacattgattttctatttatgtacatctagaaagttttaaccctaataaatagttttgtaattttgaataatagtgtcagtttatatgtgagggagtagagacagagaggttagcactggataataattagtaaggccaaaggagaaaatttcatagaaaatattgttgttgtcataatgagtacagcatgaaaggcttcctctacaagacactagtcaaagagttgagagctgcggtttctaatctttgtccattactcccttactccctatgagactgtggacctgtcacttggcctctctggtcttcagttttctcaccagtaaaacaaggaacttgaaccaaatgacctctagtgttccccttgggtttaaatgtctataaatgttcaatgactagaatgtattgcgtttttctttattctttttgctttgagaaaagagaatgtgatttaagagtaataatttgaataccaattatccacattaaaattgtgtcctctatgtgtaaggcatagcacatttagcacacatacataagcacactaagcaccttacaaatatcctcatttattctttacataatcttttgaaattgattatgtaatacacactgtttttgaacaattggtgacttccagctgtttaaaacaaactacagtatggtgcttgagtactgacttaggaggtcagcattggtttcactaggagcttctcaaagcacgctgccaaacatgctccagtctcattgtcaaggccttagaccaggcaatcattacggcagtggttcttcaacttcagcagcagcaaaacgatctggcgggggcttggtgaaacagactgctgggctcgaccaccagaatttctcattcagagggtctggcctgatcacttgcatttctaatcacttcccaggtgatgcagatgtttctggtccagggaccccagtttgagaaccactgtattaaaatttccttcatctctatagaaatggaaagattttttataagtcctctaatttgctttaagataaatgagatttcacttaattctgttggagaaattgttttaaaaattgtgctaaagaaccgaaaatcactttatgttaaggctctatttatagcaagtgaacttttcatgagttaataaaggcctacaaaaataattttgactgtgaaactaattaaaatctctgtgtttcatttaaagcataaacatatttgaataaaaataggttaacaataatttgggacatgtattcagtataattttaagataattttacaaaatatatgtaacattgcatttgtttctgtaaaatatcttcggaaaaagccttgttttccctagtgtgttatttgttgaatttcttgttaaatgtattttttcccattgaaaaaaatgtttttaatcaatgtgatcaatacagctatctatatgccctgctttcactgtagaattagaaagtgttaataaggtgatcggatgttctttctaaggatcatattccacatttaaagagatggtgactgagaagaggtggcaagctgaaccatctcactttgagattgacgtatcacgttttatcctctgccatcatttccttgttaattgtttttctttgggtgattggaagaatctatggcttccttttctctgttcttaaagatatcaagactctgcccttttgtgactggaagtagattttaaatgtccctaatgtttatatgctcacttaaactcaatacatggaatttactggggcatttaacttgttcatgaaaatagagtgagtcattgaaaaatcaaa

SEQ ID NO: 153147 - DNA, 2686 bp, Homo sapiens
  Payload ID: 10132
  Gene Symbol: MACC1
  Gene Name: metastasis associated in colon cancer 1
  Uniprot ID: Q6ZN28
  ENST ID: ENST00000589011
  CDS Start-End: 99-2657
gagattgaaaagtaatggcgtgtgttctaccctcacgattaaaaaggaaaagttctctgtgaatcataatcaaagaatctttgacctgaagtggaaaaatgctaatcactgaaagaaaacattttcggtcaggaagaattgcacaaagtatgtctgaagcaaatttgattgacatggaagctggaaaactctcaaaaagttgcaatattacagaatgccaggacccagacttgcttcacaattggccggatgctttcacccttcgtggtaataatgcttccaaagttgcaaatccattctggaatcaactgtctgcttctaacccatttttggatgacataactcaactaagaaataacaggaagagaaataatatttccatcttaaaggaagatccttttcttttctgtagagaaatagaaaatggaaattcttttgattcctccggtgatgaacttgatgtgcatcagttacttaggcagacttcctcaagaaattctggaagatctaaaagtgtttcagaacttctggacattttagacgacacagcacatgcccatcagagtatacataactctgaccagatcctactacacgacttagagtggcttaaaaatgatcgggaggcttataaaatggcttggttaagtcaacgccagctggcccgctcctgccttgatttgaatacaattagtcagagccctggatgggcccagacacaacttgcggaggtcaccatagcttgcaaagtaaaccatcaaggagggtcagtacaattacctgaatcagacatcactgttcatgtgccccaaggtcatgtggctgtgggagaattccaagaggtgtctctaagggctttccttgatccgccacacatgcttaaccatgatctttcgtgcactgtgagcccgttgttggaaatcatgttaggcaacctcaatacaatggaagcccttttgctggagatgaaaattggggctgaagtaagaaaggatcctttcagccaagtcatgacagaaatggtgtgtttacacagcttgggtaaagaaggcccttttaaagttttaagcaactgctacatttataaagacaccatccaagtcaagctaatcgacttgagtcaggtaatgtatctagtggttgctgcacaagctaaagctcttccgtcaccagctgccaccatttgggattatatccacaaaaccacctcaattggaatttatggacccaaatatatccatcccagttttactgttgttttaacagtttgtggacacaattatatgccaggacagcttacaatttctgatattaagaagggtggaaaaaacatatctccagttgtgtttcagctctgggggaagcagtcatttttacttgacaagccacaagatttaagtatttctattttttcctgtgatcctgattttgaagtaaagacagaaggagaaaggaaagaaattaaacaaaagcagttggaagcaggtgaagtagttcatcaacaatttttattttctttagttgagcacagagagatgcacttgtttgatttttgtgttcaagtggagcctcccaatggtgaaccagttgcacagttctctatcactactcctgatccaaccccaaacctaaaaagactctcgaatctgccaggctatttgcagaagaaggaggaaatcaagtctgctcctttatcaccaaaaattcttgttaaatatcctacatttcaagataaaacattgaactttagcaactatggggtaaccctgaaggcagtgctaagacaaagcaagattgattacttccttgaatatttcaaaggggacacaatagctctcctcggggaaggtaaggtaaaagctattggtcagtccaaagtgaaagaatggtatgtaggagtcctcagaggtaagattggacttgtacactgcaaaaatgtcaaggtgatttcaaaggagcaagtaatgtttatgtcagatagtgtctttacaaccagaaatcttcttgaacagattgtcctgcctttaaaaaaattgacttatatctactcagttgtattaaccttggtgtcagaaaaagtttatgattggaaagttttagctgatgtcctgggttactcacatctgtccctggaagattttgatcaaattcaagcagacaaagaatcagagaaagtttcttatgttataaagaagttaaaggaagattgccacacagagagaaatacaaggaagtttctgtatgaacttattgtggctcttctgaaaatggattgccaagagttagtcgcacgtctcatccaagaagctgctgttctgacttcagctgtcaagcttggaaaaggctggagggaactagctgaaaagttagtacgactcacaaagcaacaaatggaggcatatgaaattcctcatcgaggaaacactggagatgttgctgttgagatgatgtggaaacctgcctatgattttctgtatacctggagtgctcactatggaaataactacagagatgtgttacaagaccttcagtcagctttggacagaatgaaaaaccctgtgactaaacactggagagaattaactggagttttaatactagtaaattctttggaggttttgagagtaactgcattctccacttctgaggaagtatagaaacaaagcgtgtgtttttgatgggaggg

SEQ ID NO: 153148 - DNA, 2777 bp, Homo sapiens
  Payload ID: 10133
  Gene Symbol: MTSS1
  Gene Name: metastasis suppressor 1
  Uniprot ID: O43312
  ENST ID: ENST00000325064
  CDS Start-End: 319-2598
caagatgggctttgccgtttccgtagtgggcaccagtggtggcctgattgtcagtcttctcccggcatttttaaggccaggagccgagcgctgcttgtaggcgaataccctacagagcggtttggctttttaaattactgttattattttgggcagagaacagtcggtctggtgcaccccgtcctcgctgcagaagaggctgcgagtccgaggtgggtctctcggaaggtgaaattccttctggggtgagcgagccccggccccgcgcgcagtccagcggccccgcgtgtgtgccctcgccctgccggagccgggaaaatggaggctgtgattgagaaggaatgcagcgcgctcggaggcctcttccagaccatcatcagcgacatgaaggggagctatccagtttgggaagatttcataaacaaagcaggaaagctgcagtcccagcttcggacaacagtagtagcagcagctgccttcttggacgcctttcagaaagtggctgacatggccaccaacacacgtggtgggaccagggagattggatctgctctcaccaggatgtgcatgaggcacagaagcattgaagccaagctgaggcagttttcgagcgctttaattgattgtctgataaacccacttcaagaacagatggaagaatggaagaaagtggccaaccagctggataaagaccacgcaaaagaatataagaaagcccgccaagagataaaaaagaagtcctcggatacgctgaaactgcagaagaaagcaaaaaaagtggacactcttgggagaggtgatatccagcctcagttggacagtgctctccaagatgtcaatgataagtatctcttattggaagaaacagaaaagcaggctgtccggaaggctttgattgaagaacgtggccgattctgtaccttcatctctatgctgcggccagtgattgaagaagaaatctcaatgctaggggaaataacccaccttcagaccatctcggaagatctaaaaagcctgaccatggaccctcacaaactgccctcctcaagtgaacaggtgattctggacttgaaaggttctgattacagctggtcgtatcagacgccaccctcttcccccagcaccaccatgtccagaaagtccagtgtctgcagcagcctgaacagtgtcaacagcagtgactcccggtccagcggctcccactcgcattcccccagctcacattaccgctaccgcagctccaacctggcccagcaggctcctgtgaggctgtccagcgtgtcctcccatgactcaggattcatatcccaggatgccttccagtccaagtcaccatcccccatgccgccagaggcccccaaccagttgtctaacgggttttctcactatagtttatcaagtgagtcccacgtggggcccacgggtgcaggccttttccctcattgcctgcctgcctcccgcctgctccctcgggtcacctctgtccaccttccagactacgctcattattacaccattgggcccggcatgttcccgtcatctcagatccctagctggaaggactgggctaagcctgggccctatgaccagcctctggtgaacaccctgcagcgccgcaaagagaagcgagaaccggaccccaacgggggaggacccactaccgccagcggcccacctgcagcagctgaggaggctcagagaccacggagcatgactgtatcggctgccaccaggcctggtgaggagatggaggcttgtgaggagctggccctggccctgtctcggggcctgcagctggacacccagaggagcagccgggactcgcttcagtgctccagcggctacagcacccagacaaccaccccctgctgctctgaggacaccatcccttcccaagtttcagattatgattatttctctgtaagtggtgaccaggaggcagatcagcaggagttcgacaagtcctccaccattccaagaaacagcgacatcagccagtcctaccgacggatgttccaagccaagcgtccagcctcaactgctggcctccccaccaccctgggacctgctatggtcactccaggggttgcaactatccgacggaccccttccaccaagccttctgtccgccggggaaccattggagctggtcccatccccatcaagacacccgtgatccctgtcaagaccccaaccgtcccagacctcccaggggtgttgccagcccctccagatgggccagaagagcggggggagcacagccctgagtcgccatctgtgggtgagggcccccaaggtgtcaccagcatgccctcctcaatgtggagcggccaagcttccgttaaccctccacttccaggcccgaagcccagtatccctgaggagcacagacaggcaattccagaaagtgaagctgaagaccaggaacgggaacccccaagtgccactgtctccccaggccagattccagagagtgaccctgcagacctgagcccaagggatactccacaaggagaagacatgctgaacgccatccgaaggggcgtgaaactgaagaagaccacgacaaacgatcgctcagcccctcgcttttcttaggttcacaagaaatgcgccggtggggaatgaactgtttcattaataaaacctaatttgtcttgatccattccactctataataaaacaaaagattttgtaggcaactcggaatatagctcttttgaaagtactcgacacctttagataagaattaaaaccaacctatgtaactgacataa

SEQ ID NO: 153149 - DNA, 4458 bp, Homo sapiens
  Payload ID: 10133
  Gene Symbol: MTSS1
  Gene Name: metastasis suppressor 1
  Uniprot ID: O43312
  ENST ID: ENST00000378017
  CDS Start-End: 64-2256
cccggccccgcgcgcagtccagcggccccgcgtgtgtgccctcgccctgccggagccgggaaaatggaggctgtgattgagaaggaatgcagcgcgctcggaggcctcttccagaccatcatcagcgacatgaaggggagctatccagtttgggaagatttcataaacaaagcaggaaagctgcagtcccagcttcggacaacagtagtagcagcagctgccttcttggacgcctttcagaaagtggctgacatggccaccaacacacgtggtgggaccagggagattggatctgctctcaccaggatgtgcatgaggcacagaagcattgaagccaagctgaggcagttttcgagcgctttaattgattgtctgataaacccacttcaagaacagatggaagaatggaagaaagtggccaaccagctggataaagaccacgcaaaagaatataagaaagcccgccaagagataaaaaagaagtcctcggatacgctgaaactgcagaagaaagcaaaaaaagggagaggtgatatccagcctcagttggacagtgctctccaagatgtcaatgataagtatctcttattggaagaaacagaaaagcaggctgtccggaaggctttgattgaagaacgtggccgattctgtaccttcatctctatgctgcggccagtgattgaagaagaaatctcaatgctaggggaaataacccaccttcagaccatctcggaagatctaaaaagcctgaccatggaccctcacaaactgccctcctcaagtgaacaggtgattctggacttgaaaggttctgattacagctggtcgtatcagacgccaccctcttcccccagcaccaccatgtccagaaagtccagtgtctgcagcagcctgaacagtgtcaacagcagtgactcccggtccagcggctcccactcgcattcccccagctcacattaccgctaccgcagctccaacctggcccagcaggctcctgtgaggctgtccagcgtgtcctcccatgactcaggattcatatcccaggatgccttccagtccaagtcaccatcccccatgccgccagaggcccccaaccagaactcgtccagctcggcctcctccgaagcctcggaaacctgccagtcagtgagcgagtgcagctcccccacctctgtcagctcgggctccaccatgggtgcctgggtgtccacagagaaggactgggctaagcctgggccctatgaccagcctctggtgaacaccctgcagcgccgcaaagagaagcgagaaccggaccccaacgggggaggacccactaccgccagcggcccacctgcagcagctgaggaggctcagagaccacggagcatgactgtatcggctgccaccaggcctggtgaggagatggaggcttgtgaggagctggccctggccctgtctcggggcctgcagctggacacccagaggagcagccgggactcgcttcagtgctccagcggctacagcacccagacaaccaccccctgctgctctgaggacaccatcccttcccaagtttcagattatgattatttctctgtaagtggtgaccaggaggcagatcagcaggagttcgacaagtcctccaccattccaagaaacagcgacatcagccagtcctaccgacggatgttccaagccaagcgtccagcctcaactgctggcctccccaccaccctgggacctgctatggtcactccaggggttgcaactatccgacggaccccttccaccaagccttctgtccgccggggaaccattggagctggtcccatccccatcaagacacccgtgatccctgtcaagaccccaaccgtcccagacctcccaggggtgttgccagcccctccagatgggccagaagagcggggggagcacagccctgagtcgccatctgtgggtgagggcccccaaggtgtcaccagcatgccctcctcaatgtggagcggccaagcttccgttaaccctccacttccaggcccgaagcccagtatccctgaggagcacagacaggcaattccagaaagtgaagctgaagaccaggaacgggaacccccaagtgccactgtctccccaggccagattccagagagtgaccctgcagacctgagcccaagggatactccacaaggagaagacatgctgaacgccatccgaaggggcgtgaaactgaagaagaccacgacaaacgatcgctcagcccctcgcttttcttaggttcacaagaaatgcgccggtggggaatgaactgtttcattaataaaacctaatttgtcttgatccattccactctataataaaacaaaagattttgtaggcaactcggaatatagctcttttgaaagtactcgacacctttagataagaattaaaaccaacctatgtaactgacataatcttgatcttttaatttgtaaatattgacaattttctttctgcacattttaatcttagtttcccttttgatttttctgaaggtgccaaattccatttaacttttttacaagtctttgtaaaattttaaatgcataaagggggttggggcaggggaaccacgaagtagttaattttagaaaaggatttactatacttcactcttctttttttttccccacaagcttttgtagatgcattgtagtagtctagcttagaagcaaatgcaagttattttaatgtacaaactaaatgggtaagaggtaaaatcttcatttaaatatactatgttctggatgaaaagagcaggagtaacaattgatgagcaatattcagagtgaagtaaatctggaaatggtagactgtgttgggattggggggagggccatgggaggggtacatcgtcaacatagccgatcctgttacatttaagagtagcctcgtaggttgaatttcttctggtagcttcatggtaaatgcatccgaataagccatactggattgcagtgtttgtttctgtagggtgtttaaggacttgacttcctttctcccatgattcctctggactgcacacagcacccacaaccagccccatgcatgctgctgcctctgggcagtcgtagaatctcccacttcagtttctcgttgattgtactcacctttatggaatccaaatacatccaaaagggtaaggcagttttaaaaatgtgaaaacatttaaaaatgataatagcagggaattcttagattatagtaaatgccttttacttaactgtgcccagcaggctgggtgcgttaaaaagcccaagtattttgaaaaaactcgaacagatttgacaagggtagccagcttggagtctagcaacttgccaatgtgtttaccaatctgggggcttgtttttcttttcttctttcaaataaatggcagttaactggctttacagtaaacattgaagagaggaggatttgtttattgtcactgggaatctgaccactatactgtcctttttttgtattctgggtaaatgttttttggaaaagatttgtcttttctaagtggaagttaaatttgttatactgcccatcccctaaagccaacagagatttgtagatttaaagggatcacatttgaagacaatagtgtttaagaaagcaagcaagtcccttagcagtcaggtcataacagggcacatttctgaccgaaccctctcaaggcagaggaggagtttggtgggtttcatacaccctgcagattcctgttggctctaaccctcaattacctaatcttatgctttaacacataactgcattggatgtgagagtaacgtaccgtatggtcattgttctatatattaacattgaacactgctgcgattgctcaaggacattttatgttacggctttaaagcaaaggcatgattattagaaactatttaagcttttttctttgaaaaacaagctccttttacagaatataaacaacagtagtgcctgtggtttagcccaccaatcttgatgactaaaagtagctgatgcattgtgcatatgatgcttgagatggtttttgcaaaagcagaaatcgctgcaaggtaatcacaatagataaaagtggtattttaaacctttgaaataaatggatgtaactgtaccttggtacagcttttcacttgtttagtttttaaacgttagtataatctgaataaataaaatgttgccaaattcaatgtagaaagaatgtgacaacacaccttgggtagttctgcttgtgtttttgcatattgtaaaagcagtgtcacagctaaaaagaaagaaatcgtttctaacagtaaattattgtgctttagttgctagtttgtactgagagttgacctctccctgtgcagttttttgttctaaacttgtataaataacaattgtgtaatgtgtctccctcctacattgtaacaattgcttcagcctacgttataaataaagaaccactagatt

SEQ ID NO: 153150 - DNA, 1711 bp, Homo sapiens
  Payload ID: 10133
  Gene Symbol: MTSS1
  Gene Name: metastasis suppressor 1
  Uniprot ID: O43312
  ENST ID: ENST00000431961
  CDS Start-End: 186-1607
gttgtgttggcagaagagttggtgggggttgtgcagtgtgagaagggagaggtgatatccagcctcagttggacagtgctctccaagatgtcaatgataagtatctcttattggaagaaacagaaaagcaggctgtccggaaggctttgattgaagaacgtggccgattctgtaccttcatctctatgctgcggccagtgattgaagaagaaatctcaatgctaggggaaataacccaccttcagaccatctcggaagatctaaaaagcctgaccatggaccctcacaaactgccctcctcaagtgaacaggtgattctggacttgaaaggttctgattacagctggtcgtatcagacgccaccctcttcccccagcaccaccatgtccagaaagtccagtgtctgcagcagcctgaacagtgtcaacagcagtgactcccggtccagcggctcccactcgcattcccccagctcacattaccgctaccgcagctccaacctggcccagcaggctcctgtgaggctgtccagcgtgtcctcccatgactcaggattcatatcccaggatgccttccagtccaagtcaccatcccccatgccgccagaggcccccaaccagcgccgcaaagagaagcgagaaccggaccccaacgggggaggacccactaccgccagcggcccacctgcagcagctgaggaggctcagagaccacggagcatgactgtatcggctgccaccaggcctggtgaggagatggaggcttgtgaggagctggccctggccctgtctcggggcctgcagctggacacccagaggagcagccgggactcgcttcagtgctccagcggctacagcacccagacaaccaccccctgctgctctgaggacaccatcccttcccaagtttcagattatgattatttctctgtaagtggtgaccaggaggcagatcagcaggagttcgacaagtcctccaccattccaagaaacagcgacatcagccagtcctaccgacggatgttccaagccaagcgtccagcctcaactgctggcctccccaccaccctgggacctgctatggtcactccaggggttgcaactatccgacggaccccttccaccaagccttctgtccgccggggaaccattggagctggtcccatccccatcaagacacccgtgatccctgtcaagaccccaaccgtcccagacctcccaggggtgttgccagcccctccagatgggccagaagagcggggggagcacagccctgagtcgccatctgtgggtgagggcccccaaggtgtcaccagcatgccctcctcaatgtggagcggccaagcttccgttaaccctccacttccaggcccgaagcccagtatccctgaggagcacagacaggcaattccagaaagtgaagctgaagaccaggaacgggaacccccaagtgccactgtctccccaggccagattccagagagtgaccctgcagacctgagcccaagggatactccacaaggagaagacatgctgaacgccatccgaaggggcgtgaaactgaagaagaccacgacaaacgatcgctcagcccctcgcttttcttaggttcacaagaaatgcgccggtggggaatgaactgtttcattaataaaacctaatttgtcttgatccattccactctataataaaacaaaagattttgtaggcaa

SEQ ID NO: 153151 - DNA, 788 bp, Homo sapiens
  Payload ID: 10133
  Gene Symbol: MTSS1
  Gene Name: metastasis suppressor 1
  ENST ID: ENST00000522118
  CDS Start-End: 166-788
ggtgggggttgtgcagtgtgagaagggagaggtgatatccagcctcagttggacagtgctctccaagatgtcaatgataagtatctcttattggaagaaacagaaaagcaggctgtccggaaggctttgattgaagaacgtggccgattctgtaccttcatctctatgctgcggccagtgattgaagaagaaatctcaatgctaggggaaataacccaccttcagaccatctcggaagatctaaaaagcctgaccatggaccctcacaaactgccctcctcaagtgaacaggtgattctggacttgaaaggttctgattacagctggtcgtatcagacgccaccctcttcccccagcaccaccatgtccagaaagtccagtgtctgcagcagcctgaacagtgtcaacagcagtgactcccggtccagcggctcccactcgcattcccccagctcacattaccgctaccgcagctccaacctggcccagcaggctcctgtgaggctgtccagcgtgtcctcccatgactcaggattcatatcccaggatgccttccagtccaagtcaccatcccccatgccgccagaggcccccaaccagttgtctaacgggttttctcactatagtttatcaagtgagtcccacgtggggcccacgggtgcaggccttttccctcattgcctgcctgcctcccgcctgctccctcgggtcacctctgtccaccttccagactacgctcattattacaccattgggcccggcatgttcccgtcatctcagatccctag

SEQ ID NO: 153152 - DNA, 2166 bp, Homo sapiens
  Payload ID: 10133
  Gene Symbol: MTSS1
  Gene Name: metastasis suppressor 1
  ENST ID: ENST00000524090
  CDS Start-End: 139-2076
gtgagaaggcaagtcatgaagagttgccccaggacattttccttgtcaggaataagccaggctaaatgtgccctttgggcattgaaaattggaaatggctggtcctagaaaaacagctgccttaaatccttttggggcatgaataaatactttttttacatcctggaaaattgtggttttgactccagcaaggaccccagggaggaggggcacttgttccagaagctggtatttcagcaagccgtgcttgggtctctgttttttgcagggagaggtgatatccagcctcagttggacagtgctctccaagatgtcaatgataagtatctcttattggaagaaacagaaaagcaggctgtccggaaggctttgattgaagaacgtggccgattctgtaccttcatctctatgctgcggccagtgattgaagaagaaatctcaatgctaggggaaataacccaccttcagaccatctcggaagatctaaaaagcctgaccatggaccctcacaaactgccctcctcaagtgaacaggtgattctggacttgaaaggttctgattacagctggtcgtatcagacgccaccctcttcccccagcaccaccatgtccagaaagtccagtgtctgcagcagcctgaacagtgtcaacagcagtgactcccggtccagcggctcccactcgcattcccccagctcacattaccgctaccgcagctccaacctggcccagcaggctcctgtgaggctgtccagcgtgtcctcccatgactcaggattcatatcccaggatgccttccagtccaagtcaccatcccccatgccgccagaggcccccaaccagttgtctaacgggttttctcactatagtttatcaagtgagtcccacgtggggcccacgggtgcaggccttttccctcattgcctgcctgcctcccgcctgctccctcgggtcacctctgtccaccttccagactacgctcattattacaccattgggcccggcatgttcccgtcatctcagatccctagctggaaggactgggctaagcctgggccctatgaccagcctctggtgaacaccctgcagcgccgcaaagagaagcgagaaccggaccccaacgggggaggacccactaccgccagcggcccacctgcagcagctgaggaggctcagagaccacggagcatgactgtatcggctgccaccaggcctggtgaggagatggaggcttgtgaggagctggccctggccctgtctcggggcctgcagctggacacccagaggagcagccgggactcgcttcagtgctccagcggctacagcacccagacaaccaccccctgctgctctgaggacaccatcccttcccaagtttcagattatgattatttctctgtaagtggtgaccaggaggcagatcagcaggagttcgacaagtcctccaccattccaagaaacagcgacatcagccagtcctaccgacggatgttccaagccaagcgtccagcctcaactgctggcctccccaccaccctgggacctgctatggtcactccaggggttgcaactatccgacggaccccttccaccaagccttctgtccgccggggaaccattggagctggtcccatccccatcaagacacccgtgatccctgtcaagaccccaaccgtcccagacctcccaggggtgttgccagcccctccagatgggccagaagagcggggggagcacagccctgagtcgccatctgtgggtgagggcccccaaggtgtcaccagcatgccctcctcaatgtggagcggccaagcttccgttaaccctccacttccaggcccgaagcccagtatccctgaggagcacagacaggcaattccagaaagtgaagctgaagaccaggaacgggaacccccaagtgccactgtctccccaggccagattccagagagtgaccctgcagacctgagcccaagggatactccacaaggagaagacatgctgaacgccatccgaaggggcgtgaaactgaagaagaccacgacaaacgatcgctcagcccctcgcttttcttaggttcacaagaaatgcgccggtggggaatgaactgtttcattaataaaacctaatttgtcttgatccattccactctataataaaacaaaa

SEQ ID NO: 153153 - DNA, 857 bp, Homo sapiens
  Payload ID: 10133
  Gene Symbol: MTSS1
  Gene Name: metastasis suppressor 1
  ENST ID: ENST00000523179
  CDS Start-End: 1-857
agggagaggtgatatccagcctcagttggacagtgctctccaagatgtcaatgataagtatctcttattggaagaaacagaaaagcaggctgtccggaaggctttgattgaagaacgtggccgattctgtaccttcatctctatgctgcggccagtgattgaagaagaaatctcaatgctaggggaaataacccaccttcagaccatctcggaagatctaaaaagcctgaccatggaccctcacaaactgccctcctcaagtgaacaggtgattctggacttgaaaggttctgattacagctggtcgtatcagacgccaccctcttcccccagcaccaccatgtccagaaagtccagtgtctgcagcagcctgaacagtgtcaacagcagtgactcccggtccagcggctcccactcgcattcccccagctcacattaccgctaccgcagctccaacctggcccagcaggctcctgtgaggctgtccagcgtgtcctcccatgactcaggattcatatcccaggatgccttccagtccaagtcaccatcccccatgccgccagaggcccccaaccaggactgggctaagcctgggccctatgaccagcctctggtgaacaccctgcagcgccgcaaagagaagcgagaaccggaccccaacgggggaggacccactaccgccagcggcccacctgcagcagctgaggaggctcagagaccacggagcatgactgtatcggctgccaccaggcctggtgaggagatggaggcttgtgaggagctggccctggccctgtctcggggcctgcagctggacacccagaggagcagccgggactcgcttcagtgctccagcg

SEQ ID NO: 153154 - DNA, 1822 bp, Homo sapiens
  Payload ID: 10133
  Gene Symbol: MTSS1
  Gene Name: metastasis suppressor 1
  ENST ID: ENST00000519168
  CDS Start-End: 1-1630
ctggtcgtatcagacgccaccctcttcccccagcaccaccatgtccagaaagtccagtgtctgcagcagcctgaacagtgtcaacagcagtgactcccggtccagcggctcccactcgcattcccccagctcacattaccgctaccgcagctccaacctggcccagcaggctcctgtgaggctgtccagcgtgtcctcccatgactcaggattcatatcccaggatgccttccagtccaagtcaccatcccccatgccgccagaggcccccaaccagaactcgtccagctcggcctcctccgaagcctcggaaacctgccagtcagtgagcgagtgcagctcccccacctctgtcagctcgggctccaccatgggtgcctgggtgtccacagagaagttgtctaacgggttttctcactatagtttatcaagtgagtcccacgtggggcccacgggtgcaggccttttccctcattgcctgcctgcctcccgcctgctccctcgggtcacctctgtccaccttccagactacgctcattattacaccattgggcccggcatgttcccgtcatctcagatccctagctggaaggactgggctaagcctgggccctatgaccagcctctggtgaacaccctgcagcgccgcaaagagaagcgagaaccggaccccaacgggggaggacccactaccgccagcggcccacctgcagcagctgaggaggctcagagaccacggagcatgactgtatcggctgccaccaggcctggtgaggagatggaggcttgtgaggagctggccctggccctgtctcggggcctgcagctggacacccagaggagcagccgggactcgcttcagtgctccagcggctacagcacccagacaaccaccccctgctgctctgaggacaccatcccttcccaagtttcagattatgattatttctctgtaagtggtgaccaggaggcagatcagcaggagttcgacaagtcctccaccattccaagaaacagcgacatcagccagtcctaccgacggatgttccaagccaagcgtccagcctcaactgctggcctccccaccaccctgggacctgctatggtcactccaggggttgcaactatccgacggaccccttccaccaagccttctgtccgccggggaaccattggagctggtcccatccccatcaagacacccgtgatccctgtcaagaccccaaccgtcccagacctcccaggggtgttgccagcccctccagatgggccagaagagcggggggagcacagccctgagtcgccatctgtgggtgagggcccccaaggtgtcaccagcatgccctcctcaatgtggagcggccaagcttccgttaaccctccacttccaggcccgaagcccagtatccctgaggagcacagacaggcaattccagaaagtgaagctgaagaccaggaacgggaacccccaagtgccactgtctccccaggccagattccagagagtgaccctgcagacctgagcccaagggatactccacaaggagaagacatgctgaacgccatccgaaggggcgtgaaactgaagaagaccacgacaaacgatcgctcagcccctcgcttttcttaggttcacaagaaatgcgccggtggggaatgaactgtttcattaataaaacctaatttgtcttgatccattccactctataataaaacaaaagattttgtaggcaactcggaatatagctcttttgaaagtactcgacacctttagataagaattaaaaccaacctatgtaactgacataatcttgatctttta

SEQ ID NO: 153155 - DNA, 4944 bp, Homo sapiens
  Payload ID: 10133
  Gene Symbol: MTSS1
  Gene Name: metastasis suppressor 1
  Uniprot ID: O43312
  ENST ID: ENST00000518547
  CDS Start-End: 475-2742
gcggccgcagctgcgagcaacagatccggacgccgcgagctgacccgctctgctgttgggcgatttttttttaattgcagaaaaatttattaaattggaaaatcttgcgtttttcaatggcgctggccccgggtcagcgggcgattttctctgcatcaagatgggctttgccgtttccgtagtgggcaccagtggtggcctgattgtcagtcttctcccggcatttttaaggccaggagccgagcgctgcttgtaggcgaataccctacagagcggtttggctttttaaattactgttattattttgggcagagaacagtcggtctggtgcaccccgtcctcgctgcagaagaggctgcgagtccgaggtgggtctctcggaaggtgaaattccttctggggtgagcgagccccggccccgcgcgcagtccagcggccccgcgtgtgtgccctcgccctgccggagccgggaaaatggaggctgtgattgagaaggaatgcagcgcgctcggaggcctcttccagaccatcatcagcgacatgaaggggagctatccagtttgggaagatttcataaacaaagcaggaaagctgcagtcccagcttcggacaacagtagtagcagcagctgccttcttggacgcctttcagaaagtggctgacatggccaccaacacacgtggtgggaccagggagattggatctgctctcaccaggatgtgcatgaggcacagaagcattgaagccaagctgaggcagttttcgagcgctttaattgattgtctgataaacccacttcaagaacagatggaagaatggaagaaagtggccaaccagctggataaagaccacgcaaaagaatataagaaagcccgccaagagataaaaaagaagtcctcggatacgctgaaactgcagaagaaagcaaaaaaagggagaggtgatatccagcctcagttggacagtgctctccaagatgtcaatgataagtatctcttattggaagaaacagaaaagcaggctgtccggaaggctttgattgaagaacgtggccgattctgtaccttcatctctatgctgcggccagtgattgaagaagaaatctcaatgctaggggaaataacccaccttcagaccatctcggaagatctaaaaagcctgaccatggaccctcacaaactgccctcctcaagtgaacaggtgattctggacttgaaaggttctgattacagctggtcgtatcagacgccaccctcttcccccagcaccaccatgtccagaaagtccagtgtctgcagcagcctgaacagtgtcaacagcagtgactcccggtccagcggctcccactcgcattcccccagctcacattaccgctaccgcagctccaacctggcccagcaggctcctgtgaggctgtccagcgtgtcctcccatgactcaggattcatatcccaggatgccttccagtccaagtcaccatcccccatgccgccagaggcccccaaccagttgtctaacgggttttctcactatagtttatcaagtgagtcccacgtggggcccacgggtgcaggccttttccctcattgcctgcctgcctcccgcctgctccctcgggtcacctctgtccaccttccagactacgctcattattacaccattgggcccggcatgttcccgtcatctcagatccctagctggaaggactgggctaagcctgggccctatgaccagcctctggtgaacaccctgcagcgccgcaaagagaagcgagaaccggaccccaacgggggaggacccactaccgccagcggcccacctgcagcagctgaggaggctcagagaccacggagcatgactgtatcggctgccaccaggcctggtgaggagatggaggcttgtgaggagctggccctggccctgtctcggggcctgcagctggacacccagaggagcagccgggactcgcttcagtgctccagcggctacagcacccagacaaccaccccctgctgctctgaggacaccatcccttcccaagtttcagattatgattatttctctgtaagtggtgaccaggaggcagatcagcaggagttcgacaagtcctccaccattccaagaaacagcgacatcagccagtcctaccgacggatgttccaagccaagcgtccagcctcaactgctggcctccccaccaccctgggacctgctatggtcactccaggggttgcaactatccgacggaccccttccaccaagccttctgtccgccggggaaccattggagctggtcccatccccatcaagacacccgtgatccctgtcaagaccccaaccgtcccagacctcccaggggtgttgccagcccctccagatgggccagaagagcggggggagcacagccctgagtcgccatctgtgggtgagggcccccaaggtgtcaccagcatgccctcctcaatgtggagcggccaagcttccgttaaccctccacttccaggcccgaagcccagtatccctgaggagcacagacaggcaattccagaaagtgaagctgaagaccaggaacgggaacccccaagtgccactgtctccccaggccagattccagagagtgaccctgcagacctgagcccaagggatactccacaaggagaagacatgctgaacgccatccgaaggggcgtgaaactgaagaagaccacgacaaacgatcgctcagcccctcgcttttcttaggttcacaagaaatgcgccggtggggaatgaactgtttcattaataaaacctaatttgtcttgatccattccactctataataaaacaaaagattttgtaggcaactcggaatatagctcttttgaaagtactcgacacctttagataagaattaaaaccaacctatgtaactgacataatcttgatcttttaatttgtaaatattgacaattttctttctgcacattttaatcttagtttcccttttgatttttctgaaggtgccaaattccatttaacttttttacaagtctttgtaaaattttaaatgcataaagggggttggggcaggggaaccacgaagtagttaattttagaaaaggatttactatacttcactcttctttttttttccccacaagcttttgtagatgcattgtagtagtctagcttagaagcaaatgcaagttattttaatgtacaaactaaatgggtaagaggtaaaatcttcatttaaatatactatgttctggatgaaaagagcaggagtaacaattgatgagcaatattcagagtgaagtaaatctggaaatggtagactgtgttgggattggggggagggccatgggaggggtacatcgtcaacatagccgatcctgttacatttaagagtagcctcgtaggttgaatttcttctggtagcttcatggtaaatgcatccgaataagccatactggattgcagtgtttgtttctgtagggtgtttaaggacttgacttcctttctcccatgattcctctggactgcacacagcacccacaaccagccccatgcatgctgctgcctctgggcagtcgtagaatctcccacttcagtttctcgttgattgtactcacctttatggaatccaaatacatccaaaagggtaaggcagttttaaaaatgtgaaaacatttaaaaatgataatagcagggaattcttagattatagtaaatgccttttacttaactgtgcccagcaggctgggtgcgttaaaaagcccaagtattttgaaaaaactcgaacagatttgacaagggtagccagcttggagtctagcaacttgccaatgtgtttaccaatctgggggcttgtttttcttttcttctttcaaataaatggcagttaactggctttacagtaaacattgaagagaggaggatttgtttattgtcactgggaatctgaccactatactgtcctttttttgtattctgggtaaatgttttttggaaaagatttgtcttttctaagtggaagttaaatttgttatactgcccatcccctaaagccaacagagatttgtagatttaaagggatcacatttgaagacaatagtgtttaagaaagcaagcaagtcccttagcagtcaggtcataacagggcacatttctgaccgaaccctctcaaggcagaggaggagtttggtgggtttcatacaccctgcagattcctgttggctctaaccctcaattacctaatcttatgctttaacacataactgcattggatgtgagagtaacgtaccgtatggtcattgttctatatattaacattgaacactgctgcgattgctcaaggacattttatgttacggctttaaagcaaaggcatgattattagaaactatttaagcttttttctttgaaaaacaagctccttttacagaatataaacaacagtagtgcctgtggtttagcccaccaatcttgatgactaaaagtagctgatgcattgtgcatatgatgcttgagatggtttttgcaaaagcagaaatcgctgcaaggtaatcacaatagataaaagtggtattttaaacctttgaaataaatggatgtaactgtaccttggtacagcttttcacttgtttagtttttaaacgttagtataatctgaataaataaaatgttgccaaattcaatgtagaaagaatgtgacaacacaccttgggtagttctgcttgtgtttttgcatattgtaaaagcagtgtcacagctaaaaagaaagaaatcgtttctaacagtaaattattgtgctttagttgctagtttgtactgagagttgacctctccctgtgcagttttttgttctaaacttgtataaataacaattgtgtaatgtgtctccctcctacattgtaacaattgcttcagcctacgttataaataaagaaccactagatt

SEQ ID NO: 153156 - DNA, 553 bp, Homo sapiens
  Payload ID: 10133
  Gene Symbol: MTSS1
  Gene Name: metastasis suppressor 1
  ENST ID: ENST00000522162
  CDS Start-End: 1-553
tttccctcgggggctcaaggcactggctgcaagttttcccattgtctgtccctgaagggagctatccagtttgggaagatttcataaacaaagcaggaaagctgcagtcccagcttcggacaacagtagtagcagcagctgccttcttggacgcctttcagaaagtggctgacatggccaccaacacacgtggtgggaccagggagattggatctgctctcaccaggatgtgcatgaggcacagaagcattgaagccaagctgaggcagttttcgagcgctttaattgattgtctgataaacccacttcaagaacagatggaagaatggaagaaagtggccaaccagctggataaagaccacgcaaaagaatataagaaagcccgccaagagataaaaaagaagtcctcggatacgctgaaactgcagaagaaagcaaaaaaagggagaggtgatatccagcctcagttggacagtgctctccaagatgtcaatgataagtatctcttattggaagaaacagaaaagcaggctgtccggaaggctttgattga

SEQ ID NO: 153157 - DNA, 4992 bp, Homo sapiens
  Payload ID: 10134
  Gene Symbol: MTSS1L
  Gene Name: metastasis suppressor 1-like
  Uniprot ID: Q765P7
  ENST ID: ENST00000338779
  CDS Start-End: 276-2519
taccgccgccgtcagtccccgcgccgaggctgcgccgcgagctgcccgcgccgcgccccccgcgccgcccgccagccccgctgcgacatggcccgcgccgcccgccggaggcccgcgaccccggagcgcggcgcggccggccgctgagcgcagcctggaggcgggaggcccggcccggcctcggagcgagcgcccgcgcggcctggccccctcccttgcgctgctccccgcgctccgtgcgcctagccgccgccgcggcccggcccagccagagcatggagacggcggagaaggagtgcggcgccctgggcgggctcttccaggccatagtcaacgacatgaagagctcctaccctatctgggaggacttcaactccaaggccacgaagctgcattcccagctgaggaccaccgtgctggctgctgtggccttcctggatgccttccagaaagtggctgacatggctaccaacacccgaggggccacgagggacatcggctcggcgctcacacgcatgtgcatgcgccaccgcagcatcgagaccaagctgcggcagttcaccaacgcactgctggagagcctcatcaacccgctgcaggagcgcatcgaggactggaagaaggcggccaaccagctggacaaggaccacgcgaaagagtacaaacgagcccggcatgagatcaaaaagaagtcgtcggacacgctgaagctgcagaagaaggcgcgcaaagagctacttgggaaaggagacctgcagccccagctggacagtgccctgcaggacgtcaacgacatgtacctgctgctggaggagacggagaagcaggccgtgcgccgggcgctgatcgaggagcggggccgcttctgcaccttcatcaccttcctgcagcctgtggtgaatggagagctgaccatgctgggagagatcacccacctgcagggcatcatcgacgacttggtggtgctgacagcagaaccccacaaactgcctcccgccagcgagcaggtaatcaaagacctaaagggctcggactacagctggtcctaccagaccccaccctcatcacccagcagctccagctcccggaagtccagcatgtgcagtgcccccagcagcagtagcagtgccaagggtggcggagccccatggcctgggggtgcccaaacatactcacccagttccacctgtcgctaccgcagcctggcgcagccagccaccaccaccgctcgcctctccagcgtttcctcccatgactctggcttcgtctcccaggacgccacctactccaagcccccctcgcctatgccttcagacatcaccagccagaagtcctccagctctgcatcttccgaggcctcggaaacctgccagtccgttagcgagtgcagctcccccacctcggactggtccaaggtcggctcccatgagcagccctcaggcgccactctgcagcggaggaaggaccgagtggagctcctgcgagacacagagccaggccctgccagtgggggcaccctgggccccagcggggaagaggcaccgcgaccccggatgtcccctgccaccatcgcagccaagcacggtgaggaggtgtcccccgccgccagtgacctggccatggtgctgacgcggggcctgagcctggagcaccagaagagcagccgggactcgctgcagtactccagcggctacagcacgcagaccaccacgccctcctgctctgaggacaccatcccctcccaaggctccgactacgactgctactccgtgaatggggatgcggacagcgagggcccgcccgagtttgacaagtcatccaccatcccgcgcaacagcaacatcgcccagaactaccgccgcctgatccagaccaagcgcccagcctccactgctgggctgcccaccgcggggctgcccacggccactggcctgccctcgggcgcaccccccggcgtggccaccatccgccgcacaccctccaccaagcccaccgtgcgccgcgccctgtccagcgctggccccatccccatccggccgcccatcgtccctgtgaagacgcccacggtgcctgactcccccggctacatggggcccacacgggcgggcagtgaggagtgcgtcttctataccgacgagaccgcctcacccctggcaccggacctcgccaaggcctccccaaagaggctcagcctgcccaacacagcctggggcagcccatccccagaggcagccgggtaccccggggcaggggccgaggacgagcagcagcagctggcggccaaccggcacagcctggtggagaagctgggggagctggtggcgggtgcccacgcactgggtgagggccagttccccttccccactgctctgtcggccacccccacggaggagacgcccaccccacccccagccgccaccagcgaccccccggccgaagacatgctggtggccatccggcgtggggtccggctccgcaggaccgtcaccaacgacaggtcggcgccccgcatcttatgatggcgccaccctccccatcctctcaggccccagtgcgagcaggtggcctggtctgtgagccgcaggcactcagagcaaaggcccagccaggagagaggacagagccagggcagaggccatgccactttatggaaagacacctcacttggattccagcatttaaacaggaagtgacttcttagcaagcctggccaggacggagcctgcaggcctgggcctggttcggggtctgttttatgctcttcggtccctcctcttcctcctctggggccctgcctcttccctacccataagcaccagagccagggccgctgcccatgacagaggggccaggctggcctccctttcaccatcccggcctctcccagggctggtcctgcctcagctcctcctggaatgctggcccccctctcccctgcctgagccccctcctcccctcttgccttctctctgcctctcccaggcccctctccctccaggaggcggggcggctgtggaggggccaggtgcacgctgggctggatgtctgctgggggctgggggccagggcggcaggttggagttgggcggccaggccccccgtgtgggaagggagttccagggcccacgccaagtctcagggaggaaaccaggggctgcttgggggggggggtcttgggggccctgtggtggctcccacccctcgcctcccccaccccgtgaggctggctggagggggccagagcagctctttggaaactagggcagcagggttaggaggccggaggccctggggtcaccggccagccacacaggcaccgttttcagatgtccacttctcattgggtacatcaatcttttaactttgggggtcacagttttagccacctttcggggggtgactggagcagtaggaggtgtggggtcattttatgaatataataaaatggagctgactgtggacgaggactaagtgtgggggagaggggacgatacagggtgtgtgtctgggagtgcctgggggacagggaccccccggtggtcctatggcaggatgagaagggagggacttggctcccccagagcccggtggaagctactgttctctccagtgtctcgagcgtagccaaaataaggttgggaggctcccggcctgtctgctgtggtctgagctggctgcaagcccaggtgggggagcgagtctgggaagattggctttgactctctgttgccggaggagatgccatcccagcacggcccccactgtagtccaggctcgtggtggcagcgggggcaaggggaggggcaaggctgcccccaccccacgcaccaagtcacgccaagtctcagcaggtaaaagcacgtgagcctagggcgagcggagggagtcctggtggccccgcaggtcaggagggaaagcagggctcagagggcatcgtggccccagggcagggtcctacctgggggtcaggagcaccttggtcttgatgattgattgattgattgatagaatggagctgggtctgagcctcccaggcttgagctcctgggagttcttgtgcggtgagctgggcagctcctgggtaggtccgggcaccaagcaggccctgatgtggacagagtcccatcagagggagctgatgaagaatggtccctgtaagtaagtcactaggttcaacaactgcctggccgagcactcagcccgtggagctcaggccaacaccagagccccggttttaggggccaggagagcaggtgaccaattatttggggagtcttgggtagaatttccgccacacattctccccagggctgcaggggtcttccgaggcagggcggtggagcaggattcaggatgtggtgggaatagagtgaggggcagtgggtgggcagacctgggcgtcagaggtcctgatgggaaaggaggcaggggctacccagagaggggggctcgtgtggcacagcccccaccgactccgccgtccccctcccctgtgagccccgggggctgtacatactctactccatccccttgtccatccctgagaccacccccgccgcccttgcgtcgacttagcaaccacctcataggcccacccacctcgggatccgagccaaccatcccacatcacaaactttggtttgggggactttacgttcgtttaatttctcattttgtacggagaaatattcttttcaaaagcgtcttttgactgaagtaactttcctggtgctgttgttaactcgttcctttttttaatttattcccccaccccaggcagccctcctggttcctactcaccctccccccctcccccaccctccgtcccatctgaaccatttgtttcttttctttccgtcagattttggaaaaattctcctctcctccccgccccctccacaccatcctccccgatttaaatatagtcactgctacaagtaacagatgcactgtgaagattccagtattaataaaggtgtactgtaattaaca

SEQ ID NO: 153158 - DNA, 407 bp, Homo sapiens
  Payload ID: 10134
  Gene Symbol: MTSS1L
  Gene Name: metastasis suppressor 1-like
  ENST ID: ENST00000562883
  CDS Start-End: 1-407
ggagacggagaagcaggccgtgcgccgggcgctgatcgaggagcggggccgcttctgcaccttcatcaccttcctgcagcctgtggtgaatggagagctgaccatgctgggagagatcacccacctgcagggcatcatcgacgacttggtggtgctgacagcagaaccccacaaactgcctcccgccagcgagcaggtaatcaaagacctaaagggctcggactacagctggtcctaccagaccccaccctcatcacccagcagctccagctcccggaagtccagcatgtgcagcctggcgcagccagccaccaccaccgctcgcctctccagcgtttcctcccatgactctggcttcgtctcccaggacgccacctactccaagcccccctcgcctatgccttcag

SEQ ID NO: 153159 - DNA, 518 bp, Homo sapiens
  Payload ID: 10134
  Gene Symbol: MTSS1L
  Gene Name: metastasis suppressor 1-like
  ENST ID: ENST00000576338
  CDS Start-End: 1-518
cacgcatgtgcatgcgccaccgcagcatcgagaccaagctgcggcagttcaccaacgcactgctggagagcctcatcaacccgctgcaggagcgcatcgaggactggaagaaggcggccaaccagctggacaaggaccacgcgaaagagtacaaacgagcccggcatgagatcaaaaagaagtcgtcggacacgctgaagctgcagaagaaggcgcgcaaagggaaaggagacctgcagccccagctggacagtgccctgcaggacgtcaacgacatgtacctgctgctggaggagacggagaagcaggccgtgcgccgggcgctgatcgaggagcggggccgcttctgcaccttcatcaccttcctgcagcctgtggtgaatggagagctgaccatgctgggagagatcacccacctgcagggcatcatcgacgacttggtggtgctgacagcagaaccccacaaactgcctcccgccagcgagcaggtaatcaaagacctaaagggctcggactac

SEQ ID NO: 153160 - DNA, 2241 bp, Homo sapiens
  Payload ID: 10134
  Gene Symbol: MTSS1L
  Gene Name: metastasis suppressor 1-like
  ENST ID: ENST00000616026
  CDS Start-End: 1-2241
atggagacggcggagaaggagtgcggcgccctgggcgggctcttccaggccatagtcaacgacatgaagagctcctaccctatctgggaggacttcaactccaaggccacgaagctgcattcccagctgaggaccaccgtgctggctgctgtggccttcctggatgccttccagaaagtggctgacatggctaccaacacccgaggggccacgagggacatcggctcggcgctcacacgcatgtgcatgcgccaccgcagcatcgagaccaagctgcggcagttcaccaacgcactgctggagagcctcatcaacccgctgcaggagcgcatcgaggactggaagaaggcggccaaccagctggacaaggaccacgcgaaagagtacaaacgagcccggcatgagatcaaaaagaagtcgtcggacacgctgaagctgcagaagaggcgcgcaaaggtaccagggaaaggagacctgcagccccagctggacagtgccctgcaggacgtcaacgacatgtacctgctgctggaggagacggagaagcaggccgtgcgccgggcgctgatcgaggagcggggccgcttctgcaccttcatcaccttcctgcagcctgtggtgaatggagagctgaccatgctgggagagatcacccacctgcagggcatcatcgacgacttggtggtgctgacagcagaaccccacaaactgcctcccgccagcgagcaggtaatcaaagacctaaagggctcggactacagctggtcctaccagaccccaccctcatcacccagcagctccagctcccggaagtccagcatgtgcagtgcccccagcagcagtagcagtgccaagggtggcggagccccatggcctgggggtgcccaaacatactcacccagttccacctgtcgctaccgcagcctggcgcagccagccaccaccaccgctcgcctctccagcgtttcctcccatgactctggcttcgtctcccaggacgccacctactccaagcccccctcgcctatgccttcagacatcaccagccagaagtcctccagctctgcatcttccgaggcctcggaaacctgccagtccgttagcgagtgcagctcccccacctcggactggtccaaggtcggctcccatgagcagccctcaggcgccactctgcagcggaggaaggaccgagtggagctcctgcgagacacagagccaggccctgccagtgggggcaccctgggccccagcggggaagaggcaccgcgaccccggatgtcccctgccaccatcgcagccaagcacggtgaggaggtgtcccccgccgccagtgacctggccatggtgctgacgcggggcctgagcctggagcaccagaagagcagccgggactcgctgcagtactccagcggctacagcacgcagaccaccacgccctcctgctctgaggacaccatcccctcccaaggctccgactacgactgctactccgtgaatggggatgcggacagcgagggcccgcccgagtttgacaagtcatccaccatcccgcgcaacagcaacatcgcccagaactaccgccgcctgatccagaccaagcgcccagcctccactgctgggctgcccaccgcggggctgcccacggccactggcctgccctcgggcgcaccccccggcgtggccaccatccgccgcacaccctccaccaagcccaccgtgcgccgcgccctgtccagcgctggccccatccccatccggccgcccatcgtccctgtgaagacgcccacggtgcctgactcccccggctacatggggcccacacgggcgggcagtgaggagtgcgtcttctataccgacgagaccgcctcacccctggcaccggacctcgccaaggcctccccaaagaggctcagcctgcccaacacagcctggggcagcccatccccagaggcagccgggtaccccggggcaggggccgaggacgagcagcagcagctggcggccaaccggcacagcctggtggagaagctgggggagctggtggcgggtgcccacgcactgggtgagggccagttccccttccccactgctctgtcggccacccccacggaggagacgcccaccccacccccagccgccaccagcgaccccccggccgaagacatgctggtggccatccggcgtggggtccggctccgcaggaccgtcaccaacgacaggtcggcgccccgcatcttatga

SEQ ID NO: 153161 - DNA, 1589 bp, Homo sapiens
  Payload ID: 10135
  Gene Symbol:
  Gene Name: Metastasis-associated lung adenocarcinoma transcript 1  [Source:UniProtKB/Swiss-Prot
  Acc:Q9UHZ2]
  Uniprot ID: Q9UHZ2
  ENST ID: ENST00000625158
  CDS Start-End: 806-979
ctaataaaaatagtttattattttgaatgatttaatggttttctacacaatttacatcacaacatgtaaattttagcagtaacatctgattctaacagcacatcatgctattcctttcatagagccttcagagattcaatgctaaacaaatttccttagttggcatcaaggcactgatcactttagaggcttttaagaaattatttaaagatgcaaatgcctctgagtgaagtgtactatcccatcactgaagcccacaggaacaagtcctacaattttaaaaaggctcgatggaaaaatttctcaatcctgaaatcccctagggaaggggtcaggagaaagtgccatggttgatatttaagaactccacagctcttaaaaataagcacttatccctaacatgcaatactgcagatgcaagttaaacttatctgttaacagctgcctgctgttttctgctcccagatgaaatgaagcaactcttctgataacgaagagatacctgtctgaggcaaacgaaacattggcacacagcacagcctcctcaatccacttgatcccaactcatctctcatttatttcggcttcttttattccaggattaatgtagtgtaacattttcatttcttttcgcttttattctgcttttgtaaaagcagtattttgagatggacattgcctcttcattgtatttctcatcaattcattatttttgtggttatagcttgacaagcaattaactttaaaatggtagattccgtaactttaaattggtagctttcatttgcttaaaattttttggcatatgcagataatgttctcatcagtagtaagaatctcagggttatgcttattccccaatggaggtatgacatataatcttttctgcctttacttatcaattcaccaaggagctgttttctctgcatctaggccatcatactgccaggctggttatgactcagaagatgttatctgaaaaaagtctatagaaaaaaaaaaagtttcccctccctcatcaacaaaagcccaccctctaagagacattcaagctgaactatcacaattcttaatcagttacaatttacaaacagataagtttaaaataaacaatttacaaaatttttgaagcataccttaacatcttgttttgcagttaaacaatggaaaagtatttctcctacactaaaaaaaaacttgcttacacacaactgaaaatagaatcttacttgataatacaaaagctaccatcagaagaaatcccttcaggatcattaagccacttcctttgctctgcagtttctatagtagttttaaattattattaaatcacctgaaaaaaattccaaaagagaaccacacactaccatatccaaacaacttttgcatttcccataattgtagttaatgtcagcccagtaggccagaccaacccccagttcaatactttccttccccaaaagctctatactttgaaggaaaacagatacagtatcaaattatgacactttccttgcccaaattaatgcactggtacacccagtggctcatatttaacttcccccagcttcccaattcaaactgggggg

SEQ ID NO: 153162 - DNA, 1441 bp, Homo sapiens
  Payload ID: 10136
  Gene Symbol: MTX1
  Gene Name: metaxin 1
  ENST ID: ENST00000316721
  CDS Start-End: 9-1316
tggaaaacatgctgctcgggggacccccccgcagtccccgctcggggacgagccccaaggggccctggagcagtacaggccacgtgcagtttggcaagagcccccagacctggcccaggcgcacaagaccccgctctccagagcctgccgcgccttcaggggttcggggctccacttggacgaggcgccgtgactctccgaggcgcgccgggccgacagcgctgtcccgctacgtgggccacctctggatgggccggcggccgccctcccccgaggcccgcggcccagtcccccgcagttcagctgccagtcgggccagaagaagcctcgcctccccggggatctccccaggccccctgaccgcaacgatcggaggggcggtggcggggggcgggcccaggcaggggagggcagaagcacacaaggaagtgtttccgggacagagggtgggcaagatggcggcgcccatggagctgttctgctggtcagggggctgggggctgccgtcagtggacctggacagcctggccgtgctgacctatgccagatttactggtgctccactgaaggtacacaagatcagcaacccctggcagagcccttcaggaactctgcctgcccttcggaccagtcatggagaggtcatctcagttccacacaagatcatcacccaccttcgaaaagaggtacatactttttggatagacaccaagaactacgtggaagtgacccggaagtggtatgcagaggctatgccctttcccctcaacttcttcctgcctggccgcatgcagcggcagtacatggaacggctacagctgctgactggggagcacaggcctgaggacgaggaagagctggagaaggagctgtaccgagaggctcgggagtgtctgaccctgctctctcagcgcctgggctctcaaaagttcttctttggagatgcccctgcctccttggacgccttcgtcttcagctacttggccctgctgctgcaggcaaagctgcccagtgggaagctgcaggtccacctgcgtgggctgcacaacctctgtgcctattgtacccacattctcagtctctacttcccctgggatggagctgaggtaccaccgcaacgccagacaccagcaggcccagagactgaggaggagccataccggcgccggaaccagatcctatctgtgctggcaggactggcagccatggtgggctacgccttgctcagcggcattgtctccatccagcgggcaacgcctgctcgggccccaggcacccggaccctgggcatggctgaggaggatgaagaggaatgatttgtcctcacgctcccaagactggtttttctactctcatgcattccagaggcccccgtgcctcctcgttgttggtacagccggacacggggtgctgccacccagaataaagccactcacactga

SEQ ID NO: 153163 - DNA, 1632 bp, Homo sapiens
  Payload ID: 10136
  Gene Symbol: MTX1
  Gene Name: metaxin 1
  ENST ID: ENST00000368376
  CDS Start-End: 107-1507
aagccccagcccggcctccgctccggccgccgccaccgcccctgttttgtttccatggcgacaggcggcgcagggcccgctccaaacataacgcgctgtggaaaacatgctgctcgggggacccccccgcagtccccgctcggggacgagccccaaggggccctggagcagtacaggccacgtgcagtttggcaagagcccccagacctggcccaggcgcacaagaccccgctctccagagcctgccgcgccttcaggggttcggggctccacttggacgaggcgccgtgactctccgaggcgcgccgggccgacagcgctgtcccgctacgtgggccacctctggatgggccggcggccgccctcccccgaggcccgcggcccagtcccccgcagttcagctgccagtcgggccagaagaagcctcgcctccccggggatctccccaggccccctgaccgcaacgatcggaggggcggtggcggggggcgggcccaggcaggggagggcagaagcacacaaggaagtgtttccgggacagagggtgggcaagatggcggcgcccatggagctgttctgctggtcagggggctgggggctgccgtcagtggacctggacagcctggccgtgctgacctatgccagatttactggtgctccactgaaggtacacaagatcagcaacccctggcagagcccttcaggaactctgcctgcccttcggaccagtcatggagaggtcatctcagttccacacaagatcatcacccaccttcgaaaagagaagtacaatgctgattatgatctgtcagctcggcaaggggcagacaccctggccttcatgtctctcctggaggagaagttgctcccggtgctggtacatactttttggatagacaccaagaactacgtggaagtgacccggaagtggtatgcagaggctatgccctttcccctcaacttcttcctgcctggccgcatgcagcggcagtacatggaacggctacagctgctgactggggagcacaggcctgaggacgaggaagagctggagaaggagctgtaccgagaggctcgggagtgtctgaccctgctctctcagcgcctgggctctcaaaagttcttctttggagatgcccctgcctccttggacgccttcgtcttcagctacttggccctgctgctgcaggcaaagctgcccagtgggaagctgcaggtccacctgcgtgggctgcacaacctctgtgcctattgtacccacattctcagtctctacttcccctgggatggagctgaggtaccaccgcaacgccagacaccagcaggcccagagactgaggaggagccataccggcgccggaaccagatcctatctgtgctggcaggactggcagccatggtgggctacgccttgctcagcggcattgtctccatccagcgggcaacgcctgctcgggccccaggcacccggaccctgggcatggctgaggaggatgaagaggaatgatttgtcctcacgctcccaagactggtttttctactctcatgcattccagaggcccccgtgcctcctcgttgttggtacagccggacacggggtgctgccacccagaataaagccactcacactga

SEQ ID NO: 153164 - DNA, 946 bp, Homo sapiens
  Payload ID: 10136
  Gene Symbol: MTX1
  Gene Name: metaxin 1
  ENST ID: ENST00000424959
  CDS Start-End: 15-377
agagggtgggcaagatggcggcgcccatggagctgttctgctggtcagggggctgggggctgccgtcagtggacctggacagcctggccgtgctgacctatgccagatttactggtgctccactgaaggtacacaagatcagcaacccctggcagagcccttcaggtacccagtatcccttgggggaactctgcctgcccttcggaccagtcatggagaggtcatctcagttccacacaagatcatcacccaccttcgaaaagagaagtacaatgctgattatgatctgtcagctcggcaaggggcagacaccctggccttcatgtctctcctggaggagaagttgctcccggtgctggtacatactttttggatagacaccaagaactacgtggaagtgacccggaagtggtatgcagaggctatgccctttcccctcaacttcttcctgcctggccgcatgcagcggcagtacatggaacggctacagctgctgactggggagcacaggcctgaggacgaggaagagctggagaaggagctgtaccgagaggctcgggagtgtctgaccctgctctctcagcgcctgggctctcaaaagttcttctttggagatgcccctgcctccttggacgccttcgtcttcagctacttggccctgctgctgcaggcaaagctgcccagtgggaagctgcaggtccacctgcgtgggctgcacaacctctgtgcctattgtacccacattctcagtctctacttcccctgggatggagctgaggtaccaccgcaacgccagacaccagcaggcccagagactgaggaggagccataccggcgccggaaccagatcctatctgtgctggcaggactggcagccatggtgggctacgccttgctcagcggcattgtctccatccagcgggcaacgcctgctcgggccccaggc

SEQ ID NO: 153165 - DNA, 1085 bp, Homo sapiens
  Payload ID: 10136
  Gene Symbol: MTX1
  Gene Name: metaxin 1
  Uniprot ID: Q13505
  ENST ID: ENST00000609421
  CDS Start-End: 6-959
gcaagatggcggcgcccatggagctgttctgctggtcagggggctgggggctgccgtcagtggacctggacagcctggccgtgctgacctatgccagatttactggtgctccactgaaggtacacaagatcagcaacccctggcagagcccttcaggaactctgcctgcccttcggaccagtcatggagaggtcatctcagttccacacaagatcatcacccaccttcgaaaagagaagtacaatgctgattatgatctgtcagctcggcaaggggcagacaccctggccttcatgtctctcctggaggagaagttgctcccggtgctggtacatactttttggatagacaccaagaactacgtggaagtgacccggaagtggtatgcagaggctatgccctttcccctcaacttcttcctgcctggccgcatgcagcggcagtacatggaacggctacagctgctgactggggagcacaggcctgaggacgaggaagagctggagaaggagctgtaccgagaggctcgggagtgtctgaccctgctctctcagcgcctgggctctcaaaagttcttctttggagatgcccctgcctccttggacgccttcgtcttcagctacttggccctgctgctgcaggcaaagctgcccagtgggaagctgcaggtccacctgcgtgggctgcacaacctctgtgcctattgtacccacattctcagtctctacttcccctgggatggagctgaggtaccaccgcaacgccagacaccagcaggcccagagactgaggaggagccataccggcgccggaaccagatcctatctgtgctggcaggactggcagccatggtgggctacgccttgctcagcggcattgtctccatccagcgggcaacgcctgctcgggccccaggcacccggaccctgggcatggctgaggaggatgaagaggaatgatttgtcctcacgctcccaagactggtttttctactctcatgcattccagaggcccccgtgcctcctcgttgttggtacagccggacacggggtgctgccacccagaataaagccactcacactgac

SEQ ID NO: 153166 - DNA, 1364 bp, Homo sapiens
  Payload ID: 10137
  Gene Symbol: MTX2
  Gene Name: metaxin 2
  Uniprot ID: O75431
  ENST ID: ENST00000249442
  CDS Start-End: 212-1003
tgccgttgtcggctgcgccggaagtccctagccaggcctggcggtaaccttgggggcctcactgcagccgccgctgctgttggagtgggctttgcgagtctgaacgttggcggggctaggctcgttaactgccgagagcctccgggtttgcggtggaggacgctgaggcccgtggggggcaggcacccgggcgccgggcctcccagccgacatgtctctagtggcggaagccttcgtctcccagattgcagctgcagaaccttggcctgaaaatgctacattatatcagcaattgaaaggggagcaaattttactttctgacaatgcagcttctcttgcagtgcaggcctttttgcaaatgtgtaacttgcctatcaaagtagtttgtagggcaaatgcagaatatatgtctccatctggtaaagtaccttttattcatgtgggaaatcaagtagtatcagaacttggtccaatagtccaatttgttaaagccaagggccattctcttagtgatgggctggaggaagtccaaaaagcagaaatgaaagcttacatggaattagtcaacaatatgctgttgactgcagagctgtatcttcagtggtgtgatgaagctacagtaggggagatcactcatgctaggtatggatctccttacccttggcctctgaatcatattttggcctatcaaaaacagtgggaagtcaaacgtaagatgaaagctattggatggggaaagaagactctggaccaggtcttagaggatgtagaccagtgctgtcaagctctctctcaaagactgggaacacaaccgtatttcttcaataagcagcctactgaacttgacgcactggtatttggccatctatacaccattcttaccacacaattgacaaatgatgaactttctgagaaggtgaaaaactatagcaacctccttgctttctgtaggagaattgaacagcactattttgaagatcgtggtaaaggcaggctgtcatagagttatgtgttagtctcaggagtcttaacttttgaaatatgttttacttgaatgttacattagatattggtgtcagaattttaaaaccaaattactgctttttgaaacctcaaattatataatgtatcttatgtatgtgctttatattgttatttgtgtatacattaaaataattctgaattatttaatctgatatgttgtattctgtatcttgaaatttttgtttccttgaaacatgcatgcatttaaaaataaagcttaaacaactgtatggatgttacatttactttcttttgatttttctgaaagtcattcactgaattttacacatgtggaataaacagtgtcttttctaaggcaa

SEQ ID NO: 153167 - DNA, 817 bp, Homo sapiens
  Payload ID: 10137
  Gene Symbol: MTX2
  Gene Name: metaxin 2
  ENST ID: ENST00000452865
  CDS Start-End: 129-817
agtgggctttgcgagtctgaacgttggcggggctaggctcgttaactgccgagagcctccgggtttgcggtggaggacgctgaggcccgtggggggcaggcacccgggcgccgggcctcccagccgacatgtctctagtggcggaagccttcgtctcccagattgcagctgcagaaccttggcctgaaaatgctacattatatcagcaattgaaaggggagcaaattttactttctgacaatgcagcttctcttgcagtgcaggcctttttgcaaatgtgtaacttgcctatcaaagtagtttgtagggcaaatgcagaatatatgtctccatctggtaaagtaccttttattcatgtgggaaatcaagtagtatcagaacttggtccaatagtccaatttgttaaagccaagggccattctcttagtgatgggctggaggaagtccaaaaagcagaaatgaaagcttacatggaattagtcaacaatatgctgttgactgcagagctgtatcttcagtggtgtgatgaagctacagtaggggagtgggaagtcaaacgtaagatgaaagctattggatggggaaagaagactctggaccaggtcttagaggatgtagaccagtgctgtcaagctctctctcaaagactgggaacacaaccgtatttcttcaataagcagcctactgaacttgacgcactggtatttggccatctatacaccattcttaccacacaattgacaaatgatgaactttctgagaaggtgaaaaactatagcaacctccttgctttctgtaggagaattgaacagcacta

SEQ ID NO: 153168 - DNA, 618 bp, Homo sapiens
  Payload ID: 10137
  Gene Symbol: MTX2
  Gene Name: metaxin 2
  ENST ID: ENST00000423461
  CDS Start-End: 179-316
aggcctggcggtaaccttgggggcctcactgcagccgccgctgctgttggagtgggctttgcgagtctgaacgttggcggggctaggctcgttaactgccgagagcctccgggtttgcggtggaggacgctgaggcccgtggggggcaggcacccgggcgccgggcctcccagccgacatgtctctagtggcggaagccttcgtctcccagattgcagctgcagaaccttggcctgaaaatgctacattatatcagcaattgaaaggggagcaaattttactttctgacaatgcagcttctcttgcagtgcagtgaatctattctttgaacattctacaacaagaattacattatactgttataccagagtacttctgcagtgtgaaatagattggtttggaaaatgaacctggctttgctataaattacattcacaggcctttttgcaaatgtgtaacttgcctatcaaagtagtttgtagggcaaatgcagaatatatgtctccatctggtaaagtaccttttattcatgtgggaaatcaagtagtatcagaacttggtccaatagtccaatttgttaaagccaagggccattctcttagtgatgggctggaggaa

SEQ ID NO: 153169 - DNA, 1592 bp, Homo sapiens
  Payload ID: 10137
  Gene Symbol: MTX2
  Gene Name: metaxin 2
  ENST ID: ENST00000420864
  CDS Start-End: 236-349
gcggggccggcggaagcgctcgagtgccgttgtcggctgcgccggaagtccctagccaggcctggcggtaaccttgggggcctcactgcagccgccgctgctgttggagtgggctttgcgagtctgaacgttggcggggctaggctcgttaactgccgagagcctccgggtttgcggtggaggacgctgaggcccgtggggggcaggcacccgggcgccgggcctcccagccgacatgtctctagtggcggaagccttcgtctcccagattgcaggctggagtgcagtggcacaacctgggctcactgcaacctccgcttcccgggttcaagcgattctcctgccttagcctcccgagtagttgggattacaggcgcccgccaccacgcccgcgcggattcatggaaaatttttaaatctgcatgtactttaaagaaatacttttgagtcggtggactgaacatgactgatgtatatagctgcagaaccttggcctgaaaatgctacattatatcagcaattgaaaggggagcaaattttactttctgacaatgcagcttctcttgcagtgcaggcctttttgcaaatgtgtaacttgcctatcaaagtagtttgtagggcaaatgcagaatatatgtctccatctggtaaagtaccttttattcatgtgggaaatcaagtagtatcagaacttggtccaatagtccaatttgttaaagccaagggccattctcttagtgatgggctggaggaagtccaaaaagcagaaatgaaagcttacatggaattagtcaacaatatgctgttgactgcagagctgtatcttcagtggtgtgatgaagctacagtaggggagatcactcatgctaggtatggatctccttacccttggcctctgaatcatattttggcctatcaaaaacagtgggaagtcaaacgtaagatgaaagctattggatggggaaagaagactctggaccaggtcttagaggatgtagaccagtgctgtcaagctctctctcaaagactgggaacacaaccgtatttcttcaataagcagcctactgaacttgacgcactggtatttggccatctatacaccattcttaccacacaattgacaaatgatgaactttctgagaaggtgaaaaactatagcaacctccttgctttctgtaggagaattgaacagcactattttgaagatcgtggtaaaggcaggctgtcatagagttatgtgttagtctcaggagtcttaacttttgaaatatgttttacttgaatgttacattagatattggtgtcagaattttaaaaccaaattactgctttttgaaacctcaaattatataatgtatcttatgtatgtgctttatattgttatttgtgtatacattaaaataattctgaattatttaatctgatatgttgtattctgtatcttgaaatttttgtttccttgaaacatgcatgcatttaaaaataaagcttaaacaactgtatggatgttacatttactttcttttgatttttctgaaagtcattcactgaattttacacatgtggaataaacagtgtcttttctaaggcaa

SEQ ID NO: 153170 - DNA, 799 bp, Homo sapiens
  Payload ID: 10137
  Gene Symbol: MTX2
  Gene Name: metaxin 2
  ENST ID: ENST00000443241
  CDS Start-End: 161-784
gggggcctcactgcagccgccgctgctgttggagtgggctttgcgagtctgaacgttggcggggctaggctcgttaactgccgagagcctccgggtttgcggtggaggacgctgaggcccgtggggggcaggcacccgggcgccgggcctcccagccgacatgtctctagtggcggaagccttcgtctcccagattgcaggtaaagtaccttttattcatgtgggaaatcaagtagtatcagaacttggtccaatagtccaatttgttaaagccaagggccattctcttagtgatgggctggaggaagtccaaaaagcagaaatgaaagcttacatggaattagtcaacaatatgctgttgactgcagagctgtatcttcagtggtgtgatgaagctacagtaggggagatcactcatgctaggtatggatctccttacccttggcctctgaatcatattttggcctatcaaaaacagtgggaagtcaaacgtaagatgaaagctattggatggggaaagaagactctggaccaggtcttagaggatgtagaccagtgctgtcaagctctctctcaaagactgggaacacaaccgtatttcttcaataagcagcctactgaacttgacgcactggtatttggccatctatacaccattcttaccacacaattgacaaatgatgaactttctgagaaggtgaaaaactatagcaacctccttgctttctgtaggagaattgaacagcactattttgaagatcgtggtaaaggcaggctgtcatagagttatgtgttagtc

SEQ ID NO: 153171 - DNA, 1655 bp, Homo sapiens
  Payload ID: 10138
  Gene Symbol: MTX3
  Gene Name: metaxin 3
  Uniprot ID: Q5HYI7
  ENST ID: ENST00000509852
  CDS Start-End: 22-768
gtaaaggtcggcccgcgcaagatggcggcccccttggaactcagttgctggggaggcggctggggactcccatcggttcacagcgagtccctggtggtgatggcttatgccaaattttctggtgcacccttgaaagtcaatgtgatagataacacctggagaggttcaagaggcgatgtaccaattttgacaactgaagacgacatggtttctcagccagcaaaaatactaaactttttaagaaaacagaaatataatgctgattatgaactctcagcaaaacaaggggcagatacattggcttatattgctctcctcgaagagaagcttctccctgcagtgcttcacacattctgggttgagagtgacaattactttactgtgacaaagccatggtttgcttcacaaattccttttcctttgagtttgatcctgcctggaagaatgtctaagggagcactgaataggattctcctgaccagaggacagcctcccctctaccacctccgagaagtggaagcacagatatacagagatgccaaggagtgcctaaatcttctatcaaacagattgggaacatctcagtttttctttggagatacgccttctaccttggatgcctatgtttttggttttcttgcacctctttacaaagtacggtttcctaaagttcagctacaagaacatctgaaacagctctccaacctctgtcgcttttgtgatgacatcctgagcagttattttaggcttagtcttggagatggatgacaatcttcgccaaagccctcagcttcctcctcggaaactgccaacacttaaattgactccagcagaagaagaaaataattccttccaacggctttcgccctgagagtagtcatggtttgtggccaaagtcaaacgattgttgcagtaatctcttacaccaagtgtgtgaaggcaaaaagaagataccataataggtattaaggaagactctaaaccaaaaggaactttctatgccatctatttttactattattattaggaagcttgtattctagcttggcactgcatttttaataacaaagagaatgctaaatgaacttggttgggggggcggggaagaaaaacacatcgtactgtatacaaagaactgccttaatcatggcagatttttgcctttggttcacatgttgctgaccaaaggctacaattctgttctgaatgtgcactcctaatttatttgatttaatttattcaatttattaacttagttttcttagaccaggctgaatacctaatatgtggctttttggctgaggctttttacttctgtttagaaatttgatgcctattttaggaaccagaaaaagataaattgcttcagtagaagagaccatatttaactttaaaaagtgaggaggaatgtgctttttaattatgctctcataagtctaatcttttgggggtttagtagcacatagataaatattaaaggtggttacatataataacatctgataatactcatttcagtataacattggtctttgctgatgtgttcgatataggttaggaagagttcttttagtttacttgggcaaatgtggcagttttagacctatgtctttgtagtacatcttcagttgtctttcttgtattaattccagaag

SEQ ID NO: 153172 - DNA, 4799 bp, Homo sapiens
  Payload ID: 10138
  Gene Symbol: MTX3
  Gene Name: metaxin 3
  Uniprot ID: Q5HYI7
  ENST ID: ENST00000512560
  CDS Start-End: 121-876
gcgcaagatggcggcccccttggaactcagttgctggggaggcggctggggactcccatcggttcacagcgagtccctggtggtgatggcgatgtaccaattttgacaactgaagacgacatggtttctcagccagcaaaaatactaaactttttaagaaaacagaaatataatgctgattatgaactctcagcaaaacaaggggcagatacattggcttatattgctctcctcgaagagaagcttctccctgcagtgcttcacacattctgggttgagagtgacaattactttactgtgacaaagccatggtttgcttcacaaattccttttcctttgagtttgatcctgcctggaagaatgtctaagggagcactgaataggattctcctgaccagaggacagcctcccctctaccacctccgagaagtggaagcacagatatacagagatgccaaggagtgcctaaatcttctatcaaacagattgggaacatctcagtttttctttggagatacgccttctaccttggatgcctatgtttttggttttcttgcacctctttacaaagtacggtttcctaaagttcagctacaagaacatctgaaacagctctccaacctctgtcgcttttgtgatgacatcctgagcagttattttaggcttagtcttggaggcatctctccagctggacaagaaacggtagatgcaaatctgcagaaactcacacaacttgtaaataaggaatccaacttgattgaaaagatggatgacaatcttcgccaaagccctcagcttcctcctcggaaactgccaacacttaaattgactccagcagaagaagaaaataattccttccaacggctttcgccctgagagtagtcatggtttgtggccaaagtcaaacgattgttgcagtaatctcttacaccaagtgtgtgaaggcaaaaagaagataccataataggtattaaggaagactctaaaccaaaaggaactttctatgccatctatttttactattattattaggaagcttgtattctagcttggcactgcatttttaataacaaagagaatgctaaatgaacttggttgggggggcggggaagaaaaacacatcgtactgtatacaaagaactgccttaatcatggcagatttttgcctttggttcacatgttgctgaccaaaggctacaattctgttctgaatgtgcactcctaatttatttgatttaatttattcaatttattaacttagttttcttagaccaggctgaatacctaatatgtggctttttggctgaggctttttacttctgtttagaaatttgatgcctattttaggaaccagaaaaagataaattgcttcagtagaagagaccatatttaactttaaaaagtgaggaggaatgtgctttttaattatgctctcataagtctaatcttttgggggtttagtagcacatagataaatattaaaggtggttacatataataacatctgataatactcatttcagtataacattggtctttgctgatgtgttcgatataggttaggaagagttcttttagtttacttgggcaaatgtggcagttttagacctatgtctttgtagtacatcttcagttgtctttcttgtattaattccagaagaagtgaatgtactggttatcgttactatgctaggctgtaaaattcttactgaaattgcccacttgttagacactactcaggaggagcccatggccagggtagtagaaatactgtgcatctggtccaagttttctatgcttggctcatattctttcataagatgcatattctttcataagatgcatatcatgtagtcaaaagctttctgacaaccaattatttttcatatgtttcacttatagtcgaagaatacaaaggaacaatcagaaatagcagcttttaatgaatattttctatttattggttgctgaactgttaagggatttgctgtgtggtaattttacttataatagaaacttgcttattttagtggttgaggtgcttctgttgtcctaaaactacttctgaggtttttaaaatgtagaaccatgtttttgattagtgtcttaaaagattactgtggtgctcagcaaatcttatcaagtcgtgcaggaacccatatgttaagaaaatgagctttgtagtcaaaagactcatctaatttgagctgagtggagctcagctgtgtttgacccacatcctcccaatttgttctgtatttaggtagttatttatacaagagtctttaagtcattctaaatattttttcttgaaagttttaactaagtgagaaataaggtagtcttcaaaatcttggtcatctgtttggatgagggaaagtacctcatgagttgcacattacttctacaacagggtgtgtgtgtgtgtgtttgtgtgtgtcagtcatcttcaaaggcagattattagattccagcaatctgaaatctattattccagcagtctgaaacctaaatatgttatattggaaatcatgactgtgagactttattgtcctctaggatggatgtatattggagaagggtggttagcacattcatcagacatctgcttatgctgtggtcaaggccagtcatttttaatttatatcagatttatatcagaccctccaaaaagtatttgaaatatattacagttataacgtacaagtacattacatgtatattacaagtatattacatgtaaaacaggacaatttaaaaattttaaattttaaagaattaaaaattttaaaaatttaaattaaaaaaattaaaaatttatagaaccatatcaacactgacagattctaaaattaagtagtaaatttaactccaagtttctccatgggcaaagtcaaaagataatgctaggttatgtcaatttttcttttcaacaaaactgctaatgtctattaggaagaaaaatgtgtttaaagttttacaggaacgtggagctcatgttcttctgatatgtagactttgataaagaagcatactgtaatgttttatgaactgaaattttaatcaaaagaggtcattttagaataacaagtattattcttttttagtagagggaatgactgtcaatatgatttatttgtttttgtgtcatccctactttgaactgctgttagccttacattctcactatagtccataatgcttccagatcaccttttctaagatgcaacatgtgagtttagtgagagtttatatgttgggttacttagttgagctatttatgtataagtaaatgagatgacaggaagctgtaactgagcacaaagtactttagggagcagccacacatacaggaagctcttagaaaagaacttttttttttttttgagacagagtttcactcttgttgcccaggctggagtgcagtagcgcagtctcggctcactgcaacctctacctcctgggttcaagcaagtctcctgtctcagcctcccaagtagctgggattacaggcatgtgccaccatgcccagctaattttgttttttttttagtcgagacggggtttcaccatgttgctcaggctggtcttgaactcctgacctcaagtgattcacctgcctcggcctcccaaagtgctgggattacaggcgtgagccactgcgcccggccaaaaagaacattttgtcaatctgaacagagcacagaacattttttcagactgaacagactgttggaccagcctgtcatgatatgttttagataaagtttgagtgagttcattgggataaatggtccacaatcttaaacagaatactgtgagccaatgccttttggaagtaatggtggaggataatatgattaaagggaacatgcttgtgtttatttttgttggtagtatatgattagaaaaactagataattcccataagatgaagatcttccatgaacaaactaccatcaatcatccatcagattgattttttttttttttttaagtaacactaaagaagctgtaaagaacattgaaggtggtcattccttcaaaactgtgttttgaccacacaaggtgggcattaacaaaccaaatttcaacttaagtttgtttgtattatattgggggtgctgcgagactggagattttataaaagcaagcatttttatttccatttataatttctattcaatattgctagatatattaacatgaaggaatggggaagcttatttcaatcaaagctaaaattttcagaagtctgtaaaaatggaaaaacaccattgaaagaggcagaaacaggtaagggggatagtatcttagaaaacctgttggttaaggcagctgcatgtgataaaagtggtacttgaacttggtagtgtttccttagaacctcctccaaaaatatgcatttaccaggcttgttacaattttttgacagtttttcatcaactgtcaaaaacttcaacccttttaaaacctagatataaatgcttacatgtaaagaaaggaagctaagcagtgggtacctgggatctctctgaactatttttataacttcttgtgagtcttaagtatttcaaaataaaagtggttttaaagtaaattcatagattaaatgtatcattatctatatataaaccatgatttaaaactttaattttctaaacatagtattcaacttagttgaataaatatatgatagaagttaaatagaatttttatttcattcttaagaaaaactcatgtttgtaacaaatgatatctaaagatctattttgccttaccagaaaagaaaaaaaaaa

SEQ ID NO: 153173 - DNA, 1280 bp, Homo sapiens
  Payload ID: 10138
  Gene Symbol: MTX3
  Gene Name: metaxin 3
  Uniprot ID: Q5HYI7
  ENST ID: ENST00000512528
  CDS Start-End: 22-960
gtaaaggtcggcccgcgcaagatggcggcccccttggaactcagttgctggggaggcggctggggactcccatcggttcacagcgagtccctggtggtgatggcttatgccaaattttctggtgcacccttgaaagtcaatgtgatagataacacctggagaggttcaagaggcgatgtaccaattttgacaactgaagacgacatggtttctcagccagcaaaaatactaaactttttaagaaaacagaaatataatgctgattatgaactctcagcaaaacaaggggcagatacattggcttatattgctctcctcgaagagaagcttctccctgcagtgcttcacacattctgggttgagagtgacaattactttactgtgacaaagccatggtttgcttcacaaattccttttcctttgagtttgatcctgcctggaagaatgtctaagggagcactgaataggattctcctgaccagaggacagcctcccctctaccacctccgagaagtggaagcacagatatacagagatgccaaggagtgcctaaatcttctatcaaacagattgggaacatctcagtttttctttggagatacgccttctaccttggatgcctatgtttttggttttcttgcacctctttacaaagtacggtttcctaaagttcagctacaagaacatctgaaacagctctccaacctctgtcgcttttgtgatgacatcctgagcagttattttaggcttagtcttggaggcatctctccagctggacaagaaacggtagatgcaaatctgcagaaactcacacaacttgtaaataaggaatccaacttgattgaaaagatggatgacaatcttcgccaaagccctcagcttcctcctcggaaactgccaacacttaaattgactccagcagaagaagaaaataattccttccaacggctttcgccctgagagtagtcatggtttgtggccaaagtcaaacgattgttgcagtaatctcttacaccaagtgtgtgaaggcaaaaagaagataccataataggtattaaggaagactctaaaccaaaaggaactttctatgccatctatttttactattattattaggaagcttgtattctagcttggcactgcatttttaataacaaagagaatgctaaatgaacttggttgggggggcggggaagaaaaacacatcgtactgtatacaaagaactgccttaatcatggcagatttttgcctttggttcacatgttgctgaccaaaggct

SEQ ID NO: 153174 - DNA, 6155 bp, Homo sapiens
  Payload ID: 10138
  Gene Symbol: MTX3
  Gene Name: metaxin 3
  Uniprot ID: Q5HYI7
  ENST ID: ENST00000617335
  CDS Start-End: 25-501
atagtaaaggtcggcccgcgcaagatggcggcccccttggaactcagttgctggggaggcggctggggactcccatcggttcacagcgagtccctggtggtgatggcttatgccaaattttctggtgcacccttgaaagtcaatgtgatagataacacctggagaggttcaagaggcgatgtaccaattttgacaactgaagacgacatggtttctcagccagcaaaaatactaaactttttaagaaaacagaaatataatgctgattatgaactctcagcaaaacaaggggcagatacattggcttatattgctctcctcgaagagaagcttctccctgcagtgcttcacacattctgggttgagagtgacaattactttactgtgacaaagccatggtttgcttcacaaattccttttcctttgagtttgatcctgcctggaagaatgtctcagcaaatcttatcaagtcgtgcaggaacccatatgttaagaaaatgagctttgtagtcaaaagactcatctaatttgagctgagtggagctcagctgtgtttgacccacatcctcccaatttgttctgtatttaggtagttatttatacaagagtctttaagtcattctaaatattttttcttgaaagttttaactaagtgagaaataaggtagtcttcaaaatcttggtcatctgtttggatgagggaaagtacctcatgagttgcacattacttctacaacagggtgtgtgtgtgtgtgtttgtgtgtgtcagtcatcttcaaaggcagattattagattccagcaatctgaaatctattattccagcagtctgaaacctaaatatgttatattggaaatcatgactgtgagactttattgtcctctaggatggatgtatattggagaagggtggttagcacattcatcagacatctgcttatgctgtggtcaaggccagtcatttttaatttatatcagatttatatcagaccctccaaaaagtatttgaaatatattacagttataacgtacaagtacattacatgtatattacaagtatattacatgtaaaacaggacaatttaaaaattttaaattttaaagaattaaaaattttaaaaatttaaattaaaaaaattaaaaatttatagaaccatatcaacactgacagattctaaaattaagtagtaaatttaactccaagtttctccatgggcaaagtcaaaagataatgctaggttatgtcaatttttcttttcaacaaaactgctaatgtctattaggaagaaaaatgtgtttaaagttttacaggaacgtggagctcatgttcttctgatatgtagactttgataaagaagcatactgtaatgttttatgaactgaaattttaatcaaaagaggtcattttagaataacaagtattattcttttttagtagagggaatgactgtcaatatgatttatttgtttttgtgtcatccctactttgaactgctgttagccttacattctcactatagtccataatgcttccagatcaccttttctaagatgcaacatgtgagtttagtgagagtttatatgttgggttacttagttgagctatttatgtataagtaaatgagatgacaggaagctgtaactgagcacaaagtactttagggagcagccacacatacaggaagctcttagaaaagaacttttttttttttttgagacagagtttcactcttgttgcccaggctggagtgcagtagcgcagtctcggctcactgcaacctctacctcctgggttcaagcaagtctcctgtctcagcctcccaagtagctgggattacaggcatgtgccaccatgcccagctaattttgttttttttttagtcgagacggggtttcaccatgttgctcaggctggtcttgaactcctgacctcaagtgattcacctgcctcggcctcccaaagtgctgggattacaggcgtgagccactgcgcccggccaaaaagaacattttgtcaatctgaacagagcacagaacattttttcagactgaacagactgttggaccagcctgtcatgatatgttttagataaagtttgagtgagttcattgggataaatggtccacaatcttaaacagaatactgtgagccaatgccttttggaagtaatggtggaggataatatgattaaagggaacatgcttgtgtttatttttgttggtagtatatgattagaaaaactagataattcccataagatgaagatcttccatgaacaaactaccatcaatcatccatcagattgattttttttttttttttaagtaacactaaagaagctgtaaagaacattgaaggtggtcattccttcaaaactgtgttttgaccacacaaggtgggcattaacaaaccaaatttcaacttaagtttgtttgtattatattgggggtgctgcgagactggagattttataaaagcaagcatttttatttccatttataatttctattcaatattgctagatatattaacatgaaggaatggggaagcttatttcaatcaaagctaaaattttcagaagtctgtaaaaatggaaaaacaccattgaaagaggcagaaacaggtaagggggatagtatcttagaaaacctgttggttaaggcagctgcatgtgataaaagtggtacttgaacttggtagtgtttccttagaacctcctccaaaaatatgcatttaccaggcttgttacaattttttgacagtttttcatcaactgtcaaaaacttcaacccttttaaaacctagatataaatgcttacatgtaaagaaaggaagctaagcagtgggtacctgggatctctctgaactatttttataacttcttgtgagtcttaagtatttcaaaataaaagtggttttaaagtaaattcatagattaaatgtatcattatctatatataaaccatgatttaaaactttaattttctaaacatagtattcaacttagttgaataaatatatgatagaagttaaatagaatttttatttcattcttaagaaaaactcatgtttgtaacaaatgatatctaaagatctattttgccttaccagaaaagaaaaaaaaaaccctaaaaccaaaaactccttttccctaggaagtcaaaaatgctgtgatttaaaatatctaattatatttttttctttctatggtagtggggtttacttctgaggataaaatattttgaaaaagctctgtcccttgacatggtagttctcccgtgccttgtacttgttctctctccatatgcacagtgtgacaagatgctcacctttaatgaagaaggtgtagcttttcgttttaagctgtaattgtctttgtcttgatttggctatttttataactgaaatcctgagcaacagagataatttgggtggtaatgatcatcttttgtatatgttcttgatgttaagaaatattttttgctgccattcagctttgtggaatttatgtttacttttcaatattttcatatttcttaaccagattttaaagaaatttgttgttagttacgtgaaatcaaaggtcaggtcagtaagcccattatcctcaaacttgaagtttcgttggatgttcaaaatgctaatttttgcagagatataaggataaattagttttagtttgtgttcttaagggtttgcaaaataatttggctcccaaactcttgttggggtgtagtgtttgctaggagcccaggatacctgccctggacttaaattgtgattgaagtggagaggtactctaggaatttaaaaagacacaaaattatttttttccagactagtgtgccatggatttctgataagaattaacattcttgaacaaaggtatcagaaagggtaactcgagttgaaggtttgtgaatagaaggggaaatgtgatagaagattattcagaacaaaataagtagacaaaataacaaaagacaggaaaataagtctctttgtatccttattaatcatttgaaattatgctataatattttttaaaactcacctgtttggttctgggtgaagcagttcctgaaggagtgttttgtcagaatatattgttaggagaatagagggttctgtggccaagtaagtttgggaaatagtgggttagacaaagttgagttactgttggcctttcagacctttgatacgctaatgtgcattttaaatctccaagaagcacctctattttatacatcatttccctaatttattttaatatggatttcttgtttttgttttcttgagacggagtcttggtcttgtcacccaggctggagtgcagtggcacgatctcggctcactacaacctccgcctcccaggttcaagcgattctcctgcctcagcctcccaatttactgggattacaggcacctgccaccacgcccagctaatttttgtatttttagtagagatggggtttcaccatgttgaccaggctgattttgaactcctgacctcaggtgattctgcccgcctcaccctcccacagtgctggaattataggtatgagccactgtccccggccagatttttttaaaagtaggtatcttgtgggatttatgttctgagagatacacctaaggaaatgctgccctacagtgtttttgctagttcatactcattacaaaggtttcttgttgttgggtgcccctctagccagtggtagtaaaatgggaagagacaggtcaagactcccttggaccatggcattgagagagggatggctgtcggcatagatatgttggttatttaggcatttgtgagggaggcccctggctcttccagcctgtttccttaggatcccagttggccgggaacagctgtacaagggtctgctgaactggtggtttcagcagactacccagttcctaagcatccatgagacagagggaaccaacttgtatttccagaacaattttccaaaccttttctggctgtactttaaaagtgccaaaaaggcaatgggtgtttatgacactaaagtcacatacaagctagtatgatacatacatcatagaaagcttatagttgctcagtgacaaagcaaaggaagtttaatattttccagttttgttcattaccgaagacagtctacggttcatagttttcactaaattctaagcagattctatatcctaaaacatttaaacctcactaggcctgcaattttgagagggttagctaaatatgtttggtatcacttcagagtctaaaaccagattactaatcgtgtgtaaggaggcattttgtgtgtctttgcaatgtatacaattggattatttggaacaccattttgaatgtgtatttgagagaaagctcgcctgtgggttttgagttgtggtgtaatggtgaacatgtagccacgtgaaaggccgttggatctttgttctgattcttcagtcgtcttcttgcaaattcagagaaatgtcttttaatcatttcgtttacatatcccagatccttggaaatcatgaaaaataacttgccagagtttgcatcagccctcagtaagtcatgaaccatagagaaggtcatggggccatttattctttggaccactggctacttctgaagttctggcttccttctctctaggaggagtcgtgtattcaagcttttaagttaaatgcataaaaatgagttttacttctcttctgacttgatttttaattttatgaaatgggaaataatgtttttccatttttctgttcattttgaagtgggaatttgaggtgtttgtaatgtcatgttactgttctgaaagattgacagtaaagaagacaagaaatatatgtatgtagtatgcatattagttttgtcccaccaagcctatctttgaatggcaaacattttaaaaacatctgttctagttgcacaactactctagcttctttataaagtaaacaatcttaaagtaagcaatgttggccataatttcaatattctagccttgccgagtgtgaatatattttactcagagactatgtacaaatacactaaagtggtgatggtgatcaatattgtaaagaatttattctgataaatgagaaactggatataatgtcaaaatagctattttctcaataaaaatctcaaatctc

SEQ ID NO: 153175 - DNA, 915 bp, Homo sapiens
  Payload ID: 10139
  Gene Symbol: METRN
  Gene Name: meteorin, glial cell differentiation regulator
  ENST ID: ENST00000219542
  CDS Start-End: 1-564
ctggccccggctgcccgcgccggctactccgaggagcgctgcagctggaggggcagcggcctcacccaggagcccggcagcgtggggcagctggccctggcctgtgcggagggcgcggttgagtggctgtacccggctggggcgctgcgcctgaccctgggcggccccgatcccagagcgcggcccggcatcgcctgtctgcggccggtgcggcccttcgcgggcgcccaggtcttcgcggagcgcgcagggggcgccctggagctgctgctggccgagggcccgggcccggcagggggccgctgcgtgcgctggggtccccgcgagcgccgggccctcttcctgcaggccacgccgcaccaggacatcagccgccgcgtggccgccttccgctttgagctgcgcgaggacgggcgccccgagctgcccccgcaggcccacggtctcggcgtagacggtgcctgcaggccctgcagcgacgctgagctgctcctggccgcatgcaccagcgacttcggtgagtgtccccgccatggggggagcctggagcctgccttcccctgaatgcctaccgcagccacatgcctccccacagtaattcacgggatcatccatggggtcacccatgacgtggagctgcaggagtctgtcatcactgtggtggccgcccgtgtcctccgccagacaccgccgctgttccaggcggggcgatccggggaccaggggctgacctccattcgtaccccactgcgctgtggcgtccacccgggcccaggcaccttcctcttcatgggctggagccgctttggggaggcccggctgggctgtgccccacgattccaggagttccgccgtgcctacgaggctgcccgtgctgcccacctccacccctgcgaggtggcgctgcactgaggg

SEQ ID NO: 153176 - DNA, 3325 bp, Homo sapiens
  Payload ID: 10139
  Gene Symbol: METRN
  Gene Name: meteorin, glial cell differentiation regulator
  Uniprot ID: Q9UJH8
  ENST ID: ENST00000568223
  CDS Start-End: 176-1057
tccaaggcggccccggcgctggggctgcgcggcaggcggagcggccgcgggcttgggggcttcgccggggccgggcggccggcgcccccggctgctcccgccgccgcccggacccgcgccccgccggggcagcggtggtgagagccccgactccccggacgccgcccgccgtgccatggggttcccggccgcggcgctgctctgcgcgctgtgctgcggcctcctggccccggctgcccgcgccggctactccgaggagcgctgcagctggaggggcagcggcctcacccaggagcccggcagcgtggggcagctggccctggcctgtgcggagggcgcggttgagtggctgtacccggctggggcgctgcgcctgaccctgggcggccccgatcccagagcgcggcccggcatcgcctgtctgcggccggtgcggcccttcgcgggcgcccaggtcttcgcggagcgcgcagggggcgccctggagctgctgctggccgagggcccgggcccggcagggggccgctgcgtgcgctggggtccccgcgagcgccgggccctcttcctgcaggccacgccgcaccaggacatcagccgccgcgtggccgccttccgctttgagctgcgcgaggacgggcgccccgagctgcccccgcaggcccacggtctcggcgtagacggtgcctgcaggccctgcagcgacgctgagctgctcctggccgcatgcaccagcgacttcgtaattcacgggatcatccatggggtcacccatgacgtggagctgcaggagtctgtcatcactgtggtggccgcccgtgtcctccgccagacaccgccgctgttccaggcggggcgatccggggaccaggggctgacctccattcgtaccccactgcgctgtggcgtccacccgggcccaggcaccttcctcttcatgggctggagccgctttggggaggcccggctgggctgtgccccacgattccaggagttccgccgtgcctacgaggctgcccgtgctgcccacctccacccctgcgaggtggcgctgcactgaggggctgggtgctggggaggggctggtaggagggagggtgggcccactgctttggaggtgatgggactatcaataagaactctgttcacgcaagctgctgtggacctggtctcctgtgtccagcccagccttgggcctgcctcgcagctgtgaggatggctccaattcctgcctcctggcgggagactgaggctcaggggaatggtatcttgttcaagaccatttggcaactgagagggagagcagatgtcaggaggagctacacccacattccggggaggggccgctgctgggtggggggcacgtggggacctgcactcatgcaagcttctgctctgctgcacccaccagccccgtccttgcccgcacccttgcctgcttccctggctggctcccacttgcctcccgtgccaggtgcttctggggctcagcaggagaggaaaggggcagaggggcatagggtccctcgggtacggtgggggcaggcgggcgcacagcgctccggctctgagccaggcctgtgagggaaggggctgcaggctggcagggtgccgacttcccccatggctgctgtgagcccgcagagtcatccttggccccgtcccgcccttggggaagaatgggcccctctgtcctcaggccccttcgacgtgctgagcatccagacgtggcgaggagcccgaagggtgtggggtcccctctgcagggtcctgcttgttgcctgtttccggcgggcggggtgcacaatggggtctctaaggaccgtttcccgccactggccccattgtcactgtctccgccttcctcctcggcctttcagccgcataaagggccagtgaggtttgggacagccacagcccaaggctccgaggctaaaagcccctgggtgggggtgttccaggacacctggccctgtgtgagctgcctcctctcaccccaacccctcggatcctgggaaagagacagccatggctcaagggccagggacccctgggctgagccccagaaatggctttccattctcgcctgggccggggtgggggtggaggccagaggccctgcccaggcagatgaagcccccagctttcaagggggaaactgaggctgtgtgagggacacagctgtgcagggcccacaaacacggtcctttctctaggttagcggatgcagatgcctgatgagtgccatgccctctgtggacacctggggaggggggtcacctccagcgccgccctgggacttccactgcacgtgcaagagacttaccctttcacacagatcacctgcctgccgcagggctgatgaggatgggtgaggagcgcagccactgggtgtcatgcactgtgggggttctcccaccttctgcccctcctcaggttccttgctgcttctctcctctcccaactgtggcacgctgagggctcaggcacaggaccgctcctctggggcagcctccaataacccttggacaacctccactttttcatcttcagccctgaccactccctggggcccatagccttacatccatctgcccccagcccaaacacttctgcaaacactagaaaaggaggtagcccgtgtgccctcctgcaccgcctcctccactcctgtcttggagaggctttcccgtgggccgagcaacccccttacctttggcacttgccctgattctctggccagcttcctacaacctctccttttcagccacacccaagtccacctgttcacaaacaccctgggctgggccctggccgaaccctggcttctacctacctgtctcaggaagtgcctgagccttgcacctacagaccctcccagagaaagccctggctttgcaaccagctgtcttctcatgagacacagggccacaggagcaccacggtgcccaaatgggtcttggagcattagaccaggggcttcatgcctgccctggggacaggtggccaaagtggcatgggagatagggagacagtgtgggtgagcaggtgggcaggagctacaggagcctggggcctgtggatcacagacaccgccaggcaagtgccagttcacacaggtacaggtggctgcagagtgcccaaaggccaagcagcagagtgcctggtgtggacgggagaggagtggggaggttgggcgcagtggctcacgcctgtaatcccaacactttgggaggcccaggcaagcagatcatgaggtcaggagatggagaccatcctggccaacatggtgaaaccgtctctaataaaacacaaaaaattagccaga

SEQ ID NO: 153177 - DNA, 503 bp, Homo sapiens
  Payload ID: 10139
  Gene Symbol: METRN
  Gene Name: meteorin, glial cell differentiation regulator
  ENST ID: ENST00000570132
  CDS Start-End: 54-263
gccggggcagcggtggtgagagccccgactccccggacgccgcccgccgtgccatggggttcccggccgcggcgctgctctgcgcgctgtgctgcggcctcctggccccggctgcccgcgccggctactccgaggagcgctgcagctggaggggcaggccacgccgcaccaggacatcagccgccgcgtggccgccttccgctttgagctgcgcgaggacgggcgccccgagctgcccccgcaggcccacggtctcggcgtagacggtgcctgcaggccctgcagcgacgctgagctgctcctggccgcatgcaccagcgacttcgtaattcacgggatcatccatggggtcacccatgacgtggagctgcaggagtctgtcatcactgtggtggccgcccgtgtcctccgccagacaccgccgctgttccaggcggggcgatccggggaccaggggctgacctccattcgtaccccactgcgctgtggcgtccacccgggcc

SEQ ID NO: 153178 - DNA, 612 bp, Homo sapiens
  Payload ID: 10139
  Gene Symbol: METRN
  Gene Name: meteorin, glial cell differentiation regulator
  ENST ID: ENST00000568415
  CDS Start-End: 37-519
tcagacctcagatccgggaaactagaggggtcccagatgctggggtgcatatgtcagatgggagtgcaggagggcggcccaggacagctgatcgctaggcatggcccccaggcccacgtctgtgtgcattcctgccttggaggtgcctgcaggccctgcagcgacgctgagctgctcctggccgcatgcaccagcgacttcgtaattcacgggatcatccatggggtcacccatgacgtggagctgcaggagtctgtcatcactgtggtggccgcccgtgtcctccgccagacaccgccgctgttccaggcggggcgatccggggaccaggggctgacctccattcgtaccccactgcgctgtggcgtccacccgggcccaggcaccttcctcttcatgggctggagccgctttggggaggcccggctgggctgtgccccacgattccaggagttccgccgtgcctacgaggctgcccgtgctgcccacctccacccctgcgaggtggcgctgcactgaggggctgggtgctggggaggggctggtaggagggagggtgggcccactgctttggaggtgatgggactatcaataagaactctgttcacgcaa

SEQ ID NO: 153179 - DNA, 523 bp, Homo sapiens
  Payload ID: 10139
  Gene Symbol: METRN
  Gene Name: meteorin, glial cell differentiation regulator
  ENST ID: ENST00000567076
  CDS Start-End: 1-523
cgcggttgagtggctgtacccggctggggcgctgcgcctgaccctgggcggccccgatcccagagcgcggcccggcatcgcctgtctgcggccggtgcggcccttcgcgggcgcccaggtcttcgcggagcgcgcagggggcgccctggagctgctgctggccgagggcccgggcccggcagggggccgctgcgtgcgctggggtccccgcgagcgccgggccctcttcctgcaggccacgccgcaccaggacatcagccgccgcgtggccgccttccgctttgagctgcgcgaggacgggcgccccgagctgcccccgcaggcccacggtctcggcgtagacggtgcctgcaggccctgcagcgacgctgagctgctcctggccgcatgcaccagcgacttcgtaattcacgggatcatccatggggtcacccatgacgtggagctgcaggagtctgtcatcactgtgggtgggcccactgctttggaggtgatgggactatcaataagaactctgttcacg

SEQ ID NO: 153180 - DNA, 1605 bp, Homo sapiens
  Payload ID: 10140
  Gene Symbol: METRNL
  Gene Name: meteorin, glial cell differentiation regulator-like
  Uniprot ID: Q641Q3
  ENST ID: ENST00000320095
  CDS Start-End: 126-1061
gcggggggcgcgcgacgtgaccacccggactcgaagcccgccccgcccccgcccggctcgccggctccggggtctgctccgggggtcgcggacgcggggccgggcggcggagccggcgccagagcatgcggggcgcggcgcgggcggcctgggggcgcgcggggcagccgtggccgcgaccccccgccccgggcccgcccccgccgccgctcccgctgctgctcctgctcctggccgggctgctgggcggcgcgggcgcgcagtactccagcgaccggtgcagctggaaggggagcgggctgacgcacgaggcacacaggaaggaggtggagcaggtgtatctgcgctgtgcggcgggtgccgtggagtggatgtacccaacaggtgctctcatcgttaacctgcggcccaacaccttctcgcctgcccggcacctgaccgtgtgcatcaggtccttcacggactcctcgggggccaatatttatttggaaaaaactggagaactgagactgctggtaccagacggggacggcaggcccggccgggtgcagtgttttggcctggagcagggcggcctgttcgtggaggccacgccgcagcaggatatcggccggaggaccacaggcttccagtacgagctggttaggaggcacagggcgtcggacctgcacgagctgtctgcgccgtgccgtccctgcagtgacaccgaggtgctcctagccgtctgcaccagcgacttcgccgttcgaggctccatccagcaagttacccacgagcctgagcggcaggactcagccatccacctgcgcgtgagcagactctatcggcagaaaagcagggtcttcgagccggtgcccgagggtgacggccactggcaggggcgcgtcaggacgctgctggagtgtggcgtgcggccggggcatggcgacttcctcttcactggccacatgcacttcggggaggcgcggctcggctgtgccccacgcttcaaggacttccagaggatgtacagggatgcccaggagagggggctgaacccttgtgaggttggcacggactgactccgtgggccgctgcccttcctctcctgatgagtcacaggctgcggtgggcgctgcggtcctggtggggccgtgcggtgagggccgcgcgctgggagccgcatgccctgggcccaggcctgaccctggtaccgaagctgtggacgttctcgccacactcaaccccatgagcttccagccaaggatgccctggccgattggaaatgctgtaaaatgcaaactaagttattatatttttttttggtaaaaaagaaatgtccataggaaacaaattcccgtgtcttaaaacgccttggtgtgccgtctgatactgttctctaaagacgttaggagtcacggcatctggcctgcggttgggtgaagcactggccgttgggcacagtggatgtgtgaaaaggtgccattcagagttgttattctcatgacggaagttttggagccaaataatacgttttttattttcattttatttttaaaggatgagctttggtccttttcaggccgccggttgtttccgttcccgagaataaagacgaggatccga

SEQ ID NO: 153181 - DNA, 545 bp, Homo sapiens
  Payload ID: 10140
  Gene Symbol: METRNL
  Gene Name: meteorin, glial cell differentiation regulator-like
  ENST ID: ENST00000574053
  CDS Start-End: 1-273
cgcacagccgttcgaggctccatccagcaagttacccacgagcctgagcggcaggactcagccatccacctgcgcgtgagcagactctatcggcagaaaagcagggtcttcgagccggtgcccgagggtgacggccactggcaggggcgcgtcaggacgctgctggagtgtggcgcgcggctcggctgtgccccacgcttcaaggacttccagaggatgtacagggatgcccaggagagggggctgaacccttgtgaggttggcacggactgactccgtgggccgctgcccttcctctcctgatgagtcacaggctgcggtgggcgctgcggtcctggtggggccgtgcggtgagggccgcgcgctgggagccgcatgccctgggcccaggcctgaccctggtaccgaagctgtggacgttctcgccacactcaaccccatgagcttccagccaaggatgccctggccgattggaaatgctgtaaaatgcaaactaagttattatatttttttttggtaaaaaagaaatgtccataggaaacaaa

SEQ ID NO: 153182 - DNA, 967 bp, Homo sapiens
  Payload ID: 10140
  Gene Symbol: METRNL
  Gene Name: meteorin, glial cell differentiation regulator-like
  Uniprot ID: Q641Q3
  ENST ID: ENST00000570778
  CDS Start-End: 108-797
cccgggggaggcgcgcctgcagcgcggccggcgggctgacgcacgaggcacacaggaaggaggtggagcaggtgtatctgcgctgtgcggcgggtgccgtggagtggatgtacccaacaggtgctctcatcgttaacctgcggcccaacaccttctcgcctgcccggcacctgaccgtgtgcatcaggtccttcacggactcctcgggggccaatatttatttggaaaaaactggagaactgagactgctggtaccagacggggacggcaggcccggccgggtgcagtgttttggcctggagcagggcggcctgttcgtggaggccacgccgcagcaggatatcggccggaggaccacaggcttccagtacgagctggttaggaggcacagggcgtcggacctgcacgagctgtctgcgccgtgccgtccctgcagtgacaccgaggtgctcctagccgtctgcaccagcgacttcgccgttcgaggctccatccagcaagttacccacgagcctgagcggcaggactcagccatccacctgcgcgtgagcagactctatcggcagaaaagcagggtcttcgagccggtgcccgagggtgacggccactggcaggggcgcgtcaggacgctgctggagtgtggcgtgcggccggggcatggcgacttcctcttcactggccacatgcacttcggggaggcgcggctcggctgtgccccacgcttcaaggacttccagaggatgtacagggatgcccaggagagggggctgaacccttgtgaggttggcacggactgactccgtgggccgctgcccttcctctcctgatgagtcacaggctgcggtgggcgctgcggtcctggtggggccgtgcggtgagggccgcgcgctgggagccgcatgccctgggcccaggcctgaccctggtaccgaagctgtggacgttctcgccacactcaaccccatga

SEQ ID NO: 153183 - DNA, 1900 bp, Homo sapiens
  Payload ID: 10140
  Gene Symbol: METRNL
  Gene Name: meteorin, glial cell differentiation regulator-like
  Uniprot ID: Q641Q3
  ENST ID: ENST00000571814
  CDS Start-End: 942-1631
ttctgtttagcatgtatgagggtgaacttagcttgctactcacacactactcaccctgtggaggaagttcgcctcgcttttgtggtgagtcttgctgtaatgatagcttatatttacaaataccgtcggcagtgcagggtcttcaggcttgcagaaaacggtcaagtcattactttgagaaatgtacaaacatctatgcttaatgaggtgctaaaagacaaaactcatctacaacctccttccccccaaactgccaacactctggattaacttaaaagctgctctctgggcaggttgcatcccagggctcctccttcacacgtggtggggccccaccttcgctttacctctagcgtcccagccctcgtggtcatctggaaccagggttggtacacagggcctgctggcattcctgtgatactccgtgatattctggaggaatccatcccttccctggggctccatcccactgccccagcacctccagccaccctgattcagggacatcgcagagattggtgtttgacgctacggcagcagaggcgcagactcttgagtgttggagggtgtctggagggcctggggacaagcaccgcctgcactcccgggagctcggccccgccccaccatggctcttggtgcaggtgcactggaaggaactgggtggggcccttgtgccgaagggcggagatggcgccggcctgcctcacgggcaggggtccgtgtggcacctgtggccggcagcgggtgggtccaggagccgccatcatttggagcgggtatcgtcctcactgactctctgtgggtgcgggtggggtgtgtgacgggagctccgggcctggctgacagtgtctctcctctgcagcgggctgacgcacgaggcacacaggaaggaggtggagcaggtgtatctgcgctgtgcggcgggtgccgtggagtggatgtacccaacaggtgctctcatcgttaacctgcggcccaacaccttctcgcctgcccggcacctgaccgtgtgcatcaggtccttcacggactcctcgggggccaatatttatttggaaaaaactggagaactgagactgctggtaccagacggggacggcaggcccggccgggtgcagtgttttggcctggagcagggcggcctgttcgtggaggccacgccgcagcaggatatcggccggaggaccacaggcttccagtacgagctggttaggaggcacagggcgtcggacctgcacgagctgtctgcgccgtgccgtccctgcagtgacaccgaggtgctcctagccgtctgcaccagcgacttcgccgttcgaggctccatccagcaagttacccacgagcctgagcggcaggactcagccatccacctgcgcgtgagcagactctatcggcagaaaagcagggtcttcgagccggtgcccgagggtgacggccactggcaggggcgcgtcaggacgctgctggagtgtggcgtgcggccggggcatggcgacttcctcttcactggccacatgcacttcggggaggcgcggctcggctgtgccccacgcttcaaggacttccagaggatgtacagggatgcccaggagagggggctgaacccttgtgaggttggcacggactgactccgtgggccgctgcccttcctctcctgatgagtcacaggctgcggtgggcgctgcggtcctggtggggccgtgcggtgagggccgcgcgctgggagccgcatgccctgggcccaggcctgaccctggtaccgaagctgtggacgttctcgccacactcaaccccatgagcttccagccaaggatgccctggccgattggaaatgctgtaaaatgcaaactaagttattatatttttttttggtaaaaaagaaatgtccataggaaac

SEQ ID NO: 153184 - DNA, 967 bp, Homo sapiens
  Payload ID: 10140
  Gene Symbol: METRNL
  Gene Name: meteorin, glial cell differentiation regulator-like
  Uniprot ID: Q641Q3
  ENST ID: ENST00000616599
  CDS Start-End: 108-797
cccgggggaggcgcgcctgcagcgcggccggcgggctgacgcacgaggcacacaggaaggaggtggagcaggtgtatctgcgctgtgcggcgggtgccgtggagtggatgtacccaacaggtgctctcatcgttaacctgcggcccaacaccttctcgcctgcccggcacctgaccgtgtgcatcaggtccttcacggactcctcgggggccaatatttatttggaaaaaactggagaactgagactgctggtaccggacggggacggcaggcccggccgggtgcagtgttttggcctggagcagggcggcctgttcgtggaggccacgccgcagcaggatatcggccggaggaccacaggcttccagtacgagctggttaggaggcacagggcgtcggacctgcacgagctgtctgcgccgtgccgtccctgcagtgacaccgaggtgctcctagccgtctgcaccagcgacttcgccgttcgaggctccatccagcaagttacccacgagcctgagcggcaggactcagccatccacctgcgcgtgagcagactctatcggcagaaaagcagggtcttcgagccggtgcccgagggtgacggccactggcaggggcgcgtcaggacgctgctggagtgtggcgtgcggccggggcatggcgacttcctcttcactggccacatgcacttcggggaggcgcggctcggctgtgccccacgcttcaaggacttccagaggatgtacagggatgcccaggagagggggctgaacccttgtgaggttggcacggactgactccgtgggccgctgcccttcctctcctgatgagtcacaggctgcggtgggcgctgcggtcctggtggggccgtgcggtgagggccgcgcgctgggagccgcatgccctgggcccaggcctgaccctggtaccgaagctgtggacgttctcgccacactcaaccccatga

SEQ ID NO: 153185 - DNA, 5472 bp, Homo sapiens
  Payload ID: 10140
  Gene Symbol: METRNL
  Gene Name: meteorin, glial cell differentiation regulator-like
  Uniprot ID: Q641Q3
  ENST ID: ENST00000633913
  CDS Start-End: 125-1060
gcggggggcgcgcgacgtgaccacccggactcgaagccgccccgcccccgcccggctcgccggctccggggtctgctccgggggtcgcggacgcggggccgggcggcggagccggcgccagagcatgcggggcgcggcgcgggcggcctgggggcgcgcggggcagccgtggccgcgaccccccgccccgggcccgcccccgccgccgctcccgctgctgctcctgctcctggccgggctgctgggcggcgcgggcgcgcagtactccagcgaccggtgcagctggaaggggagcgggctgacgcacgaggcacacaggaaggaggtggagcaggtgtatctgcgctgtgcggcgggtgccgtggagtggatgtacccaacaggtgctctcatcgttaacctgcggcccaacaccttctcgcctgcccggcacctgaccgtgtgcatcaggtccttcacggactcctcgggggccaatatttatttggaaaaaactggagaactgagactgctggtaccggacggggacggcaggcccggccgggtgcagtgttttggcctggagcagggcggcctgttcgtggaggccacgccgcagcaggatatcggccggaggaccacaggcttccagtacgagctggttaggaggcacagggcgtcggacctgcacgagctgtctgcgccgtgccgtccctgcagtgacaccgaggtgctcctagccgtctgcaccagcgacttcgccgttcgaggctccatccagcaagttacccacgagcctgagcggcaggactcagccatccacctgcgcgtgagcagactctatcggcagaaaagcagggtcttcgagccggtgcccgagggtgacggccactggcaggggcgcgtcaggacgctgctggagtgtggcgtgcggccggggcatggcgacttcctcttcactggccacatgcacttcggggaggcgcggctcggctgtgccccacgcttcaaggacttccagaggatgtacagggatgcccaggagagggggctgaacccttgtgaggttggcacggactgactccgtgggccgctgcccttcctctcctgatgagtcacaggctgcggtgggcgctgcggtcctggtggggccgtgcggtgagggccgcgcgctgggagccgcatgccctgggcccaggcctgaccctggtaccgaagctgtggacgttctcgccacactcaaccccatgagcttccagccaaggatgccctggccgattggaaatgctgtaaaatgcaaactaagttattatatttttttttggtaaaaaagaaatgtccataggaaacaaattcccgtgtcttaaaacgccttggtgtgccgtctgatactgttctctaaagacgttaggagtcacggcatctggcctgcggttgggtgaagcactggccgttgggcacagtggatgtgtgaaaaggtgccattcagagttgttattctcatgacggaagttttggagccaaataatacgttttttattttcattttatttttaaaggatgagctttggtccttttcaggccgccggttgtttccgttcccgagaataaagacgaggatccgaccagccagaagccggagtctgtctttcgccaggtccggtgcccacggcccgtgttcagggcctcgctggacgtaccccagggcgccaccctgcctcggcagacacgcttgctccgcccggcgactgtccctcagcgcctgctgctgcatttccattaatgcaggtcctgccctgtggccccagcctgcccacagtgcaggggcccacagctagtctctagacgcccaggagctggtctgaacccaggttggtgaccccatgtccccaaaggatgcggctaccagaacaaatcaccaccgactgcggggctgaaacaacctcgttctctgagttcctgaggccacaatccaaagtcacggtgtgggcagagcctctccctccagggctccaggggagaacgcttcatcttctcctcagcctccaggggttccagggaggacccttcgtcttctcctcagccgggggcgacccttcgtcttctcctcagccgggggcgacccttcgtcttctcctcagctgggggggacccttcgtcttctcctcagccagggggggacccttcatcttctcctcagcctccgggggttccagggaggaccctttgtcttctcctcagcctccgggggttcctgggaggatcttcatcttctcctcagccaggggaggaaccttcatcttctcagccagggggaggacccttcatcttctcctctgccaggggaggactcttcatcttctccttggcctctgggggctccaggtgctccttgatggtggctgcatcactccagtctctgcctccgtggccacacggcttctccctgtgtctgtgtccagatctttctctaggacattggtcactggattggggcccacaccagtgacctcgtcttaaaccgattacgtccgcaaagaccccatttccaaataaggtcacactcagcggttcctggtggacatgaaatttggggtacaccatgccccagcacagggggtccctgggagtgtcagttaaccagaccccagcctgcatccccattgatgaatcaggcagttcctcccgtgcagccgctaagagcaaaggggacctgggagagggtgatgtggtcagtgggcaccatgccggccttgccaaatgctcaggcactctgggtaagcactgtgtaccggctcagatgttcactggctcaggtgtgcaccggctcagatgttcaccggctcaggtgttcactggctcaggtgtgtactggctcaggtgtgcactggctcaggtgtgtaccgtgcactggctcaggtgtgcaccggctcaggtgtgtaccggctcaggtgtgcaccggctcagctgtgcaccggctcagctgttcactggctcaggtgtgtaccggctcaggtgtgcactggctcaggtgtgtaccgtgcactggctcaggcgttcactggctcaggtgtgtaccggctcaggtgtgcaccggctcagctgtgcaccggctcaggtgtgcaccggctcaggtgttcaccggctcaggtgtgcaccagctcaggtgtgtaccgtgcactggctcaggtgtgcaccagctcaggtgttcactggcttaggtgtgcaccggctcagatgtgtaccagctcaggtgtgcaccggctcaggtgtgtaccggctcagatgtgtgccggctcaggtgtgcactggctcaggtgtgcaccagctcagatctgagccagcacaggtctgcaggctcccacaggtcacaacaagaagcaggtgtttctgggcgaggacctgaagcagcaggctggggctgggccaggtcccactgtggctggtggtcagcacacctttgccagcaggcgccacagcacaggtgcccagcccacagcggggcggcagggaatctgctcctggaacctgggttttctgggctggctcccgggggtgttgactgacaggagaaggctgcagaacaagaaggtcgggtttcaggctggcagcctctcctcaattacagggatgctggggtaggccagaacccggtgtcaggtggagtagaagtcacgcttcacgggaggcttctgttttttaagaagtgcctgtgggctggggggtttttggtccagagtctaggggaaggcaaagcttaccaaacagaaagtgtccactccggggtgggggactggggcctcgtctctccgctgggccaggacagggctgtgaggtccagctgcctgctcagctctgggacctgtcctcctgcaggagcccacggccgtgaacatgcacacgggcagatccacatgtcccccgaggaaaaagagagggtcaaggttgagtgtgtgggtgctagggggtgcagaactcacttctaactatgagggttgaggcgggcttcacaggggaggtgggttttgagccaggcctgcagcccggcatctggaagtggcttccaggctctccctgagctctctcctgcaggacacccctgcctgcagatctgcacccccagctccttcctggggacttgatatcatgaccctgcctggcaccccaggggtgaatgctgcacccagccctgagggtttccatctgctgggggcatctgacctgggcaggccagggtgggtgggagggagtccagcgggggaggtgcagggtggccagggggagacactgccctggctggagcctggattcactaggtcatcaccaatgcagggggtcctggctcactggactttgctactagagaaggttggggagctccacatgaaggcaagaaggctggggctcagggtgtaactcatccccggagagcaaccagaaaggccgtcggattgcaacgcagcctgcattgtcctcgctgaacgcctggtcctgtcccacctgcaccggacagcaactgcttcccctccagggcggcccccatcgtcccccaggtgctgcaagagcagtgagacttacccaagacaagtcagaggctttggagctctcgggggcggtggcttctcccaggagccccgtatctgtcagtccccccataaggggaggggagttggcaaggctcctccttgctcccagcgtgaggattgcccctacttttccggcccccacttgccccctccacctgcccttttccctccgggaagccctggaggttttccaagaactctgcgggtcgagggggcagcctatgtggggtggcggggggcctcctgcttgttggatgcccagacgcctacacctttcaccctggggtccagtcggctgatggccatgagagagaagctgagagcaaccagagcccacagctccatgctggtcccccatctgcaaacgctgggccccatgggagctgtgactcggtttccagctcgtcacagggctggccgaggccccggcatgtcaagccatctcaggttgggcaggaatgtggtccgtgttcacatgtgtctctgtgtgtgtgagagagaggggtcagctgggacgctggggtggcagggacagtcctggctcacccctcatcctccctcgacctcgactccctccacatgaggagcccccccttcctggctatcctgtgagttgagcttcctctgctgggagggctttgtcagaggttccctgcggttccagaaggaaagctggctgcagggagggccgggcactggacaccgtgtggctgagcctgtggcgggggctgcacagctgggttcccagcccccctccttgtccccaccccaccgcactgggaggccctgctgaggggccagagtccggctgcaggtcccacgggtgggggtggggcccctcattagcactgcagctgacactgagggcttccacctcgctaattgattaaactgtttagaaaccagg

SEQ ID NO: 153186 - DNA, 1900 bp, Homo sapiens
  Payload ID: 10140
  Gene Symbol: METRNL
  Gene Name: meteorin, glial cell differentiation regulator-like
  Uniprot ID: Q641Q3
  ENST ID: ENST00000634158
  CDS Start-End: 942-1631
ttctgtttagcatgtatgagggtgaacttagcttgctactcacacactactcaccctgtggaggaagttcgcctcgcttttgtggtgagtcttgctgtaatgatagcttatatttacaaataccgtcggcagtgcagggtcttcaggcttgcagaaaacggtcaagtcattactttgagaaatgtacaaacatctatgcttaatgaggtgctaaaagacaaaactcatctacaacctccttccccccaaactgccaacactctggattaacttaaaagctgctctctgggcaggttgcatcccagggctcctccttcacacgtggtggggccccaccttcgctttacctctagcgtcccagccctcgtggtcatctggaaccagggttggtacacagggcctgctggcattcctgtgatactccgtgatattctggaggaatccatcccttccctggggctccatcccactgccccagcacctccagccaccctgattcagggacatcgcagagattggtgtttgacgctacggcagcagaggcgcagactcttgagtgttggagggtgtctggagggcctggggacaagcaccgcctgcactcccgggagctcggccccgccccaccatggctcttggtgcaggtgcactggaaggaactgggtggggcccttgtgccgaagggcggagatggcgccggcctgcctcacgggcaggggtccgtgtggcacctgtggccggcagcgggtgggtccaggagccgccatcatttggagcgggtatcgtcctcactgactctctgtgggtgcgggtggggtgtgtgacgggagctccgggcctggctgacagtgtctctcctctgcagcgggctgacgcacgaggcacacaggaaggaggtggagcaggtgtatctgcgctgtgcggcgggtgccgtggagtggatgtacccaacaggtgctctcatcgttaacctgcggcccaacaccttctcgcctgcccggcacctgaccgtgtgcatcaggtccttcacggactcctcgggggccaatatttatttggaaaaaactggagaactgagactgctggtaccggacggggacggcaggcccggccgggtgcagtgttttggcctggagcagggcggcctgttcgtggaggccacgccgcagcaggatatcggccggaggaccacaggcttccagtacgagctggttaggaggcacagggcgtcggacctgcacgagctgtctgcgccgtgccgtccctgcagtgacaccgaggtgctcctagccgtctgcaccagcgacttcgccgttcgaggctccatccagcaagttacccacgagcctgagcggcaggactcagccatccacctgcgcgtgagcagactctatcggcagaaaagcagggtcttcgagccggtgcccgagggtgacggccactggcaggggcgcgtcaggacgctgctggagtgtggcgtgcggccggggcatggcgacttcctcttcactggccacatgcacttcggggaggcgcggctcggctgtgccccacgcttcaaggacttccagaggatgtacagggatgcccaggagagggggctgaacccttgtgaggttggcacggactgactccgtgggccgctgcccttcctctcctgatgagtcacaggctgcggtgggcgctgcggtcctggtggggccgtgcggtgagggccgcgcgctgggagccgcatgccctgggcccaggcctgaccctggtaccgaagctgtggacgttctcgccacactcaaccccatgagcttccagccaaggatgccctggccgattggaaatgctgtaaaatgcaaactaagttattatatttttttttggtaaaaaagaaatgtccataggaaac

SEQ ID NO: 153187 - DNA, 3013 bp, Homo sapiens
  Payload ID: 10141
  Gene Symbol: MTHFSD
  Gene Name: methenyltetrahydrofolate synthetase domain containing
  Uniprot ID: Q2M296
  ENST ID: ENST00000360900
  CDS Start-End: 27-1178
aagcgtcgcacagcgactgcatcaccatggagccgagggcagtaggtgtctccaaacaggacatacgtgaacaaatttggggctacatggaatcacaaaatttagctgactttccccgacctgttcatcacaggatacccaactttaaggggtcttatctggcttgccaaaacatcaaagacctagacgtttttgccagaacacaggaagttaaagtggaccctgataaaccactggaaggcgttcggctgctggtgctgcagagcaaaaaaacattgttggttccaacaccacgactgagaacgggattgtttaataagatcacaccaccccctggggcaactaaagacatcttgagaaaatgtgccacctctcagggtgtgaggaactacagtgtccccataggcttggactccagagtcctcgtggatttagttgtggtgggatccgtcgccgtttctgaaaaaggctggagaatcgggaagggagaaggctacgccgatctggaatatgccatgatggtatccatgggcgccgtcagcaaggagacgccggtggtcaccatcgtccacgactgccaggtcgtggacatccctgaagagcttgttgaggagcacgacatcactgtggactacatcctcactccaaccagagtcatcgccacaggctgcaagcgcccaaagccaatgggaatcacctggttcaagatcagcctggagatgatggagaaaatccccatactgaggagcctccgcgcccgagagcagcaggctgggaaggatgtcaccctccagggtgagcaccagcaccttccggaaccaggctgccagcagacagtgcccctgagtgttggcaggaggcccccggacacacccggaccagaaaccaattccatggaggcagcccctggctccccaccaggggagggtgccccgcttgcagccgatgtttacgttgggaacctccccggggacgcccgtgtgagtgacctgaagagagccctgcgggaactcggctccgtgcccctgcggctcacctggcagggcccgcggcgcagagccttcctccattacccggactctgccgcagcccagcaggccgtctcctgcttgcagggcctgcgcctgggcaccgacaccctgagggtggcgctggccaggcagcagagggacaagtgacctcgtggacagccacggagctcactgcagactcgccatccccgtcccctgccgctccggttccgatggcactcgagaggcctgcgtggcaagacgtgtcggagccaccgcctgagctgctcgggtctcaattcttctcagaagtcaccgctcagtgaacgcccaggccctcctgtgagtggggaagccgccctgcggttcatctcacagcgcgcagagactgcagcctcccaatcgtgcaggctcgggccttgagtcggtttctgtttctctggagggacagagcagaggggccagggactgagtgagtggctaagcaggggagggtgatgtgaaggtgatctcgagtttgccaggggtgggctgaacaggagaagatgaacaaaggatccggctctcaaaaggccctggcagggactggatgctgggtacagaagcgcgcccttgggcttcaggctcctgagctggcagcacggcagggagagctccatccatgtcgcaggagcccaggaagctcagcccctgggtaaaaagtgctcactgcagctcagatcagtcctcaggtcacatttcggggagccagcctcccctcttcccctccccagccccgctcctccctctgtggacacactccgggccctcagccagctggctgcatgaggagcagctttgtgctgtgggagagaccggctctgggagaatgggtttcatcccagcctacgtcacatttgcccagtgccttatgttttctgggtttttttcctccagttctgtttctaaaaaccagcttgagtttggctgaactgtcctttctcaacagaagcgcttttgcaattgatcccgggcaacaagtcaaaataagcttttaagtggagattttgtttttttcaaatgtatatgctttggaaattttgattttttagccagagggttttaccaagtgttctttgaagcacattacgatgcctcgagagggcggcccgtgcacgcgctttcaagaaaatgttctcgggacactcggtcttctctttgaaaggacattttctcattggttttgccgtgaaaatcctgtggagacttcgcaaagaaaacgcagccttacatttgctcattaaagacagatttccttcccaagtcgccatgaataaaatgagagagtagaaacgtctggaagcgccacacctggccctgggccctcggccctctgtgtccttggccttgcccccgcccgcacggctggtcacgtttgtcattgggcattcagctcagcgtcagaggctgactcagtccccagttcagagtagtcacctggttacactgaactcctcaccttcttttctctctttttttaaaaaatacttctttttctgaaagattcttatttttttttttttgtttacctttttcctgtggatttgctgccgttagaatagcaactccaggagaagagcaagtgagtcagccccccttctccactccctgccccaccggcagtgggcacagccctgcagacaggagcaaggacttcggggaatagacccactggggccgggagagggagaagctggattctgaccccaccactggcactcctgtgtccagccatgcctgacgcccaccccaccctcagacggcgggattaaaccaggcagtacagggttactcggggaagccagactgctgggatttcctgtcgctttagccagaataatccaggtatatggatatacagataatctgaaagagtttctcatttttatatttgtggaacatcgtgtaagaaaaactgaagagcaagtgcctgaaataaaatcccccacatgtatcagcctgca

SEQ ID NO: 153188 - DNA, 1210 bp, Homo sapiens
  Payload ID: 10141
  Gene Symbol: MTHFSD
  Gene Name: methenyltetrahydrofolate synthetase domain containing
  Uniprot ID: Q2M296
  ENST ID: ENST00000381214
  CDS Start-End: 20-1171
gcacagcgactgcatcaccatggagccgagggcagtaggtgtctccaaacaggacatacgtgaacaaatttggggctacatggaatcacaaaatttagctgactttccccgacctgttcatcacaggatacccaactttaagggcgcttctcatgctgccgagcaactcccacgcttgcaggcgttcaaaacggccaggaccattaaagtaaatcctgatgccccccagaaaagtgctcgcttcttcgtccttgaaagcaaaaaaacattgttggttccaacaccacgactgagaacgggattgtttaataagatcacaccaccccctggggcaactaaagacatcttgagaaaatgtgccacctctcagggtgtgaggaactacagtgtccccataggcttggactccagagtcctcgtggatttagttgtggtgggatccgtcgccgtttctgaaaaaggctggagaatcgggaagggagaaggctacgccgatctggaatatgccatgatggtatccatgggcgccgtcagcaaggagacgccggtggtcaccatcgtccacgactgccaggtcgtggacatccctgaagagcttgttgaggagcacgacatcactgtggactacatcctcactccaaccagagtcatcgccacaggctgcaagcgcccaaagccaatgggaatcacctggttcaagatcagcctggagatgatggagaaaatccccatactgaggagcctccgcgcccgagagcagcaggctgggaaggatgtcaccctccagggtgagcaccagcaccttccggaaccaggctgccagcagacagtgcccctgagtgttggcaggaggcccccggacacacccggaccagaaaccaattccatggaggcagcccctggctccccaccaggggagggtgccccgcttgcagccgatgtttacgttgggaacctccccggggacgcccgtgtgagtgacctgaagagagccctgcgggaactcggctccgtgcccctgcggctcacctggcagggcccgcggcgcagagccttcctccattacccggactctgccgcagcccagcaggccgtctcctgcttgcagggcctgcgcctgggcaccgacaccctgagggtggcgctggccaggcagcagagggacaagtgacctcgtggacagccacggagctcactgcagactcgccat

SEQ ID NO: 153189 - DNA, 2451 bp, Homo sapiens
  Payload ID: 10141
  Gene Symbol: MTHFSD
  Gene Name: methenyltetrahydrofolate synthetase domain containing
  ENST ID: ENST00000546093
  CDS Start-End: 611-1273
actacgcgccagaacctgcgccgggaagcgtcgcacagcgactgcatcaccatggagccgagggtgtctccaaacaggacatacgtgaacaaatttggggctacatggaatcacaaaatttagctgactttccccgacctgttcatcacaggatacccaactttaagggcgcttctcatgctgccgagcaactcccacgcttgcaggcgttcaaaacggccaggaccattaaagtaaatcctgatgccccccagaaaagtgctcgcttcttcgtccttgaaagcaaaaaaacattgttggttccaacaccacgactgagaacgggattgtttaataagatcacaccaccccctggggcaactaaagacatcttgagaaaatgtgccacctctcaggtgccaccagagcgactggggagacaggatagaatttccaaaacatgctccattggaaattgcctcaccagttctaaggtgtgaggaactacagtgtccccataggcttggactccagagtcctcgtggatttagttgtggtgggatccgtcgccgtttctgaaaaaggctggagaatcgggaagggagaaggctacgccgatctggaatatgccatgatggtatccatgggcgccgtcagcaaggagacgccggtggtcaccatcgtccacgactgccaggtcgtggacatccctgaagagcttgttgaggagcacgacatcactgtggactacatcctcactccaaccagagtcatcgccacaggctgcaagcgcccaaagccaatgggaatcacctggttcaagatcagcctggagatgatggagaaaatccccatactgaggagcctccgcgcccgagagcagcaggctgggaaggatgtcaccctccagggtgagcaccagcaccttccggaaccaggctgccagcagacagtgcccctgagtgttggcaggaggcccccggacacacccggaccagaaaccaattccatggaggcagcccctggctccccaccaggggagggtgccccgcttgcagccgatgtttacgttgggaacctccccggggacgcccgtgtgagtgacctgaagagagccctgcgggaactcggctccgtgcccctgcggctcacctggcagggcccgcggcgcagagccttcctccattacccggactctgccgcagcccagcaggccgtctcctgcttgcagggcctgcgcctgggcaccgacaccctgagggtggcgctggccaggcagcagagggacaagtgacctcgtggacagccacggagctcactgcagactcgccatccccgtcccctgccgctccggttccgatggcactcgagaggcctgcgtggcaagacgtgtcggagccaccgcctgagctgctcgggtctcaattcttctcagaagtcaccgctcagtgaacgcccaggccctcctgtgagtggggaagccgccctgcggttcatctcacagcgcgcagagactgcagcctcccaatcgtgcaggctcgggccttgagtcggtttctgtttctctggagggacagagcagaggggccagggactgagtgagtggctaagcaggggagggtgatgtgaaggtgatctcgagtttgccaggggtgggctgaacaggagaagatgaacaaaggatccggctctcaaaaggccctggcagggactggatgctgggtacagaagcgcgcccttgggcttcaggctcctgagctggcagcacggcagggagagctccatccatgtcgcaggagcccaggaagctcagcccctgggtaaaaagtgctcactgcagctcagatcagtcctcaggtcacatttcggggagccagcctcccctcttcccctccccagccccgctcctccctctgtggacacactccgggccctcagccagctggctgcatgaggagcagctttgtgctgtgggagagaccggctctgggagaatgggtttcatcccagcctacgtcacatttgcccagtgccttatgttttctgggtttttttcctccagttctgtttctaaaaaccagcttgagtttggctgaactgtcctttctcaacagaagcgcttttgcaattgatcccgggcaacaagtcaaaataagcttttaagtggagattttgtttttttcaaatgtatatgctttggaaattttgattttttagccagagggttttaccaagtgttctttgaagcacattacgatgcctcgagagggcggcccgtgcacgcgctttcaagaaaatgttctcgggacactcggtcttctctttgaaaggacattttctcattggttttgccgtgaaaatcctgtggagacttcgcaaagaaaacgcagccttacatttgctcattaaagacagatttccttcccaagtcgccatgaataaaatgagagagtagaaacgtctggaagcgcc

SEQ ID NO: 153190 - DNA, 1207 bp, Homo sapiens
  Payload ID: 10141
  Gene Symbol: MTHFSD
  Gene Name: methenyltetrahydrofolate synthetase domain containing
  Uniprot ID: Q2M296
  ENST ID: ENST00000543303
  CDS Start-End: 20-1168
gcacagcgactgcatcaccatggagccgagggcaggtgtctccaaacaggacatacgtgaacaaatttggggctacatggaatcacaaaatttagctgactttccccgacctgttcatcacaggatacccaactttaagggcgcttctcatgctgccgagcaactcccacgcttgcaggcgttcaaaacggccaggaccattaaagtaaatcctgatgccccccagaaaagtgctcgcttcttcgtccttgaaagcaaaaaaacattgttggttccaacaccacgactgagaacgggattgtttaataagatcacaccaccccctggggcaactaaagacatcttgagaaaatgtgccacctctcagggtgtgaggaactacagtgtccccataggcttggactccagagtcctcgtggatttagttgtggtgggatccgtcgccgtttctgaaaaaggctggagaatcgggaagggagaaggctacgccgatctggaatatgccatgatggtatccatgggcgccgtcagcaaggagacgccggtggtcaccatcgtccacgactgccaggtcgtggacatccctgaagagcttgttgaggagcacgacatcactgtggactacatcctcactccaaccagagtcatcgccacaggctgcaagcgcccaaagccaatgggaatcacctggttcaagatcagcctggagatgatggagaaaatccccatactgaggagcctccgcgcccgagagcagcaggctgggaaggatgtcaccctccagggtgagcaccagcaccttccggaaccaggctgccagcagacagtgcccctgagtgttggcaggaggcccccggacacacccggaccagaaaccaattccatggaggcagcccctggctccccaccaggggagggtgccccgcttgcagccgatgtttacgttgggaacctccccggggacgcccgtgtgagtgacctgaagagagccctgcgggaactcggctccgtgcccctgcggctcacctggcagggcccgcggcgcagagccttcctccattacccggactctgccgcagcccagcaggccgtctcctgcttgcagggcctgcgcctgggcaccgacaccctgagggtggcgctggccaggcagcagagggacaagtgacctcgtggacagccacggagctcactgcagactcgccat

SEQ ID NO: 153191 - DNA, 543 bp, Homo sapiens
  Payload ID: 10141
  Gene Symbol: MTHFSD
  Gene Name: methenyltetrahydrofolate synthetase domain containing
  ENST ID: ENST00000561522
  CDS Start-End: 494-543
actacgcgccagaacctgcgccgggaagcgtcgcacagcgactgcatcaccatggagccgagggcaggggtcttatctggcttgccaaaacatcaaagacctagacgtttttgccagaacacaggaagttaaagtggaccctgataaaccactggaaggcgttcggctgctggtgctgcaggtaattccacttccctgagccgagccgagacctggccgccaagggggacaccttttccagagcaaaaaaacattgttggttccaacaccacgactgagaacgggattgtttaataagatcacaccaccccctggggcaactaaagacatcttgagaaaatgtgccacctctcagggtgtgaggaactacagtgtccccataggcttggactccagagtcctcgtggatttagttgtggtgggatccgtcgccgtttctgaaaaaggctggagaatcgggaagggagaaggctacgccgatctggaatatgccatgatggtatccatgggcgccgtcagcaaggagacgccggtggtcaccat

SEQ ID NO: 153192 - DNA, 556 bp, Homo sapiens
  Payload ID: 10141
  Gene Symbol: MTHFSD
  Gene Name: methenyltetrahydrofolate synthetase domain containing
  ENST ID: ENST00000567539
  CDS Start-End: 52-222
actacgcgccagaacctgcgccgggaagcgtcgcacagcgactgcatcaccatggagccgagggcaggtgtctccaaacaggacatacgtgaacaaatttggggctacatggaatcacaaaatttagctgactttccccgacctgttcatcacaggatacccaactttaaggctggagaatcgggaagggagaaggctacgccgatctggaatatgccatgatggtatccatgggcgccgtcagcaaggagacgccggtggtcaccatcgtccacgactgccaggtcgtggacatccctgaagagcttgttgaggagcacgacatcactgtggactacatcctcactccaaccagagtcatcgccacaggctgcaagcgcccaaagccaatgggaatcacctggttcaagatcagcctggagatgatggagaaaatccccatactgaggagcctccgcgcccgagagcagcaggctgggaaggatgtcaccctccagggtgagcaccagcaccttccggaaccaggctgccagcagacagtgcccctgagtgttgg

SEQ ID NO: 153193 - DNA, 573 bp, Homo sapiens
  Payload ID: 10141
  Gene Symbol: MTHFSD
  Gene Name: methenyltetrahydrofolate synthetase domain containing
  ENST ID: ENST00000569000
  CDS Start-End: 52-573
actacgcgccagaacctgcgccgggaagcgtcgcacagcgactgcatcaccatggagccgagggcaggtgtctccaaacaggacatacgtgaacaaatttggggctacatggaatcacaaaatttagctgactttccccgacctgttcatcacaggatacccaactttaagagcaaaaaaacattgttggttccaacaccacgactgagaacgggattgtttaataagatcacaccaccccctggggcaactaaagacatcttgagaaaatgtgccacctctcagggtgtgaggaactacagtgtccccataggcttggactccagagtcctcgtggatttagttgtggtgggatccgtcgccgtttctgaaaaaggctggagaatcgggaagggagaaggctacgccgatctggaatatgccatgatggtatccatgggcgccgtcagcaaggagacgccggtggtcaccatcgtccacgactgccaggtcgtggacatccctgaagagcttgttgaggagcacgacatcactgtggactacatcctcactccaaccagagtcatcgccaca

SEQ ID NO: 153194 - DNA, 508 bp, Homo sapiens
  Payload ID: 10141
  Gene Symbol: MTHFSD
  Gene Name: methenyltetrahydrofolate synthetase domain containing
  ENST ID: ENST00000561989
  CDS Start-End: 173-508
ggtggggggcctggcggggctccggggcggctgggaatggggagggacagccgggaccggtgagggtcgaggcggggccaccggggctggcagaggatggggcagaatcaccggaagcggccgaggagtaggtgtctccaaacaggacatacgtgaacaaatttggggctacatggaatcacaaaatttagctgactttccccgacctgttcatcacaggatacccaactttaaggggtcttatctggcttgccaaaacatcaaagacctagacgtttttgccagaacacaggaagttaaagtggaccctgataaaccactggaaggcgttcggctgctggtgctgcagagcaaaaaaacattgttggttccaacaccacgactgagaacgggattgtttaataagatcacaccaccccctggggcaactaaagacatcttgagaaaatgtgccacctctcaggtgccaccagagcgactggggagacaggatagaatttccaaaaca

SEQ ID NO: 153195 - DNA, 560 bp, Homo sapiens
  Payload ID: 10141
  Gene Symbol: MTHFSD
  Gene Name: methenyltetrahydrofolate synthetase domain containing
  ENST ID: ENST00000568798
  CDS Start-End: 52-372
actacgcgccagaacctgcgccgggaagcgtcgcacagcgactgcatcaccatggagccgagggcagtaggtgtctccaaacaggacatacgtgaacaaatttggggctacatggaatcacaaaatttagctgactttccccgacctgttcatcacaggatacccaactttaagagcaaaaaaacattgttggttccaacaccacgactgagaacgggattgtttaataagatcacaccaccccctggggcaactaaagacatcttgagaaaatgtgccacctctcaggtgccaccagagcgactggggagacaggatagaatttccaaaacatgctccattggaaattgcctcaccagttctaaggtgtgaggaactacagtgtccccataggcttggactccagagtcctcgtggatttagttgtggtgggatccgtcgccgtttctgaaaaaggctggagaatcgggaagggagaaggctacgccgatctggaatatgccatgatggtatccatgggcgccgtcagcaaggagacgccggtggtcaccatcgtccac

SEQ ID NO: 153196 - DNA, 824 bp, Homo sapiens
  Payload ID: 10141
  Gene Symbol: MTHFSD
  Gene Name: methenyltetrahydrofolate synthetase domain containing
  ENST ID: ENST00000566469
  CDS Start-End: 1-701
gtgtctccaaacaggacatacgtgaacaaatttggggctacatggaatcacaaaatttagctgactttccccgacctgttcatcacaggatacccaactttaaggggtcttatctggcttgccaaaacatcaaagacctagacgtttttgccagaacacaggaagttaaagtggaccctgataaaccactggaaggcgttcggctgctggtgctgcagagcaaaaaaacattgttggttccaacaccacgactgagaacgggattgtttaataagatcacaccaccccctggggcaactaaagacatcttgagaaaatgtgccacctctcagggtgtgaggaactacagtgtccccataggcttggactccagagtcctcgtggatttagttgtggtgggatccgtcgccgtttctgaaaaaggctggagaatcgggaagggagaaggctacgccgatctggaatatgccatgatggtatccatgggcgccgtcagcaaggagacgccggtggtcaccatcgtccacgactgccaggtcgtggacatccctgaagagcttgttgaggagcacgacatcactgtggactacatcctcactccaaccagagtcatcgccacaggctgcaagcgcccaaagccaatgggaatcacctggttcaaggtgggtcacggcagtggccagctctggcctgtagcttagcggctcctcctcttttaagtgttttctgtctggcatgggagctgttggcaatcccagcatggctgtatgttagaatcacccaaggagcttttgagcaatttggctcctgaatgaccatgtcca

SEQ ID NO: 153197 - DNA, 565 bp, Homo sapiens
  Payload ID: 10141
  Gene Symbol: MTHFSD
  Gene Name: methenyltetrahydrofolate synthetase domain containing
  ENST ID: ENST00000562994
  CDS Start-End: 511-565
actacgcgccagaacctgcgccgggaagcgtcgcacagcgactgcatcaccatggagccgagggcaggggtcttatctggcttgccaaaacatcaaagacctagacgtttttgccagaacacaggaagttaaagtggaccctgataaaccactggaaggcgttcggctgctggtgctgcagagcaaaaaaacattgttggttccaacaccacgactgagaacgggattgtttaataagatcacaccaccccctggggcaactaaagacatcttgagaaaatgtgccacctctcaggtgccaccagagcgactggggagacaggatagaatttccaaaacatgctccattggaaattgcctcaccagttctaaggtgtgaggaactacagtgtccccataggcttggactccagagtcctcgtggatttagttgtggtgggatccgtcgccgtttctgaaaaaggctggagaatcgggaagggagaaggctacgccgatctggaatatgccatgatggtatccatgggcgccgtcagcaaggagacgccggtggtcaccatcgtcc

SEQ ID NO: 153198 - DNA, 1142 bp, Homo sapiens
  Payload ID: 10141
  Gene Symbol: MTHFSD
  Gene Name: methenyltetrahydrofolate synthetase domain containing
  ENST ID: ENST00000562940
  CDS Start-End: 1-672
ggtgtctccaaacaggacatacgtgaacaaatttggggctacatggaatcacaaaatttagctgactttccccgacctgttcatcacaggatacccaactttaaggggtcttatctggcttgccaaaacatcaaagacctagacgtttttgccagaacacaggaagttaaagtggaccctgataaaccactggaaggcgttcggctgctggtgctgcagagcaaaaaaacattgttggttccaacaccacgactgagaacgggattgtttaataagatcacaccaccccctggggcaactaaagacatcttgagaaaatgtgccacctctcagggtgtgaggaactacagtgtccccataggcttggactccagagtcctcgtggatttagttgtggtgggatccgtcgccgtttctgaaaaaggctggagaatcgggaagggagaaggctacgccgatctggaatatgccatgatggtatccatgggcgccgtcagcaaggagacgccggtggtcaccatcgtccacgactgccaggtcgtggacatccctgaagagcttgttgaggagcacgacatcactgtggactacatcctcactccaaccagagtcatcgccacaggctgcaagcgcccaaagccaatgggaatcacctggttcaagattaggtaatggcacaggttgcaaattagtctgcagtaggagtttgaccctgcaaatcagcctgtaggttatgatgctgtctctgctggcaaacagccagaattactgagaagacatttgtgcttcgtgtggacaaaactactggtcaaataagcatacgtgtccacgtctcccattctttaatcccaaatcattcaccgtttgaatccctcctttgggcatggaaaattaacaacatcacctctaaggatgaacacagaatacctgctgcttttgccacagcccagccgggactttccctgcaggtgtcctgggcaggcactgctggggactcccaggtgtgcactcctcggttggccgctgatgaacgcagagggaacagcctttgtaacccagagtgtatgggcggccctctaagcgcaccaggagcactgggaaagaaggtggtcactgctcttccaggaaatgaaaatatccct

SEQ ID NO: 153199 - DNA, 1270 bp, Homo sapiens
  Payload ID: 10141
  Gene Symbol: MTHFSD
  Gene Name: methenyltetrahydrofolate synthetase domain containing
  ENST ID: ENST00000566050
  CDS Start-End: 20-274
gcacagcgactgcatcaccatggagccgagggcagtaggtgtctccaaacaggacatacgtgaacaaatttggggctacatggaatcacaaaatttagctgactttccccgacctgttcatcacaggatacccaactttaaggggtcttatctggcttgccaaaacatcaaagacctagacgtttttgccagaacacaggaagttaaagtggaccctgataaaccactggaaggcgttcggctgctggtgctgcaggtaattccacttccctgagccgagccgagacctggccgccaagggggacaccttttccagagcaaaaaaacattgttggttccaacaccacgactgagaacgggattgtttaataagatcacaccaccccctggggcaactaaagacatcttgagaaaatgtgccacctctcagggtgtgaggaactacagtgtccccataggcttggactccagagtcctcgtggatttagttgtggtgggatccgtcgccgtttctgaaaaaggctggagaatcgggaagggagaaggctacgccgatctggaatatgccatgatggtatccatgggcgccgtcagcaaggagacgccggtggtcaccatcgtccacgactgccaggtcgtggacatccctgaagagcttgttgaggagcacgacatcactgtggactacatcctcactccaaccagagtcatcgccacaggctgcaagcgcccaaagccaatgggaatcacctggttcaagatcagcctggagatgatggagaaaatccccatactgaggagcctccgcgcccgagagcagcaggctgggaaggatgtcaccctccagggtgagcaccagcaccttccggaaccaggctgccagcagacagtgcccctgagtgttggcaggaggcccccggacacacccggaccagaaaccaattccatggaggcagcccctggctccccaccaggggagggtgccccgcttgcagccgatgtttacgttgggaacctccccggggacgcccgtgtgagtgacctgaagagagccctgcgggaactcggctccgtgcccctgcggctcacctggcagggcccgcggcgcagagccttcctccattacccggactctgccgcagcccagcaggccgtctcctgcttgcagggcctgcgcctgggcaccgacaccctgagggtggcgctggccaggcagcagagggacaagtgacctcgtggacagccacggagctcactgcagactcgccat

SEQ ID NO: 153200 - DNA, 581 bp, Homo sapiens
  Payload ID: 10141
  Gene Symbol: MTHFSD
  Gene Name: methenyltetrahydrofolate synthetase domain containing
  ENST ID: ENST00000565482
  CDS Start-End: 315-581
ggttcgggtcgaaccagcggctctctcgcccggaatcccgagaaagatgtcaggaaaaataaagataacgagaagacgaggcgggagggacacctgccgtgcacgtgggggagcccgtgggccccttgaggtcggggaaactgaggctcaggaacaggatcggaagccggtttgacctacacgcgggggtcgcttaactactgttaagcggtttcagcatgggctctggaattcctttgtatgttattaagtgggaatcttttgttgcagtaggtgtctccaaacaggacatacgtgaacaaatttggggctacatggaatcacaaaatttagctgactttccccgacctgttcatcacaggatacccaactttaaggggtcttatctggcttgccaaaacatcaaagacctagacgtttttgccagaacacaggaagttaaagtggaccctgataaaccactggaaggcgttcggctgctggtgctgcagagcaaaaaaacattgttggttccaacaccacgactgagaacgggattgtttaataagatcacaccaccccctggggcaactaaagacatc

SEQ ID NO: 153201 - DNA, 493 bp, Homo sapiens
  Payload ID: 10141
  Gene Symbol: MTHFSD
  Gene Name: methenyltetrahydrofolate synthetase domain containing
  ENST ID: ENST00000564364
  CDS Start-End: 158-493
ggggctccggggcggctgggaatggggagggacagccgggaccggtgagggtcgaggcggggccaccggggctggcagaggatggggcagaatcaccggaagcggccgaggagtaggtgtctccaaacaggacatacgtgaacaaatttggggctacatggaatcacaaaatttagctgactttccccgacctgttcatcacaggatacccaactttaagggcgcttctcatgctgccgagcaactcccacgcttgcaggcgttcaaaacggccaggaccattaaagtaaatcctgatgccccccagaaaagtgctcgcttcttcgtccttgaaagcaaaaaaacattgttggttccaacaccacgactgagaacgggattgtttaataagatcacaccaccccctggggcaactaaagacatcttgagaaaatgtgccacctctcagggtgtgaggaactacagtgtccccataggcttggactccagagtc

SEQ ID NO: 153202 - DNA, 845 bp, Homo sapiens
  Payload ID: 10141
  Gene Symbol: MTHFSD
  Gene Name: methenyltetrahydrofolate synthetase domain containing
  ENST ID: ENST00000568037
  CDS Start-End: 1-459
ccgagggcagtaggtgtctccaaacaggacatacgtgaacaaatttggggctacatggaatcacaaaatttagctgactttccccgacctgttcatcacaggatacccaactttaagggcgcttctcatgctgccgagcaactcccacgcttgcaggcgttcaaaacggccaggaccattaaagtaaatcctgatgccccccagaaaagtgctcgcttcttcgtccttgaaagcaaaaaaacattgttggttccaacaccacgactgagaacgggattgtttaataagatcacaccaccccctggggcaactaaagacatcttgagaaaatgtgccacctctcaggtgccaccagagcgactggggagacaggatagaatttccaaaacatgctccattggaaattgcctcaccagttctaattggtcagtgcctgcccccgtggaccctgcgagatgatgagaacacagggtttcctgcagtgcagggtttcctggactaagcccccttctgtgactgtcgggagacccccaagccacccgtatgcactgatccatacggaacttgtcatagcactgcaggcagatcccaccgccacatcgaatgatcagttactgctggatacgggactgaaaatggctttttcctgagtcttacataaaccgtgttatgagaaccatgaacatattcagcttccctattctttatatgcatgcctgcattagtataaagcggtacacttttgggacattttggttgaagggataattttttagaagcgagtatattgtacataaagatagtggccttcaggattttatattgaataaatatgtcatacagtg

SEQ ID NO: 153203 - DNA, 1207 bp, Homo sapiens
  Payload ID: 10141
  Gene Symbol: MTHFSD
  Gene Name: methenyltetrahydrofolate synthetase domain containing
  ENST ID: ENST00000634347
  CDS Start-End: 20-1168
gcacagcgactgcatcaccatggagccgagggcaggtgtctccaaacaggacatacgtgaacaaatttggggctacatggaatcacaaaatttagctgactttccccgacctgttcatcacaggatacccaactttaaggggtcttatctggcttgccaaaacatcaaagacctagacgtttttgccagaacacaggaagttaaagtggaccctgataaaccactggaaggcgttcggctgctggtgctgcagagcaaaaaaacattgttggttccaacaccacgactgagaacgggattgtttaataagatcacaccaccccctggggcaactaaagacatcttgagaaaatgtgccacctctcagggtgtgaggaactacagtgtccccataggcttggactccagagtcctcgtggatttagttgtggtgggatccgtcgccgtttctgaaaaaggctggagaatcgggaagggagaaggctacgccgatctggaatatgccatgatggtatccatgggcgccgtcagcaaggagacgccggtggtcaccatcgtccacgactgccaggtcgtggacatccctgaagagcttgttgaggagcacgacatcactgtggactacatcctcactccaaccagagtcatcgccacaggctgcaagcgcccaaagccaatgggaatcacctggttcaagatcagcctggagatgatggagaaaatccccatactgaggagcctccgcgcccgagagcagcaggctgggaaggatgtcaccctccagggtgagcaccagcaccttccggaaccaggctgccagcagacagtgcccctgagtgttggcaggaggcccccggacacacccggaccagaaaccaattccatggaggcagcccctggctccccaccaggggagggtgccccgcttgcagccgatgtttacgttgggaacctccccggggacgcccgtgtgagtgacctgaagagagccctgcgggaactcggctccgtgcccctgcggctcacctggcagggcccgcggcgcagagccttcctccattacccggactctgccgcagcccagcaggccgtctcctgcttgcagggcctgcgcctgggcaccgacaccctgagggtggcgctggccaggcagcagagggacaagtgacctcgtggacagccacggagctcactgcagactcgccat

SEQ ID NO: 153204 - DNA, 3410 bp, Homo sapiens
  Payload ID: 10142
  Gene Symbol: MAT1A
  Gene Name: methionine adenosyltransferase I, alpha
  Uniprot ID: Q00266
  ENST ID: ENST00000372213
  CDS Start-End: 262-1449
atataggagtcgctcaggagcaagctgtggcaagctggagggagggacacatcccgtgttccatccactccctcccttctcagcagtcctcgcctgttctcacgtgctcacaggcagttaggcagaagtgatccccgtggctctgccaaagacaagcctgttgggttgaaagaagaagaagaagaagaaaaaaaaactcaggcaaagtcacagcctcaaaattgttcactgaaagaagcgtgagtggagaagtgtgagaagatgaatggaccggtggatggcttgtgtgaccactctctaagtgaaggagtcttcatgttcacatcggagtctgtgggagagggacacccggataagatctgtgaccagatcagtgatgcagtgctggatgcccatctcaagcaagaccccaatgccaaggtggcctgtgagacagtgtgcaagaccggcatggtgctgctgtgtggtgagatcacctcaatggccatggtggactaccagcgggtggtgagggacaccatcaagcacatcggctacgatgactcagccaagggctttgacttcaagacttgcaacgtgctggtggctttggagcagcaatccccagatattgcccagtgcgtccatctggacagaaatgaggaggatgtgggggcaggagatcagggtttgatgttcggctatgctaccgacgagacagaggagtgcatgcccctcaccatcatccttgctcacaagctcaacgcccggatggcagacctcaggcgctccggcctcctcccctggctgcggcctgactctaagactcaggtgacagttcagtacatgcaggacaatggcgcagtcatccctgtgcgcatccacaccatcgtcatctctgtgcagcacaacgaagacatcacgctggaggagatgcgcagggccctgaaggagcaagtcatcagggccgtggtgccggccaagtacctggacgaagacaccgtctaccacctgcagcccagtgggcggtttgtcatcggaggtccccagggggatgcgggtgtcactggccgtaagattattgtggacacctatggcggctggggggctcatggtggtggggccttctctgggaaggactacaccaaggtagaccgctcagctgcatatgctgcccgctgggtggccaagtctctggtgaaagcagggctctgccggagagtgcttgtccaggtttcctatgccattggtgtggccgagccgctgtccatttccatcttcacctacggaacctctcagaagacagagcgagagctgctggatgtggtgcataagaacttcgacctccggccgggcgtcattgtcagggatttggacttgaagaagcccatctaccagaagacagcatgctacggccatttcggaagaagcgagttcccatgggaggttcccaggaagcttgtattttagagccagggggagctgggcctggtctcaccctggaggcacctggtggccatgctcctcttccccagacgcctggctgctgatcgccttccccacccaccaaccctcagggcaaagccaggtccctctcatttagcctgtcctgtcatcatcatggccagctggaggcaggggcttcctggtgctggaggttggatcttgatgtaaggatgggcatggtgttctcctgctgctccctcagactggggcaatgttaatttagtggaaaaggcacccccgtcaagagtgaattccctcactcgtctcccccaacagctggaccctgaccagctccccctccctccccttgcctgtgccaggtgaggtcagcacatctcaacaggcctcagggctccttgtgggcctgggctcctggacccccctttcacaggcagccagtgccctgagccagggtctccagaaagccccacccaggccaggcatgtggcaggggttagagcaggactgatgtctcctaagcacctgtaatgtgcgagggacccagctaataactgatctcgttttttcttcactgcaacatgatgaggtagtaccttttatatcccatttatagatgggggaaagcaaagcacagagagtctggataacttccacagggtcccacagccacgtgtttagacctagatgtataactaggagctttgactcaggagcctgtgacataccccctcccccaccgttgtctcatgccagtaacaggctcaaacaatgacaaagcagattcagaaatgaggccatggactctgtcctgaaggcctgaggttactggaaattaggggattaacccactagctcttgttgagccgtgggcaattgtctgaaaagtgaagacagaaccacagggctattttgtttgcttcatgtgtcccagaagatgactgagggtgagttggcttacctggcccatcagggtaggctggagttagggactgaccagcagctttagaatcccagccccctgaccactcagagacatgcagagattgggtttttggacttctggggtaagtggtctaagtccagtccagtcctatctgggcttcctggagcagaagcagcaacttgtcctagcacagatggccagccccttagacagaggccctcaagtctttctctttccctggtcccttgtatcccctgcaggctgagtgcatttggagggagtgagtggccctttcggatccagggaggctggtcctatggcctcatgttaaataggcggggcttgccttctggtgttggacaagcttctgagacgtcatgaggagattctgcctttgccaggtgactgtctggggagcgggtctgctcccaaggggcctgagcagtccttggcctgctaaggtcttggaacttgcctgcctttccatccatggccagcagcacctgccctacctgccccacttgtccttagcctggacctctgacagcagcatctctaccttctccccagctcccaggaccacaggctcaggcaggggcctccatgggccccaggggaacactggggacttggcctctctctagggtacatggtgctgggagaggcagcccaggaagtctcatctggggagcaggcagccagcatctgggccttggcctggagcacaaagaccctggctttcattttctctcaggtgaaaggaaattaaggcaacaaaagaagcccggctcctggtcacctaggaagcctcagattccttcccatggagggagggagtggtttgcaggtggccaagttcctctaacttggctcacactcgacatgaaaattcagaattttatactttccctaccctctagagaaataagatcttttttgtcagtttgtttgtatgaaactaaagcctttatttgttaatagttcctgctaaaacaatgaataaaaactcaaggagcaacta

SEQ ID NO: 153205 - DNA, 435 bp, Homo sapiens
  Payload ID: 10142
  Gene Symbol: MAT1A
  Gene Name: methionine adenosyltransferase I, alpha
  ENST ID: ENST00000455001
  CDS Start-End: 1-435
gagtctgtgggagagggacacccggataagatctgtgaccagatcagtgatgcagtgctggatgcccatctcaagcaagaccccaatgccaaggtggcctgtggctttgacttcaagacttgcaacgtgctggtggctttggagcagcaatccccagatattgcccagtgcgtccatctggacagaaatgaggaggatgtgggggcaggagatcagggtttgatgttcggctatgctaccgacgagacagaggagtgcatgcccctcaccatcatccttgctcacaagctcaacgcccggatggcagacctcaggcgctccggcctcctcccctggctgcggcctgactctaagactcaggtgacagttcagtacatgcaggacaatggcgcagtcatccctgtgcgcatccacaccatcgtcatctctgtgcag

SEQ ID NO: 153206 - DNA, 2819 bp, Homo sapiens
  Payload ID: 10143
  Gene Symbol: MAT2A
  Gene Name: methionine adenosyltransferase II, alpha
  Uniprot ID: P31153
  ENST ID: ENST00000306434
  CDS Start-End: 124-1311
ttcgttcgctccgcgccgcccgcctgctacgagtagaacgctgtccgcagcttgcgcatttcgcagccgctgccgcctcgccgctgctccttcgtaaggccacttccgcacaccgacaccaacatgaacggacagctcaacggcttccacgaggcgttcatcgaggagggcacattccttttcacctcagagtcggtcggggaaggccacccagataagatttgtgaccaaatcagtgatgctgtccttgatgcccaccttcagcaggatcctgatgccaaagtagcttgtgaaactgttgctaaaactggaatgatccttcttgctggggaaattacatccagagctgctgttgactaccagaaagtggttcgtgaagctgttaaacacattggatatgatgattcttccaaaggttttgactacaagacttgtaacgtgctggtagccttggagcaacagtcaccagatattgctcaaggtgttcatcttgacagaaatgaagaagacattggtgctggagaccagggcttaatgtttggctatgccactgatgaaactgaggagtgtatgcctttaaccattgtcttggcacacaagctaaatgccaaactggcagaactacgccgtaatggcactttgccttggttacgccctgattctaaaactcaagttactgtgcagtatatgcaggatcgaggtgctgtgcttcccatcagagtccacacaattgttatatctgttcagcatgatgaagaggtttgtcttgatgaaatgagggatgccctaaaggagaaagtcatcaaagcagttgtgcctgcgaaataccttgatgaggatacaatctaccacctacagccaagtggcagatttgttattggtgggcctcagggtgatgctggtttgactggacgcaaaatcattgtggacacttatggcggttggggtgctcatggaggaggtgccttttcaggaaaggattataccaaggtcgaccgttcagctgcttatgctgctcgttgggtggcaaaatcccttgttaaaggaggtctgtgccggagggttcttgttcaggtctcttatgctattggagtttctcatccattatctatctccattttccattatggtacctctcagaagagtgagagagagctattagagattgtgaagaagaatttcgatctccgccctggggtcattgtcagggatctggatctgaagaagccaatttatcagaggactgcagcctatggccactttggtagggacagcttcccatgggaagtgcccaaaaagcttaaatattgaaagtgttagccttttttccccagacttgttggcgtaggctacagagaagccttcaagctctgagggaaagggccctccttcctaaattttcctgtcctctttcagctcctgaccagttgcagtcactctagtcaatgacatgaattttagcttttgtgggggactgtaagttgggcttgctattctgtccctaggtgttttgttcaccattataatgaatttagtgagcataggtgatccatgtaactgcctagaaacaacactgtagtaaataatgctttgaaattgaacctttgtgccctatcacccaacgctccaaagtcataattgcattgactttccccaccagatgctgaaaatgtccttgtgatgtgcacgtaaagtacttgtagttccacttatagcctctgtctggcaatgccacagccctgtcagcatgaatttgtaatgtcttgagctctattatgaatgtgaagccttccccttatcctccctgtaacttgatccatttctaattatgtagctctttgtcagggagtgttccctatccaatcaatcttgcatgtaacgcaagttcccagttggagctccagcctgacatcaaaaaaggcagttaccattaaaccatctccctggtgcttatgctcttaattgccacctctaacagcaccaaatcaaaatctctccactttcagctgtcttttggaggacgtacgtaataaggttttaatttagtaaaccaatcctatgcatggtttcagcactagccaaacctcaccaactcctagttctagaaaaacaggcacttggcagccttgtgatgtcatacagagaagtcacagggcagtacctgagggtctgtaggttgcacactttggtaccagataacttttttttttctttataagaaagcctgagtactccacactgcacaataactcctcccagggttttaactttgttttattttcaaaaccaggtccaatgagctttctgaacagctggtgtagctacagagaaaccagcttccttcagagagcagtgcttttggcggggaggaggaaatcccttcatacttgaacgttttctaattgcttatttattgtattctggggtatggcgtaagtacagagaagccatcacctcagatggcagcttttaaaagattttttttttttctctcaacaccatgattcctttaacaacatgtttccagcattcccaggtaggccaaggtgtcctacagaaaaaccttgggttagacctacagggggtctggctggtgttaacagaagggagggcagagctggtgcggctggccatggagaaagctgacttggctggtgtggtacagagaagccagcttgtttacatgcttattccatgactgcttgccctaagcagaaagtgcctttcaggatctatttttggaggtttattacgtatgtctggttctcaattccaacagtttaatgaagatctaaataaaatgctaggttctaccttaa

SEQ ID NO: 153207 - DNA, 1927 bp, Homo sapiens
  Payload ID: 10143
  Gene Symbol: MAT2A
  Gene Name: methionine adenosyltransferase II, alpha
  Uniprot ID: P31153
  ENST ID: ENST00000409017
  CDS Start-End: 458-1357
aaaacgtgaagggcgggggctgtggtcgctagtgagttctggccgggaagggagggcactgttaacccctcccggccctgccgtctgacaaacctggagtgggcgacccgccccgcgtgctcgcgtccggccctcgggagcgcgcgccccgcattgcagcggcgaccacgtgtttgccgcatgtggtatctgggcgagggggagccgtgagcctccccggctgtcctggccctcagtttgaggggtggggggcctatgccttgggacgtcgtctggctccactgcctcagtggttaggtcttgactacacactggagaatacgcacatgcccttcggcggatatggccttgcctccaagataagatttgtgaccaaatcagtgatgctgtccttgatgcccaccttcagcaggatcctgatgccaaagtagcttgtgaaactgttgctaaaactggaatgatccttcttgctggggaaattacatccagagctgctgttgactaccagaaagtggttcgtgaagctgttaaacacattggatatgatgattcttccaaaggttttgactacaagacttgtaacgtgctggtagccttggagcaacagtcaccagatattgctcaaggtgttcatcttgacagaaatgaagaagacattggtgctggagaccagggcttaatgtttggctatgccactgatgaaactgaggagtgtatgcctttaaccattgtcttggcacacaagctaaatgccaaactggcagaactacgccgtaatggcactttgccttggttacgccctgattctaaaactcaagttactgtgcagtatatgcaggatcgaggtgctgtgcttcccatcagagtccacacaattgttatatctgttcagcatgatgaagaggtttgtcttgatgaaatgagggatgccctaaaggagaaagtcatcaaagcagttgtgcctgcgaaataccttgatgaggatacaatctaccacctacagccaagtggcagatttgttattggtgggcctcagggtgatgctggtttgactggacgcaaaatcattgtggacacttatggcggttggggtgctcatggaggaggtgccttttcaggaaaggattataccaaggtcgaccgttcagctgcttatgctgctcgttgggtggcaaaatcccttgttaaaggaggtctgtgccggagggttcttgttcaggtctcttatgctattggagtttctcatccattatctatctccattttccattatggtacctctcagaagagtgagagagagctattagagattgtgaagaagaatttcgatctccgccctggggtcattgtcaggtaaagatggtaaagcctgttgctagtcaagtattgagggtgttgggtgtgtgtgtatatacttaaggctgaggaggtgaaggtgtgaaggaagactcctcaaatgggaatatattttaattcctggaacagttttgaactgctgccttagtgaagacttagttatttgagaaatttaaaattacggtgctccatggcttaggctaaccactctagagaatgttccagatttgatatttgagctttgtgctcttctacttaagggtgttaagaaaatagagataaagtgggttgctcaaggtttgttgcaatgtaaaaaccatggtagggtgtgggcggcgggaccttggtaagtattgtgtgatctcaggtgagctttttgacaattgaaatttctcagaataatgacaagttttcgtatttgttgagccagggacggaaaaacaactatagttactaataaggactgtgcaaggagtttggacaccagggaagtaacacttttgccacaaatttttttcctagcatatcccagagaactcatttgccagagctcttgaaaatgagtcttgct

SEQ ID NO: 153208 - DNA, 2226 bp, Homo sapiens
  Payload ID: 10144
  Gene Symbol: MAT2B
  Gene Name: methionine adenosyltransferase II, beta
  Uniprot ID: Q9NZL9
  ENST ID: ENST00000280969
  CDS Start-End: 282-1253
gcaaatagacccaggcttgactggcaattaaacatgaaacttctcattgggtattttcgagactactacggggaatcagctaccagcttactgccatgtggagaactgcacgagattccgggattggaatcaaaatgctaatttaaaaggtcaagtgaagctgctcctcacgttttggcgtgcctgcgctctctgcaggcagaagcgaacaaagacccagcaagagaaggcagaggctaagacccatcccgtatctgctctcctgaaataattctggagtcatgcctgaaatgccagaggacatggagcaggaggaagttaacatccctaataggagggttctggttactggtgccactgggcttcttggcagagctgtacacaaagaatttcagcagaataattggcatgcagttggctgtggtttcagaagagcaagaccaaaatttgaacaggttaatctgttggattctaatgcagttcatcacatcattcatgattttcagccccatgttatagtacattgtgcagcagagagaagaccagatgttgtagaaaatcagccagatgctgcctctcaacttaatgtggatgcttctgggaatttagcaaaggaagcagctgctgttggagcatttctcatctacattagctcagattatgtatttgatggaacaaatccaccttacagagaggaagacataccagctcccctaaatttgtatggcaaaacaaaattagatggagaaaaggctgtcctggagaacaatctaggagctgctgttttgaggattcctattctgtatggggaagttgaaaagctcgaagaaagtgctgtgactgttatgtttgataaagtgcagttcagcaacaagtcagcaaacatggatcactggcagcagaggttccccacacatgtcaaagatgtggccactgtgtgccggcagctagcagagaagagaatgctggatccatcaattaagggaacctttcactggtctggcaatgaacagatgactaagtatgaaatggcatgtgcaattgcagatgccttcaacctccccagcagtcacttaagacctattactgacagccctgtcctaggagcacaacgtccgagaaatgctcagcttgactgctccaaattggagaccttgggcattggccaacgaacaccatttcgaattggaatcaaagaatcactttggcctttcctcattgacaagagatggagacaaacggtctttcattagtttatttgtgttgggttcttttttttttttaaatgaaaagtatagtatgtggcactttttaaagaacaaaggaaatagttttgtatgagtactttaattgtgactcttaggatctttcaggtaaatgatgctcttgcactagtgaaattgtctaaagaaactaaagggcagtcatgccctgtttgcagtaatttttctttttatcattttgtttgtcctggctaaacttggagtttgagtatagtaaattatgatccttaaatatttgagagtcaggatgaagcagatctgctgtagacttttcagatgaaattgttcattctcgtaacctccatattttcaggatttttgaagctgttgaccttttcatgttgattattttaaattgtgtgaaatagtataaaaatcattggtgttcattatttgctttgcctgagctcagatcaaaatgtttgaagaaaggaactttatttttgcaagttacgtacagtttttatgcttgagatatttcaacatgttatgtatattggaacttctacagcttgatgcctcctgcttttatagcagtttatggggagcacttgaaagagcgtgtgtacatgtattttttttctaggcaaacattgaatgcaaacgtgtatttttttaatataaatatataactgtccttttcatcccatgttgccgctaagtgatatttcatatgtgtggttatactcataataatgggccttgtaagtcttttcaccattcatgaataataataaatatgtactgctggcatgtaatgcttagttttcttgtatttacttctttttttaaatgtaaggaccaaacttctaaactaattgttcttttgttgctttaatttttaaaaattacattcttctgatgtaacatgtgatacatacaaaagaatatagtttaatatgtattgaaataaaacacaataaaattaacacttgatccagaa

SEQ ID NO: 153209 - DNA, 2103 bp, Homo sapiens
  Payload ID: 10144
  Gene Symbol: MAT2B
  Gene Name: methionine adenosyltransferase II, beta
  Uniprot ID: Q9NZL9
  ENST ID: ENST00000321757
  CDS Start-End: 140-1144
gcagcggaagccggaagcggcgagcggggtcgttctgggcctaggggaggcgggccgagggcgtctgagctgaggcccgcgtcgatcctgggttggaggaggtggcggccgctgaggctgcggcgtgaagacggcgggcatggtggggcgggagaaagagctctctatacactttgttcccgggagctgtcggctggtggaggaggaagttaacatccctaataggagggttctggttactggtgccactgggcttcttggcagagctgtacacaaagaatttcagcagaataattggcatgcagttggctgtggtttcagaagagcaagaccaaaatttgaacaggttaatctgttggattctaatgcagttcatcacatcattcatgattttcagccccatgttatagtacattgtgcagcagagagaagaccagatgttgtagaaaatcagccagatgctgcctctcaacttaatgtggatgcttctgggaatttagcaaaggaagcagctgctgttggagcatttctcatctacattagctcagattatgtatttgatggaacaaatccaccttacagagaggaagacataccagctcccctaaatttgtatggcaaaacaaaattagatggagaaaaggctgtcctggagaacaatctaggagctgctgttttgaggattcctattctgtatggggaagttgaaaagctcgaagaaagtgctgtgactgttatgtttgataaagtgcagttcagcaacaagtcagcaaacatggatcactggcagcagaggttccccacacatgtcaaagatgtggccactgtgtgccggcagctagcagagaagagaatgctggatccatcaattaagggaacctttcactggtctggcaatgaacagatgactaagtatgaaatggcatgtgcaattgcagatgccttcaacctccccagcagtcacttaagacctattactgacagccctgtcctaggagcacaacgtccgagaaatgctcagcttgactgctccaaattggagaccttgggcattggccaacgaacaccatttcgaattggaatcaaagaatcactttggcctttcctcattgacaagagatggagacaaacggtctttcattagtttatttgtgttgggttcttttttttttttaaatgaaaagtatagtatgtggcactttttaaagaacaaaggaaatagttttgtatgagtactttaattgtgactcttaggatctttcaggtaaatgatgctcttgcactagtgaaattgtctaaagaaactaaagggcagtcatgccctgtttgcagtaatttttctttttatcattttgtttgtcctggctaaacttggagtttgagtatagtaaattatgatccttaaatatttgagagtcaggatgaagcagatctgctgtagacttttcagatgaaattgttcattctcgtaacctccatattttcaggatttttgaagctgttgaccttttcatgttgattattttaaattgtgtgaaatagtataaaaatcattggtgttcattatttgctttgcctgagctcagatcaaaatgtttgaagaaaggaactttatttttgcaagttacgtacagtttttatgcttgagatatttcaacatgttatgtatattggaacttctacagcttgatgcctcctgcttttatagcagtttatggggagcacttgaaagagcgtgtgtacatgtattttttttctaggcaaacattgaatgcaaacgtgtatttttttaatataaatatataactgtccttttcatcccatgttgccgctaagtgatatttcatatgtgtggttatactcataataatgggccttgtaagtcttttcaccattcatgaataataataaatatgtactgctggcatgtaatgcttagttttcttgtatttacttctttttttaaatgtaaggaccaaacttctaaactaattgttcttttgttgctttaatttttaaaaattacattcttctgatgtaacatgtgatacatacaaaagaatatagtttaatatgtattgaaataaaacacaataaaattaa

SEQ ID NO: 153210 - DNA, 698 bp, Homo sapiens
  Payload ID: 10144
  Gene Symbol: MAT2B
  Gene Name: methionine adenosyltransferase II, beta
  ENST ID: ENST00000421814
  CDS Start-End: 104-698
gggcctaggggaggcgggccgagggcgtctgagctgaggcccgcgtcgatcctgggttggaggaggtggcggccgctgaggctgcggcgtgaagacggcgggcatggtggggcgggagaaagagctctctatacactttgttcccgggagctgtcggctggtggagccccatgttatagtacattgtgcagcagagagaagaccagatgttgtagaaaatcagccagatgctgcctctcaacttaatgtggatgcttctgggaatttagcaaaggaagcagctgctgttggagcatttctcatctacattagctcagattatgtatttgatggaacaaatccaccttacagagaggaagacataccagctcccctaaatttgtatggcaaaacaaaattagatggagaaaaggctgtcctggagaacaatctaggagctgctgttttgaggattcctattctgtatggggaagttgaaaagctcgaagaaagtgctgtgactgttatgtttgataaagtgcagttcagcaacaagtcagcaaacatggatcactggcagcagaggttccccacacatgtcaaagatgtggccactgtgtgccggcagctagcagagaagagaatgctggatccatcaattaagggaacctttcactggtctggcaatgaacagatgactaagtatgaaatggcatgtg

SEQ ID NO: 153211 - DNA, 3409 bp, Homo sapiens
  Payload ID: 10144
  Gene Symbol: MAT2B
  Gene Name: methionine adenosyltransferase II, beta
  Uniprot ID: Q9NZL9
  ENST ID: ENST00000518095
  CDS Start-End: 74-853
gagctgaggcccgcgtcgatcctgggttggaggaggtggcggccgctgaggctgcggcgtgaagacggcgggcatggtggggcgggagaaagagctctctatacactttgttcccgggagctgtcggctggtggaggaggaagttaacatccctaataggagggttctggttactggtgccactgggcttcttggcagagctgtacacaaagaatttcagcagaataattggcatgcagttggctgtggtttcagaagagcaagaccaaaatttgaacaggttaatctgttggattctaatgcagttcatcacatcattcatgattttcagccccatgttatagtacattgtgcagcagagagaagaccagatgttgtagaaaatcagccagatgctgcctctcaacttaatgtggatgcttctgggaatttagcaaaggaagcagctgctgttggagcatttctcatctacattagctcagattatgtatttgatggaacaaatccaccttacagagaggaagacataccagctcccctaaatttgtatggcaaaacaaaattagatggagaaaaggctgtcctggagaacaatctaggagctgctgttttgaggattcctattctgtatggggaagttgaaaagctcgaagaaagtgctgtgactgttatgtttgataaagtgcagttcagcaacaagtcagcaaacatggatcactggcagcagaggttccccacacatgtcaaagatgtggccactgtgtgccggcagctagcagagaagagaatgctggtaagaaggattcctgagtcctgtcttagcgaaggtccgctttgtcttttccatgcttgaactttcacagctgtacttggagtgttactgagtgaaagccaaaagtgcttttttaaaactaggagaccaaacaaaagtagtttacatatacactgtattcatgaagaataaaaatattatgctcttctgtttgaatttatttcttatgtactatagatcccatcatttcttttattgcaaagtgttaggaaacttcaaaataatcatctaaggtcttttaagaagatactctttgggggctgggcgtgatggctcacacctgtaatcccagcacatttgaaaaagttggtattaaatataatatccatacaaagaaagatgagactgatttagtttagaatattaataggatgaccacagttttttaatatatgagaattatattttgtaatatataacatgacaatatttaagaaagtttagctcaacttgaaaaatggttctattaagtttttgttgtagcttgggataattaaaaatactcattaaattgtactgttttcataaaaatttgtaatgcttttttatattcccactaattaagtaaaattggagcctttttttgattttaaaaattcttaaggtttaaattctagaaattgctcttttaagtgttttgctaagagtattagtaggaatttgattttagatatcttgtggagacctttccagaaaaagagggttgccttttagttcctggaccttattttaagtaagctttttggtcaaacctattctactcagctcaaaaagttgaaactattgaatttattgtgtcatcgttcttaggatccatcaattaagggaacctttcactggtctggcaatgaacagatgactaagtatgaaatggcatgtgcaattgcagatgccttcaacctccccagcagtcacttaagacctgtaagtacatggctgtaaaaacctttagatccattgctatggtatatattattgctgtgttgggtaacttcatttctcagtactaatcaaagtgaactttgcttgtatgctggctgttcatagtgctacttttctctaaattatcatctgtagagaagatcatgagtattgaagtttgtagaaaatgtattattgtcttgatcatgacaggcatttggtttatttttccagggatgatcaaatcagatttcttacactaagagcaaaaataagtagcaaatataaaacctcaaaatggccaggcacaatggctcatgcctgtaatcccaacactttgggaggctgacgcaggaggatcccttgagcccaggaatttgagactagcctgggcaatggagggagatctcatctctgtttaaaaatatatacatatttaaaaaaaggtcagggggaacaaagccctcaaaatatagcctttcacttacttttgatttttttgtgtttatctttctttaaagattactgacagccctgtcctaggagcacaacgtccgagaaatgctcagcttgactgctccaaattggagaccttgggcattggccaacgaacaccatttcgaattggaatcaaagaatcactttggcctttcctcattgacaagagatggagacaaacggtctttcattagtttatttgtgttgggttcttttttttttttaaatgaaaagtatagtatgtggcactttttaaagaacaaaggaaatagttttgtatgagtactttaattgtgactcttaggatctttcaggtaaatgatgctcttgcactagtgaaattgtctaaagaaactaaagggcagtcatgccctgtttgcagtaatttttctttttatcattttgtttgtcctggctaaacttggagtttgagtatagtaaattatgatccttaaatatttgagagtcaggatgaagcagatctgctgtagacttttcagatgaaattgttcattctcgtaacctccatattttcaggatttttgaagctgttgaccttttcatgttgattattttaaattgtgtgaaatagtataaaaatcattggtgttcattatttgctttgcctgagctcagatcaaaatgtttgaagaaaggaactttatttttgcaagttacgtacagtttttatgcttgagatatttcaacatgttatgtatattggaacttctacagcttgatgcctcctgcttttatagcagtttatggggagcacttgaaagagcgtgtgtacatgtattttttttctaggcaaacattgaatgcaaacgtgtatttttttaatataaatatataactgtccttttcatcccatgttgccgctaagtgatatttcatatgtgtggttatactcataataatgggccttgtaagtcttttcaccattcatgaataataataaatatgtactgctggcatgtaatgcttagttttcttgtatttacttctttttttaaatgtaaggaccaaacttctaaactaattgttcttttgttgctttaatttttaaaaattacattcttctgatgtaacatgtgatacatacaaaagaatatagtttaatatgtattgaaataaaacacaataaaattaacactt

SEQ ID NO: 153212 - DNA, 557 bp, Homo sapiens
  Payload ID: 10144
  Gene Symbol: MAT2B
  Gene Name: methionine adenosyltransferase II, beta
  ENST ID: ENST00000520449
  CDS Start-End: 49-402
gttggaggaggtggcggccgctgaggctgcggcgtgaagacggcgggcatggtggggcgggagaaagagctctctatacactttgttcccgggagctgtcggctggtggaggaggaagttaacatccctaataggagggttctggttactggtgccactgggcttcttggcagagctgtacacaaagaatttcagcagaataattggcatgcagttggctgtggtttcagaagagcaagaccaaaatttgaacaggttaatctgttggattctaatgcagttcatcacatcattcatgattttcagctgctgttggagcatttctcatctacattagctcagattatgtatttgatggaacaaatccaccttacagagaggaagacataccagctcccctaaatttgtatggcaaaacaaaattagatggagaaaaggctgtcctggagaacaatctaggagctgctgttttgaggattcctattctgtatggggaagttgaaaagctcgaagaaagtgctgtgactgttatgtttgataaagtgcagttcagcaac

SEQ ID NO: 153213 - DNA, 1536 bp, Homo sapiens
  Payload ID: 10145
  Gene Symbol: MSRA
  Gene Name: methionine sulfoxide reductase A
  Uniprot ID: Q9UJ68
  ENST ID: ENST00000317173
  CDS Start-End: 250-957
ggaactcgccgggccacaccccctgtccagggaaggaacacgcccccggtgacagccggtacggccccgggtttgggcaacctcgattacgggcggcctccagccccgccagcagcgccccgcgcccgcccgcccgcgcccctgccgccccccggttccggccgcggaccccactctctgccgttccggctgcggctccgctgccggtagcgccgtcccccgggaccacccttcggctggcgccctcccatgctctcggccacccggagggcttgccagctcctcctcctccacagcctctttcccgtcccgaggatgggcaactcggcctcgaacatcgtcagcccccaggaggccttgccgggccggaaggaacagacccctgtagcggccaaacatcatgtcaatggcaacagaacagtcgaacctttcccagagggaacacagatggctgtatttggaatgggatgtttctggggagctgaaaggaaattctgggtcttgaaaggagtgtattcaactcaagttggttttgcaggaggctatacttcaaatcctacttataaagaagtctgctcagaaaaaactggccatgcagaagtcgtccgagtggtgtaccagccagaacacatgagttttgaggaactgctcaaggtcttctgggagaatcacgacccgacccaaggtatgcgccaggggaacgaccatggcactcagtaccgctcggccatctacccgacctctgccaagcaaatggaggcagccctgagctccaaagagaactaccaaaaggttctttcagagcacggcttcggccccatcactaccgacatccgggagggacagactttctactatgcggaagactaccaccagcagtacctgagcaagaaccccaatggctactgcggccttgggggcaccggcgtgtcctgcccagtgggtattaaaaaataatttctccccacatggtgggcctttgaggttccagtaaaaatgctttcaacaaattgggcaatgcttgtgtgattcacaatcgtggcatttaaagtgcacaaagtacaaaggaatttatacagattgggtttaccgaagtataatctataggaggcgcgatggcaagttgataaaatgtgacttatctcctaataagttatggtgggagtggagctgtgcagtttcctgtgtcttctggggtctgagtgaagatagcagggatgctgtgttcacccttcttggtagaagctaaggtgtgagctgggaggttgctggacaggatgggggaccccagaagtcctttatctgtgctctctgcccgccagtgccttacaatttgcaaacgtgtatagcctcagtgactcattcgctgaaatccttcgctttaccaaatctagacatacataaggggctttctctcccttttcagccctctctgtgcagagaaaagatgtgagtccgcttgatgaattctaatgctttgcttagagctatgagaaatgtttgttttaataaaaacctacagtccaataatgccaa

SEQ ID NO: 153214 - DNA, 1460 bp, Homo sapiens
  Payload ID: 10145
  Gene Symbol: MSRA
  Gene Name: methionine sulfoxide reductase A
  Uniprot ID: Q9UJ68
  ENST ID: ENST00000382490
  CDS Start-End: 305-883
aaacttagaaggctttttaagtctcttgggctatttgaaagtgttggtacatacaatgacgtttagtcaccagtattaagggaaataaaagcctttttcaaaacgaagcttccatagtgtccatgcatttgggaaatactatatttgattttttgcatgtatgattataccatgagagacaggattaatatagaagatggcaaggcaaatttctaattagagggaatattaattttctacaaaataaagtttgttcatcaatacaaacctgctttcaaatcaaatcagaaagacatccttcggaatgtgttcagaacccaaacatcatgtcaatggcaacagaacagtcgaacctttcccagagggaacacagatggctgtatttggaatgggatgtttctggggagctgaaaggaaattctgggtcttgaaaggagtgtattcaactcaagttggttttgcaggaggctatacttcaaatcctacttataaagaagtctgctcagaaaaaactggccatgcagaagtcgtccgagtggtgtaccagccagaacacatgagttttgaggaactgctcaaggtcttctgggagaatcacgacccgacccaaggtatgcgccaggggaacgaccatggcactcagtaccgctcggccatctacccgacctctgccaagcaaatggaggcagccctgagctccaaagagaactaccaaaaggttctttcagagcacggcttcggccccatcactaccgacatccgggagggacagactttctactatgcggaagactaccaccagcagtacctgagcaagaaccccaatggctactgcggccttgggggcaccggcgtgtcctgcccagtgggtattaaaaaataatttctccccacatggtgggcctttgaggttccagtaaaaatgctttcaacaaattgggcaatgcttgtgtgattcacaatcgtggcatttaaagtgcacaaagtacaaaggaatttatacagattgggtttaccgaagtataatctataggaggcgcgatggcaagttgataaaatgtgacttatctcctaataagttatggtgggagtggagctgtgcagtttcctgtgtcttctggggtctgagtgaagatagcagggatgctgtgttcacccttcttggtagaagctaaggtgtgagctgggaggttgctggacaggatgggggaccccagaagtcctttatctgtgctctctgcccgccagtgccttacaatttgcaaacgtgtatagcctcagtgactcattcgctgaaatccttcgctttaccaaatctagacatacataaggggctttctctcccttttcagccctctctgtgcagagaaaagatgtgagtccgcttgatgaattctaatgctttgcttagagctatgagaaatgtttgttttaataaaaacctacagtccaataatgcc

SEQ ID NO: 153215 - DNA, 788 bp, Homo sapiens
  Payload ID: 10145
  Gene Symbol: MSRA
  Gene Name: methionine sulfoxide reductase A
  Uniprot ID: Q9UJ68
  ENST ID: ENST00000441698
  CDS Start-End: 148-735
gccccgccagcagcgccccgcgcccgcccgcccgcgcccctgccgccccccggttccggccgcggaccccactctctgccgttccggctgcggctccgctgccggtagcgccgtcccccgggaccacccttcggctggcgccctcccatgctctcggccacccggagggcttgccagctcctcctcctccacagcctctttcccgtcccgaggatgggcaactcggcctcgaacatcgtcagcccccaggaggccttgccgggccggaaggaacagacccctgtagcggccaaacatcatgtcaatggcaacagaacagtcgaacctttcccagagggaacacagatggctgtatttgaaaaaactggccatgcagaagtcgtccgagtggtgtaccagccagaacacatgagttttgaggaactgctcaaggtcttctgggagaatcacgacccgacccaaggtatgcgccaggggaacgaccatggcactcagtaccgctcggccatctacccgacctctgccaagcaaatggaggcagccctgagctccaaagagaactaccaaaaggttctttcagagcacggcttcggccccatcactaccgacatccgggagggacagactttctactatgcggaagactaccaccagcagtacctgagcaagaaccccaatggctactgcggccttgggggcaccggcgtgtcctgcccagtgggtattaaaaaataatttctccccacatggtgggcctttgaggttccagtaaaaatgctttcaacaaa

SEQ ID NO: 153216 - DNA, 559 bp, Homo sapiens
  Payload ID: 10145
  Gene Symbol: MSRA
  Gene Name: methionine sulfoxide reductase A
  ENST ID: ENST00000521686
  CDS Start-End: 1-274
aaaaactggccatgcagaagtcgtccgagtggtgtaccagccagaacacatgagttttgaggaactgctcaaggtcttctgggagaatcacgacccgacccaaggtatgcgccaggggaacgaccatggcactcagtaccgctcggccatctacccgacctctgccaagcaaatggaggcagccctgagctccaaagagaactaccaaaaggtacccaagcatgttcactggaagaagagaacacagactgggctgcagacggagggaagatgagtatagggactctccttgtctgtccctgtacctgcccactgccacctgtctacgtcctgagatacccagcagaggacagggttccacttggaaaattcttttgaatctcacacaagacagtaataaacatagagggagaaataacaagacattttaccatgtcttgtgtcatgtaggaaactttacatttcagaaaatatgaagacaaaaagatgaaggaaagggctttaaggatacaaaggaccttattatggaaggaaagcagtgttgtcaagagagctaaaa

SEQ ID NO: 153217 - DNA, 871 bp, Homo sapiens
  Payload ID: 10145
  Gene Symbol: MSRA
  Gene Name: methionine sulfoxide reductase A
  ENST ID: ENST00000522907
  CDS Start-End: 625-871
agagtgagagagagaaagagggagagagagaggcagagggagagctgaggaaagaaaaaaaggcaagacttggcacagctcagtcaaatcagcttcttttgtctgctttctcggcttgagcttcaggaaagaaaaccgtcctggggtacagaaaaactcagaactttttggttttcaaacttagaaggctttttaagtctcttgggctatttgaaagtgttggtacatacaatgacgtttagtcaccagtattaagggaaataaaagcctttttcaaaacgaagcttccatagtgtccatgcatttgggaaatactatatttgattttttgcatgtatgattataccatgagagacaggattaatatagaagatggcaaggcaaatttctaattagagggaatattaattttctacaaaataaagtttgttcatcaatacaaacctgctttcaaatcaaatcagaaagacatccttcggaatgtgttcagaaccaattagtgacaacactgaagaccagaaaggcaagctgaagacaccagacttcgcttgaagggcaaacaagaaatccaaacatcatgtcaatggcaacagaacagtcgaacctttcccagagggaacacagatggctgtatttggaatgggatgtttctggggagctgaaaggaaattctgggtcttgaaaggagtgtattcaactcaagttggttttgcaggaggctatacttcaaatcctacttataaagaagtctgctcagaaaaaactggccatgcagaagtcgtccgagtggtgtaccagccagaacacatgagttttgaggaactgctcaaggtcttctgggagaatcacgacccgacccaaggtatgcgcc

SEQ ID NO: 153218 - DNA, 674 bp, Homo sapiens
  Payload ID: 10145
  Gene Symbol: MSRA
  Gene Name: methionine sulfoxide reductase A
  ENST ID: ENST00000518255
  CDS Start-End: 17-658
cggctggcgccctcccatgctctcggccacccggagggcttgccagctcctcctcctccacagcctctttcccgtcccgaggatgggcaactcggcctcgaacatcgtcagcccccaggaggccttgccgggccggaaggaacagacccctgtagcggccaaacatcatgtcaatggcaacagaacagtcgaacctttcccagagggaacacagatggctgtatttggaatgggatgtttctggggagctgaaaggaaattctgggtcttgaaaggagtgtattcaactcaagttggttttgcaggaggctatacttcaaatcctacttataaagaagtctgctcagaaaaaactggccatgcagaagtcgtccgagtggtgtaccagccagaacacatgagttttgaggaactgctcaaggtcttctgggagaatcacgacccgacccaaggtatgcgccaggggaacgaccatggcactcagtaccgctcggccatctacccgacctctgccaagcaaatggaggcagccctgagctccaaagagaactaccaaaagctggtgcttccctgttcttcctcagccatgctggggctcactgcagcctcctctgctcaactcgcctgggtgcagccatcttcaagaaaacattattaaagcaatattattagta

SEQ ID NO: 153219 - DNA, 814 bp, Homo sapiens
  Payload ID: 10145
  Gene Symbol: MSRA
  Gene Name: methionine sulfoxide reductase A
  ENST ID: ENST00000521209
  CDS Start-End: 187-366
tgaatgatagattattattttacattgtaggtacagccagtgtgatcagacaaagcaattcgagaactacaaaagaggaaaaaagatcagaagttcttaaatacataagggaatgcagcatttgataaagccaaacatcatgtcaatggcaacagaacagtcgaacctttcccagagggaacacagatggctgtatttggaatgggatgtttctggggagctgaaaggaaattctgggtcttgaaaggagtgtattcaactcaagttggttttgcaggaggctatacttcaaatcctacttataaagaagtctgctcagatgttcagaacaattccatgtttattagtctattcaaaagcttttagaaatctgcacagccaagtggcactgaatccagaagcatgaaaggagctgcacaacttttcctcgtaagatttacacaagcagcacgggaaatctgaggcccagacatttccttatcaacagaatactccggtggattttcaagcaggctgttcagcagaggtttcgagcaggagcccaggtgtgggaagagcggagtgtgggagtcctcgtgtgaccctctgggggtggtgatggaactgactgtatggtctgcaaaacctaaaatatttactgtcaggtgcttatgtgtcctgtcctgagcccgtttcctctcttgtaaaatggggcaatgctgcttgatgaaaccagtcaagttgtggttggattcttatatgtaataaacctgcacattgtgcacatataccctaaaacttaaagtatgataaaaataaaaaaaattgttgcaaa

SEQ ID NO: 153220 - DNA, 1706 bp, Homo sapiens
  Payload ID: 10145
  Gene Symbol: MSRA
  Gene Name: methionine sulfoxide reductase A
  Uniprot ID: Q9UJ68
  ENST ID: ENST00000528246
  CDS Start-End: 624-1133
gagtgagagagagaaagagggagagagagaggcagagggagagctgaggaaagaaaaaaaggcaagacttggcacagctcagtcaaatcagcttcttttgtctgctttctcggcttgagcttcaggaaagaaaaccgtcctggggtacagaaaaactcagaactttttggttttcaaacttagaaggctttttaagtctcttgggctatttgaaagtgttggtacatacaatgacgtttagtcaccagtattaagggaaataaaagcctttttcaaaacgaagcttccatagtgtccatgcatttgggaaatactatatttgattttttgcatgtatgattataccatgagagacaggattaatatagaagatggcaaggcaaatttctaattagagggaatattaattttctacaaaataaagtttgttcatcaatacaaacctgctttcaaatcaaatcagaaagacatccttcggaatgtgttcagaaccaattagtgacaacactgaagaccagaaaggcaagctgaagacaccagacttcgcttgaagggcaaacaagaaatccaaacatcatgtcaatggcaacagaacagtcgaacctttcccagagggaacacagatggctgtatttggaatgggatgtttctggggagctgaaaggaaattctgggtcttgaaaggagtgtattcaactcaagttggttttgcaggaggctatacttcaaatcctacttataaagaagtctgctcagaaaaaactggccatgcagaagtcgtccgagtggtgtaccagccagaacacatgagttttgaggaactgctcaaggtcttctgggagaatcacgacccgacccaaggtatgcgccaggggaacgaccatggcactcagtaccgctcggccatctacccgacctctgccaagcaaatggaggcagccctgagctccaaagagaactaccaaaaggttctttcagagcacggcttcggccccatcactaccgacatccgggagggacagactttctactatgcggaagactaccaccagcagtacctgagcaagaaccccaatggctactgcggccttgggggcaccggcgtgtcctgcccagtgggtattaaaaaataatttctccccacatggtgggcctttgaggttccagtaaaaatgctttcaacaaattgggcaatgcttgtgtgattcacaatcgtggcatttaaagtgcacaaagtacaaaggaatttatacagattgggtttaccgaagtataatctataggaggcgcgatggcaagttgataaaatgtgacttatctcctaataagttatggtgggagtggagctgtgcagtttcctgtgtcttctggggtctgagtgaagatagcagggatgctgtgttcacccttcttggtagaagctaaggtgtgagctgggaggttgctggacaggatgggggaccccagaagtcctttatctgtgctctctgcccgccagtgccttacaatttgcaaacgtgtatagcctcagtgactcattcgctgaaatccttcgctttaccaaatctagacatacataaggggctttctctcccttttcagccctctctgtgcagagaaaagatgtgagtccgcttgatgaattctaatgctttgcttagagctatgagaaatgtttgttttaataaaaacctacagtccaataa

SEQ ID NO: 153221 - DNA, 1423 bp, Homo sapiens
  Payload ID: 10146
  Gene Symbol: MSRB1
  Gene Name: methionine sulfoxide reductase B1
  Uniprot ID: Q9NZV6
  ENST ID: ENST00000361871
  CDS Start-End: 171-521
cagccctgaggaggggcggggcctcccggaggcggaagccgggattcgccctccggggagcgattggtcctcgggaggggcggggaggtggacgcgggtaccggcggtcgtcgggtcggcagcctttggtcagttggcagcggcaagcgcgctgcggttccggtggcgccatgtcgttctgcagcttcttcgggggcgaggttttccagaatcactttgaacctggcgtttacgtgtgtgccaagtgtggctatgagctgttctccagccgctcgaagtatgcacactcgtctccatggccggcgttcaccgagaccattcacgccgacagcgtggccaagcgtccggagcacaatagatctgaagccttgaaggtgtcctgtggcaagtgtggcaatgggttgggccacgagttcctgaacgacggccccaagccggggcagtcccgattctgaatattcagcagctcgctgaagtttgtccctaaaggcaaagaaacttctgcctcccagggtcactaggcgggcagcccacacccaccccagacggccaccacactgaggccacacgttggccattccaccttggagttggaaccctgggcgtcgagacaggaaggcagggcgcagtggttgaaacatcaggacactcccaaggccccggctctgaacaagaccttttcgtttcttggaaaagagactcatttgctgatggttcatgccttctgctgggacaggcctgggctgtgcagccacactgtcggctgacttagccccctgctcactctaggtgcctccaggaggtgagccctgggtgcagctggtctctgaatgacgttacaccctcaccttcttttcctggccctgtctctggactctcccctgtgaggcccaattccaagacagactctcgtcctcaccgaagcttaggcccacatctcccaggctgcttaggagacagaatggaaacggaggccgcccctgccagccgccctggccctggtcactgcatgatccgctctggtcaaacccttccaggccagccagagtggggatggtctgtgacctgctgggaaggcaggctgatggggcacacccttggcctctcgtccacgaggggagaaacctaaaccctgtttcacaatctgtgcggaagtagcttgcctcacttctgcttaggaaagcggctgttgctccataactctaaccagcacagggctgaggcctgcagtgcacacctgcagggaggcccttcccaaggtgtggtgactgtgccttactgtacatgctcggaggcctggccatataggagggtgggtgatgctgaaatcaccccccatcttaagtaattactttctggagtaatcaggtggaaatccatagacaaatgaaacattcagatgtactgtctttttttttgtttt

SEQ ID NO: 153222 - DNA, 847 bp, Homo sapiens
  Payload ID: 10146
  Gene Symbol: MSRB1
  Gene Name: methionine sulfoxide reductase B1
  ENST ID: ENST00000399753
  CDS Start-End: 40-720
agttggcagcggcaagcgcgctgcggttccggtggcgccatgtcgttctgcagcttcttcgggggcgaggttttccagaatcactttgaacctggcgtttacgtgtgtgccaagtgtggctatgagctgttctccagccgctcgaagtatgcacactcgtctccatggccggcgttcaccgagaccattcacgccgacagcgtggccaagcgtccggagcacaatagatctgaagccttgaaggtgagaggccacaggggtgggggagggacgggggcggccagggagagcagagagccagtcccaccttcctccctctgcttgccccacagctccaggggcttagaggcgtctattccaggcctgttgcctctgccagggagctgccaccccaggctatcgggagagcctggccttctggtgcaaatgtgggaaacaggacaggtttcctgtacgggctccaggacaaaggtcaacctcttatgtcggcggtcagcttgggaaataggcgtgtgggaagaaacaccatctgccagccccagtaagggccttcactgtggctgtatcatggccagaagctcacccagctgccttgtgatctttccaggtgtcctgtggcaagtgtggcaatgggttgggccacgagttcctgaacgacggccccaagccggggcagtcccgattctgaatattcagcagctcgctgaagtttgtccctaaaggcaaagaaacttctgcctcccagggtcactaggcgggcagcccacacccaccccagacggccaccacactgaggccacacgttggccattccaccttggagttggaaccctgggcgtcgagacag

SEQ ID NO: 153223 - DNA, 550 bp, Homo sapiens
  Payload ID: 10146
  Gene Symbol: MSRB1
  Gene Name: methionine sulfoxide reductase B1
  ENST ID: ENST00000564908
  CDS Start-End: 44-499
ggtcagttggcagcggcaagcgcgctgcggttccggtggcgccatgtcgttctgcagcttcttcgggggcgaggttttccagaatcactttgaacctggcgtttacgtgtgtgccaagtgtggctatgagctgttctccagccgctcgaagtatgcacactcgtctccatggccggcgttcaccgagaccattcacgccgacagcgtggccaagcgtccggagcacaatagatctgaagccttgaagctccaggggcttagaggcgtctattccaggcctgttgcctctgccagggagctgccaccccaggctatcgggagagcctggccttctggtgcaaatgtgggaaacaggacaggtttcctgtacgggctccaggacaaaggtgtcctgtggcaagtgtggcaatgggttgggccacgagttcctgaacgacggccccaagccggggcagtcccgattctgaatattcagcagctcgctgaagtttgtccctaaaggcaaagaaacttctgcctcccagggtcactaggcgggcagcccacaccc

SEQ ID NO: 153224 - DNA, 373 bp, Homo sapiens
  Payload ID: 10146
  Gene Symbol: MSRB1
  Gene Name: methionine sulfoxide reductase B1
  ENST ID: ENST00000473663
  CDS Start-End: 1-169
ttccagaatcactttgaacctggcgtttacgtgtgtgccaagtgtggctatgagctgttctccagccgctcgaagtatgcacactcgtctccatggccggcgttcaccgagaccattcacgccgacagcgtggccaagcgtccggagcacaatagatctgaagccttgaaggcaaagaaacttctgcctcccagggtcactaggcgggcagcccacacccaccccagacggccaccacactgaggccacacgttggccattccaccttggagttggaaccctgggcgtcgagacaggaaggcagggcgcagtggttgaaacatcaggacactcccaaggccccggctctgaacaagaccttttcgtttcttgg

SEQ ID NO: 153225 - DNA, 1363 bp, Homo sapiens
  Payload ID: 10146
  Gene Symbol: MSRB1
  Gene Name: methionine sulfoxide reductase B1
  ENST ID: ENST00000622125
  CDS Start-End: 138-485
ggaagccgggattcgccctccggggagcgattggtcctcgggaggggcggggaggtggacgcgggtaccggcggtcgtcgggtcggcagcctttggtcagttggcagcggcaagcgcgctgcggttccggtggcgccatgtcgttctgcagcttcttcgggggcgaggttttccagaatcactttgaacctggcgtttacgtgtgtgccaagtgtggctatgagctgttctccagccgctcgaagtatgcacactcgtctccatggccggcgttcaccgagaccattcacgccgacagcgtggccaagcgtccggagcacaatagatctgaagccttgaaggtgtcctgtggcaagtgtggcaatgggttgggccacgagttcctgaacgacggccccaagccggggcagtcccgattcatattcagcagctcgctgaagtttgtccctaaaggcaaagaaacttctgcctcccagggtcactaggcgggcagcccacacccaccccagacggccaccacactgaggccacacgttggccattccaccttggagttggaaccctgggcgtcgagacaggaaggcagggcgcagtggttgaaacatcaggacactcccaaggccccggctctgaacaagaccttttcgtttcttggaaaagagactcatttgctgatggttcatgccttctgctgggacaggcctgggctgtgcagccacactgtcggctgacttagccccctgctcactctaggtgcctccaggaggtgagccctgggtgcagctggtctctgaatgacgttacaccctcaccttcttttcctggccctgtctctggactctcccctgtgaggcccaattccaagacagactctcgtcctcaccgaagcttaggcccacatctcccaggctgcttaggagacagaatggaaacggaggccgcccctgccagccgccctggccctggtcactgcatgatccgctctggtcaaacccttccaggccagccagagtggggatggtctgtgacctgctgggaaggcaggctgatggggcacacccttggcctctcgtccacgaggggagaaacctaaaccctgtttcacaatctgtgcggaagtagcttgcctcacttctgcttaggaaagcggctgttgctccataactctaaccagcacagggctgaggcctgcagtgcacacctgcagggaggcccttcccaaggtgtggtgactgtgccttactgtacatgctcggaggcctggccatataggagggtgggtgatgctgaaatcaccccccatcttaagtaattactttctggagtaatcaggtggaaatccatagacaaatgaaacattcag

SEQ ID NO: 153226 - DNA, 1803 bp, Homo sapiens
  Payload ID: 10147
  Gene Symbol: MSRB2
  Gene Name: methionine sulfoxide reductase B2
  Uniprot ID: Q9Y3D2
  ENST ID: ENST00000376510
  CDS Start-End: 104-652
cgactagcgcaggcggacgggagagaatgggggaggggtgggatgggagcaggggcagagacgggcagagggcagagggcggagcggcgccggagcgggcgtcatggcgcggctcctctggttgctccggggcctgaccctcggaactgcgcctcggcgggcggtgcggggccaagcgggcggcggcgggcccggcaccgggccgggactgggggaggcagggtctcttgcaacgtgtgagctgcctcttgccaagagtgagtggcaaaagaaactaaccccggagcagttctacgtcacaagagaaaagggaacggaaccgcctttcagtgggatctacctgaataacaaggaagcaggaatgtatcattgcgtgtgctgcgacagtccactcttcagttctgagaaaaagtactgctctggcactgggtggccttcgttttccgaggctcatggtacgtctggctctgatgaaagccacacagggatcctgagacgtctggatacctcgttaggatcagctcgcacagaggttgtctgcaagcagtgtgaagctcatctaggtcacgtgtttcctgatggacctgggcccaatggtcagaggttttgcatcaacagtgtggctttgaagttcaaaccaaggaaacactgaccatcttcaagagtcccgttcccttgccaccccttcacgtgcaccctcaatttccacaattcacttgaatgacttgttttatttgcaataaaactgggctgaatttgctgctgtctccagcgagtcattgcttctcttaatttatttacctggaatcaacttaatcctgtgtgttaggctgttcttgtgttgctataaagaagtacctgatcaggatctgggagaatttgaaaaaaaaagaaaaactagaaaaataaacaaaattaaaaagaaaaaaaaatacctgagactgagtaacttataaagaaaagaggtttaattgactcacagttctgcagggtgtacagaaagcatggtgccagcatttgctcggattctggggagacctgagggagcttttactcatggcagaaggtgaagggggagccggcgtctcacatggcaaagcaggagcaagagagagtggtagggaggtgccacatacttttaaacagccagatctctcaagaactcactcactgtcaccaggacagcaccaagccatgagggatccaccctcatgacccagttacctcccggcagggcccacctccggcactaggaattatacttcaacataagatttggagagggaaaacatccaaaccatatcacccaactcccacttggagtagaacttcacaaaacgacagagggacagctgtttccatcaaacacttccacagcttcacctgagacgagggcatgactctgggaacatcaggaggctgatggactattaagccaaacaattcctacaaaaattccctgcaccttccactgcgtttcagtccttgacagacataagtaagggatcaagtgagaagaggaaggaaaatacaggatccaaggaatcaacaatgctagcactgaagagcaggattacggaggagctgtgctctgggagcatatatggtgatcaatcagatgcatgacttttttttcaaaattttaaatgtcttgagcatgctacttccaaccattctacccacaaataaactgcaataggacttggttagatttcaatgattatgaataaatgttcaccttcataccttctggttacaaagctaaactttaaaatgtccaaataaaatattcactaaaattta

SEQ ID NO: 153227 - DNA, 612 bp, Homo sapiens
  Payload ID: 10147
  Gene Symbol: MSRB2
  Gene Name: methionine sulfoxide reductase B2
  ENST ID: ENST00000472663
  CDS Start-End: 1-362
ggtctcttgcaacgtgtgagctgcctcttgccaagagtgagtggcaaaagaaactaaccccggagcagttctacgtcacaagagaaaagggaacggaaccgcctttcagtgggatctacctgaataacaaggaagcaggaatgtatcattgcgtgtgctgcgacagtccactcttcagatccttgttggatatccagaaagaagtctttagcatcaaaggatcaagaagtccttccacttcgagaggcaatggcttcgatagtgaagttctgagaaaaagtactgctctggcactgggtggccttcgttttccgaggctcatggtacgtctggctctgatgaaagccacacagggatcctgagacgtctggatacctcgttaggatcagctcgcacagaggttgtctgcaagcagtgtgaagctcatctaggtcacgtgtttcctgatggacctgggcccaatggtcagaggttttgcatcaacagtgtggctttgaagttcaaaccaaggaaacactgaccatcttcaagagtcccgttcccttgccaccccttcacgtgcaccctcaatttccacaattcacttgaatgacttgttttatttgcaataaa

SEQ ID NO: 153228 - DNA, 4417 bp, Homo sapiens
  Payload ID: 10148
  Gene Symbol: MSRB3
  Gene Name: methionine sulfoxide reductase B3
  Uniprot ID: Q8IXL7
  ENST ID: ENST00000308259
  CDS Start-End: 275-832
atatttggactcggctgcccgtgcccaggaatttcccgtcatgcctcccgccgccccgtccgtcgcccggagccggggagggagggagcgaggttcggacaccggcggcggctgcctggcctttccatgagcccgcggcggaccctcccgcgccccctctcgctctgcctctccctctgcctctgcctctgcctggccgcggctctgggaagtgcgcagtccgctcttgcccctgttctttgcttctcgttttgttggtgaagatatcacagtgatgtctgcattcaacctgctgcatttggtgacaaagagccagccagtagcccttcgagcctgtgggcttccctcagggtcgtgtagggataaaaagaactgtaaggtggtcttttcccagcaggaactgaggaagcggctaacacccctgcagtaccatgtcactcaggagaaagggaccgaaagtgcctttgaaggagaatacacacatcacaaagatcctggaatatataaatgtgttgtttgtggaactccattgtttaagtcagaaaccaaatttgactccggttcaggttggccttcattccacgatgtgatcaattctgaggcaatcacattcacagatgacttttcctatgggatgcacagggtggaaacaagctgctctcagtgtggtgctcaccttgggcacatttttgatgatgggcctcgtccaactgggaaaagatactgcataaattcggctgccttgtcttttacacctgcggatagcagtggcaccgccgagggaggcagtggggtcgccagcccggcccaggcagacaaagcggagctctagagtaatggagagtgatggaaacaaagtgtacttaatgcacagcttattaaaaaaatcaaaattgttatcttaatagatatattttttcaaaaactataagggcagttttgtgctattgatattttttcttcttttgcttaaacagaagccctggccatccatgtattttgcaattgactagatcaagaactgtttatagctttagcaaatggagacagctttgtgaaacttcttcacaagccacttataccctttggcattcttttctttgagcacatggcttcttttgcagtttttccccctttgattcagaagcagagggttcatggtcttcaaacatgaaaatagagatctcctctgcagtgtagagaccagagctgggcagtgcagggcatggagacctgcaagacacatggccttgaggcctttgcacagacccacctaagataaggttggagtgatgttttaatgagactgttcagctttgtggaaagtttgagctaaggtcatttttttttttctcactgaaagggtgtgaaggtctaaagtctttccttatgttaaattgttgccagatccaaaggggcatactgagtgttgtggcagagaagtaaacattaccacactgttaggcctttattttattttattttccatcgaaagcattggaggcccagtgcaatggctcacgcctgtgatcccagcactttgggaggccaaggcgggtggatcacgaggtcaggagatggagaccatcctggctaacatggtgaaaccccgtctctactaaaaatacgaaaaattagccaggcgtggtggtgggcacctgtagtcccagctactcaggaggctgaggcaggagaatggcgtgaacccggaaggcggagcttgcagttagccgagatcatgccactgcactccagcctacatgacaatgtgacactccatctcaaaaaataataataataacaatataagaactagctgggcatggtggcgcatgcatgtagtcccagctactcctgaggctcagtcaggagaatcgcttgaacttgggaggcggaggttgcagtgagctgagctcataccactgcactccagcctgaacagagtgagatcctgtcaaaaaagaaaagaaaaagaaagcagcattcaaatgtaagacaactgtaaaatattgagccccacttggtctaaaattcaaaaagaagaacgcctgtccatcgcctttttataagtccttctctccacacctaaaagcagctgcagctggaagggcacaaattccactgtgtaaaataaaatattaggggcaacacacttcatcaaggcagcaggaatgagagagagcagagaagatcaaggatgaagtcttgggtactgaaaaattcagtgctgggcagaaaaactgacagggcagtacaagtaacaaacagaatccaagtggggtggcccttgtgcacagagctccaggtgacctctggagagacatgggcattcacatggaaagctaaaacggaagctcaagtttcatactcaacataatcttctgtgtgacaaaggacaagccatgtagcctctctgtgcctatttcttcatgcataaactgggactcataatatttgtaaaatgtattgatactctcagggcaaattcactatattgctatacagttgagatcagtgttgtaaaattaaactgatctggttctaattgcctcaaaggccaaagcccaggcatttgaaatggaaagaagcagagaggaggctgacttagctgattggtatggaaacagttgggccaagagccagaatttccctttgtagcaacacggctagttttactttgagaagctctgctcagctgctttataacattaagtctggcggaatggatgtcactgtgcacaataaagttttcacaagtataaacaatggtgatgtaagtcaacattgctgtagccaggtgtgaaggttgtatggtgtgtgacgaatgtacatcatgtttgtaggtttggatgctaatcttgaattgtagtttaaaaaatacgtatttttgtaactctttgaaagtttatgaagactgacagctttccttgtaagcactaagagaaaaaaaagaaagagggacatttgacaattttaaagaaacaacaagaaattagaatgaaaatctgtgacaaacagcgtcagtgtggccatgtccacattcctacatgtctctctctacaagcacctctctaagaagcctgacatcccggtggactctttatagtcatgtacacttgattccagatgagctctggtcttatctggatgctcagataagaggtttctatctgagcatccagatgttccctcaggttccaagacatttcaccccaggccctgggttcactctggaattcgtaggcttcacgtctctctagaaatgacgtgtaaaatttaagaccagacctcagccatcagcgtccagaccatcctagaagtctttcccaatctcacagagaaagccctagtatttcccagtgaccccaggattccacgttggggtggccaaagaaataggtctctcagggctttgccacagcctccagcccatccttcagaggcacacacagcacctctcggctgctccagctctgtaggatagcctcccctggggtccgtgggacgcgggccacagtgttgaggtagacaaggaggatcagtgagaggcctcttccctctccacagagactggattgtcattgttccttcatttatatcgtagggcttaacatttcactcaaaaaaaagcccctctttttctaatccttagtctttgtttcaaggaaagccagtttttcttctaccacattttccaggatcgactttaagaaaaatgcaacatctattgaaaaaaagtggggtgtatgcatgtggtttaattccagattgcttttgggtttaagtggtatcaaatttcagtatatttctgtcttatgtgaaagaaatatattactaaaacgtcagtgagcaataatgtcagctgtcaagcactagatttatttttgcaggatatggagtgcaatgaactgagtcaatatggcaaggtgtatgtgatctgtgggagttatgccatttaacataggaagtgcatgggactttccctctctgcactccagctcttactgtaccattagaagatgcagaattctgttggtgtgcaaaaagtatagccttacattcaagcagaatggatctgaagaaagcagcaatatctgttactagagaacattcccatgtgtttaaactcttcacttcttagatgcatttaaattcttaatgcaaatgacgtagcaatttgaaaacttctccgtattacttgtgtttaaaatgtcttgctttaaatacaaaacaaatggtaaaggggattatcttttgtttagatggttaaatattatttttgccttagatagctttgtaataatttttctccagacagttcaacacttttgaaaaatgacatgaattttcattaaaaacccttttcctatgtttattgtatacaagaattatgcaataaaatttctttataaaaata

SEQ ID NO: 153229 - DNA, 4289 bp, Homo sapiens
  Payload ID: 10148
  Gene Symbol: MSRB3
  Gene Name: methionine sulfoxide reductase B3
  Uniprot ID: Q8IXL7
  ENST ID: ENST00000355192
  CDS Start-End: 127-705
atatttggactcggctgcccgtgcccaggaatttcccgtcatgcctcccgccgccccgtccgtcgcccggagccggggagggagggagcgaggttcggacaccggcggcggctgcctggcctttccatgagcccgcggcggaccctcccgcgccccctctcgctctgcctctccctctgcctctgcctctgcctggccgcggctctgggaagtgcgcagtccgggtcgtgtagggataaaaagaactgtaaggtggtcttttcccagcaggaactgaggaagcggctaacacccctgcagtaccatgtcactcaggagaaagggaccgaaagtgcctttgaaggagaatacacacatcacaaagatcctggaatatataaatgtgttgtttgtggaactccattgtttaagtcagaaaccaaatttgactccggttcaggttggccttcattccacgatgtgatcaattctgaggcaatcacattcacagatgacttttcctatgggatgcacagggtggaaacaagctgctctcagtgtggtgctcaccttgggcacatttttgatgatgggcctcgtccaactgggaaaagatactgcataaattcggctgccttgtcttttacacctgcggatagcagtggcaccgccgagggaggcagtggggtcgccagcccggcccaggcagacaaagcggagctctagagtaatggagagtgatggaaacaaagtgtacttaatgcacagcttattaaaaaaatcaaaattgttatcttaatagatatattttttcaaaaactataagggcagttttgtgctattgatattttttcttcttttgcttaaacagaagccctggccatccatgtattttgcaattgactagatcaagaactgtttatagctttagcaaatggagacagctttgtgaaacttcttcacaagccacttataccctttggcattcttttctttgagcacatggcttcttttgcagtttttccccctttgattcagaagcagagggttcatggtcttcaaacatgaaaatagagatctcctctgcagtgtagagaccagagctgggcagtgcagggcatggagacctgcaagacacatggccttgaggcctttgcacagacccacctaagataaggttggagtgatgttttaatgagactgttcagctttgtggaaagtttgagctaaggtcatttttttttttctcactgaaagggtgtgaaggtctaaagtctttccttatgttaaattgttgccagatccaaaggggcatactgagtgttgtggcagagaagtaaacattaccacactgttaggcctttattttattttattttccatcgaaagcattggaggcccagtgcaatggctcacgcctgtgatcccagcactttgggaggccaaggcgggtggatcacgaggtcaggagatggagaccatcctggctaacatggtgaaaccccgtctctactaaaaatacgaaaaattagccaggcgtggtggtgggcacctgtagtcccagctactcaggaggctgaggcaggagaatggcgtgaacccggaaggcggagcttgcagttagccgagatcatgccactgcactccagcctacatgacaatgtgacactccatctcaaaaaataataataataacaatataagaactagctgggcatggtggcgcatgcatgtagtcccagctactcctgaggctcagtcaggagaatcgcttgaacttgggaggcggaggttgcagtgagctgagctcataccactgcactccagcctgaacagagtgagatcctgtcaaaaaagaaaagaaaaagaaagcagcattcaaatgtaagacaactgtaaaatattgagccccacttggtctaaaattcaaaaagaagaacgcctgtccatcgcctttttataagtccttctctccacacctaaaagcagctgcagctggaagggcacaaattccactgtgtaaaataaaatattaggggcaacacacttcatcaaggcagcaggaatgagagagagcagagaagatcaaggatgaagtcttgggtactgaaaaattcagtgctgggcagaaaaactgacagggcagtacaagtaacaaacagaatccaagtggggtggcccttgtgcacagagctccaggtgacctctggagagacatgggcattcacatggaaagctaaaacggaagctcaagtttcatactcaacataatcttctgtgtgacaaaggacaagccatgtagcctctctgtgcctatttcttcatgcataaactgggactcataatatttgtaaaatgtattgatactctcagggcaaattcactatattgctatacagttgagatcagtgttgtaaaattaaactgatctggttctaattgcctcaaaggccaaagcccaggcatttgaaatggaaagaagcagagaggaggctgacttagctgattggtatggaaacagttgggccaagagccagaatttccctttgtagcaacacggctagttttactttgagaagctctgctcagctgctttataacattaagtctggcggaatggatgtcactgtgcacaataaagttttcacaagtataaacaatggtgatgtaagtcaacattgctgtagccaggtgtgaaggttgtatggtgtgtgacgaatgtacatcatgtttgtaggtttggatgctaatcttgaattgtagtttaaaaaatacgtatttttgtaactctttgaaagtttatgaagactgacagctttccttgtaagcactaagagaaaaaaaagaaagagggacatttgacaattttaaagaaacaacaagaaattagaatgaaaatctgtgacaaacagcgtcagtgtggccatgtccacattcctacatgtctctctctacaagcacctctctaagaagcctgacatcccggtggactctttatagtcatgtacacttgattccagatgagctctggtcttatctggatgctcagataagaggtttctatctgagcatccagatgttccctcaggttccaagacatttcaccccaggccctgggttcactctggaattcgtaggcttcacgtctctctagaaatgacgtgtaaaatttaagaccagacctcagccatcagcgtccagaccatcctagaagtctttcccaatctcacagagaaagccctagtatttcccagtgaccccaggattccacgttggggtggccaaagaaataggtctctcagggctttgccacagcctccagcccatccttcagaggcacacacagcacctctcggctgctccagctctgtaggatagcctcccctggggtccgtgggacgcgggccacagtgttgaggtagacaaggaggatcagtgagaggcctcttccctctccacagagactggattgtcattgttccttcatttatatcgtagggcttaacatttcactcaaaaaaaagcccctctttttctaatccttagtctttgtttcaaggaaagccagtttttcttctaccacattttccaggatcgactttaagaaaaatgcaacatctattgaaaaaaagtggggtgtatgcatgtggtttaattccagattgcttttgggtttaagtggtatcaaatttcagtatatttctgtcttatgtgaaagaaatatattactaaaacgtcagtgagcaataatgtcagctgtcaagcactagatttatttttgcaggatatggagtgcaatgaactgagtcaatatggcaaggtgtatgtgatctgtgggagttatgccatttaacataggaagtgcatgggactttccctctctgcactccagctcttactgtaccattagaagatgcagaattctgttggtgtgcaaaaagtatagccttacattcaagcagaatggatctgaagaaagcagcaatatctgttactagagaacattcccatgtgtttaaactcttcacttcttagatgcatttaaattcttaatgcaaatgacgtagcaatttgaaaacttctccgtattacttgtgtttaaaatgtcttgctttaaatacaaaacaaatggtaaaggggattatcttttgtttagatggttaaatattatttttgccttagatagctttgtaataatttttctccagacagttcaacacttttgaaaaatgacatgaattttcattaaaaacccttttcctatgtttattgtatacaagaattatgcaataaaatttctttataaaaat

SEQ ID NO: 153230 - DNA, 506 bp, Homo sapiens
  Payload ID: 10148
  Gene Symbol: MSRB3
  Gene Name: methionine sulfoxide reductase B3
  ENST ID: ENST00000446731
  CDS Start-End: 1-352
actgaggaagcggctaacacccctgcagtaccatgtcactcaggagaaagggaccgaaagtgcctttgaaggagaatacacacatcacaaagatcctggaatatataaatgtgttgtttgtggaactccattgtttaagtcagaaaccaaatttgactccggttcaggttggccttcattccacgatgtgatcaattctgaggcaatcacattcacagatgacttttcctatgggatgcacagggtggaaacaagctgctctcagcaagaaggacctcaccagatgctgcccctcaatcttggatttcctggcctccagaactgtgagccaataaatttctattcattctgaattaaccagtctgtggtattctcttatagcagcacaaaatgaactgagacaggtgtgctcactcagtgaaaatgttttgaactgcatgcttatgcttatgaattgttaacttctctgcgtgcatgttacatttcaataaaaaaagtttactcag

SEQ ID NO: 153231 - DNA, 884 bp, Homo sapiens
  Payload ID: 10148
  Gene Symbol: MSRB3
  Gene Name: methionine sulfoxide reductase B3
  ENST ID: ENST00000540804
  CDS Start-End: 38-520
gaggttcggacaccggcggcggctgcctggcctttccatgagcccgcggcggaccctcccgcgccccctctcgctctgcctctccctctgcctctgcctctgcctggccgcggctctgggaagtgcgcagtccgggtcgtgtagggataaaaagaactgtaaggtggtcttttcccagcaggaactgaggaagcggctaacacccctgcagtaccatgtcactcaggagaaagggaccgaaagtgcctttgaaggagaatacacacatcacaaagatcctggaatatataaatgtgttgtttgtggaactccattgtttaagtcagaaaccaaatttgactccggttcaggttggccttcattccacgatgtgatcaattctgaggcaatcacattcacagatgacttttcctatgggatgcacagggtggaaacaagctgctctcaggtgagttcatcctttctgaaaacccaatacattgctttcaggactcctggttgtgctaaatatagcaactaaggccaagcgactggtcacaagaaggacagacaagcatgacgaagtttatatgaagtccgatggatgcctatgttcaggtgtttagcaagtctagtggaatgttaaggtcggcatgatagctcaagcctgtaatcccatactttgagagggccaagtggggaggatcacttgaggccagaagttcaagacgagtccgggcaacctagtgagacctcgtctctacagaaaatattttaaaacttagcagggcatggtagcatatgcctgtagttctagctactcaggggggctgaagcaggagaatcactggagcccaggaggtcgaggctgcagtgagctgtgatcatgccactgtagtctagcc

SEQ ID NO: 153232 - DNA, 528 bp, Homo sapiens
  Payload ID: 10148
  Gene Symbol: MSRB3
  Gene Name: methionine sulfoxide reductase B3
  ENST ID: ENST00000541189
  CDS Start-End: 1-523
ccggcggcggctgcctggcctttccatgagcccgcggcggaccctcccgcgccccctctcgctctgcctctccctctgcctctgcctctgcctggccgcggctctgggaagtgcgcagtccgggtcgtgtagggataaaaagaactgtaaggtggtcttttcccagcaggaactgaggaagcggctaacacccctgcagtaccatgtcactcaggagaaagggaccgaaagtgcctttgaaggagaatacacacatcacaaagatcctggaatatataaatgtgttgtttgtggaactccattgtttaagtcagaaaccaaatttgactccggttcaggttggccttcattccacgatgtgatcaattctgaggcaatcacattcacagatgacttttcctatgggatgcacagggtggaaacaagctgctctcagcaagaaggacctcaccagatgctgcccctcaatcttggatttcctggcctccagaactgtgagccaataaatttctattcattctgaattaa

SEQ ID NO: 153233 - DNA, 964 bp, Homo sapiens
  Payload ID: 10148
  Gene Symbol: MSRB3
  Gene Name: methionine sulfoxide reductase B3
  Uniprot ID: Q8IXL7
  ENST ID: ENST00000535664
  CDS Start-End: 340-897
caccggcggcggctgcctggcctttccatgagcccgcggcggaccctcccgcgccccctctcgctctgcctctccctctgcctctgcctctgcctggccgcggctctgggaagtgcgcagtccgagtgacatcactgcctctcttcctgtgcgctggctttgacataagccagatggccaccgtggttggtaggcgcccaggctgcctggtacaggagttgatgaaacagaataggaagacgttttatggtcagctgtggaagcacagtgagactgcagctttgctaactcttgcccctgttctttgcttctcgttttgttggtgaagatatcacagtgatgtctgcattcaacctgctgcatttggtgacaaagagccagccagtagcccttcgagcctgtgggcttccctcagggtcgtgtagggataaaaagaactgtaaggtggtcttttcccagcaggaactgaggaagcggctaacacccctgcagtaccatgtcactcaggagaaagggaccgaaagtgcctttgaaggagaatacacacatcacaaagatcctggaatatataaatgtgttgtttgtggaactccattgtttaagtcagaaaccaaatttgactccggttcaggttggccttcattccacgatgtgatcaattctgaggcaatcacattcacagatgacttttcctatgggatgcacagggtggaaacaagctgctctcagtgtggtgctcaccttgggcacatttttgatgatgggcctcgtccaactgggaaaagatactgcataaattcggctgccttgtcttttacacctgcggatagcagtggcaccgccgagggaggcagtggggtcgccagcccggcccaggcagacaaagcggagctctagagtaatggagagtgatggaaacaaagtgtacttaatgcacagcttattaaaaaaatcaaaattgtta

SEQ ID NO: 153234 - DNA, 527 bp, Homo sapiens
  Payload ID: 10148
  Gene Symbol: MSRB3
  Gene Name: methionine sulfoxide reductase B3
  ENST ID: ENST00000538045
  CDS Start-End: 176-527
acgttagggtgtgaccccgagccgggattccattctgcgcctgctgcgccccctcggccacctgcggggacagcccctgcctcagccgagaaggggagcagaagggttgcgccccgcgccagcgctcttgcccctgttctttgcttctcgttttgttggtgaagatatcacagtgatgtctgcattcaacctgctgcatttggtgacaaagagccagccagtagcccttcgagcctgtgggcttccctcagggtcgtgtagggataaaaagaactgtaaggtggtcttttcccagcaggaactgaggaagcggctaacacccctgcagtaccatgtcactcaggagaaagggaccgaaagtgcctttgaaggagaatacacacatcacaaagatcctggaatatataaatgtgttgtttgtggaactccattgtttaagtcagaaaccaaatttgactccggttcaggttggccttcattccacgatgtgatcaattctgaggcaatcacattcacagatgactttt

SEQ ID NO: 153235 - DNA, 489 bp, Homo sapiens
  Payload ID: 10148
  Gene Symbol: MSRB3
  Gene Name: methionine sulfoxide reductase B3
  ENST ID: ENST00000541897
  CDS Start-End: 101-235
aggaatttcccgtcatgcctcccgccgccccgtccgtcgcccggagccggggagggagggagcgaggttcggacaccggcggcggctgcctggcctttccatgagcccgcggcggaccctcccgcgccccctctcgctctgcctctccctctgcctctgcctctgcctggccgcggctctgggaagtgcgcagtccgctcttgcccctgttctttgcttctcgttttgttggtgaagatatcacagtgatgtctgcattcaacctgctgcatttggtgacaaagagccagccagtagcccttcgagcctgtgggcttccctcaggtcagaaaccaaatttgactccggttcaggttggccttcattccacgatgtgatcaattctgaggcaatcacattcacagatgacttttcctatgggatgcacagggtggaaacaagctgctctcagtgtggtgctcaccttgggcacatttttgatgatgggcc

SEQ ID NO: 153236 - DNA, 630 bp, Homo sapiens
  Payload ID: 10148
  Gene Symbol: MSRB3
  Gene Name: methionine sulfoxide reductase B3
  ENST ID: ENST00000535239
  CDS Start-End: 137-630
ctgcggggacagcccctgcctcagccgagaaggggagcagaagggttgcgccccgcgccagcggtgaggggccgaacggaaggagctcttgcccctgttctttgcttctcgttttgttggtgaagatatcacagtgatgtctgcattcaacctgctgcatttggtgacaaagagccagccagtagcccttcgagcctgtgggcttccctcagggtcgtgtagggataaaaagaactgtaaggtggtcttttcccagcaggaactgaggaagcggctaacacccctgcagtaccatgtcactcaggagaaagggaccgaaagtgcctttgaaggagaatacacacatcacaaagatcctggaatatataaatgtgttgtttgtggaactccattgtttaagtcagaaaccaaatttgactccggttcaggttggccttcattccacgatgtgatcaattctgaggcaatcacattcacagatgacttttcctatgggatgcacagggtggaaacaagctgctctcagtgtggtgctcaccttgggcacatttttgatgatgggcctcgtccaactgggaaaagatactgcataaattcggctgccttgtcttttacacctgcggatagcag

SEQ ID NO: 153237 - DNA, 4270 bp, Homo sapiens
  Payload ID: 10148
  Gene Symbol: MSRB3
  Gene Name: methionine sulfoxide reductase B3
  Uniprot ID: Q8IXL7
  ENST ID: ENST00000614640
  CDS Start-End: 137-694
ctgcggggacagcccctgcctcagccgagaaggggagcagaagggttgcgccccgcgccagcggtgaggggccgaacggaaggagctcttgcccctgttctttgcttctcgttttgttggtgaagatatcacagtgatgtctgcattcaacctgctgcatttggtgacaaagagccagccagtagcccttcgagcctgtgggcttccctcagggtcgtgtagggataaaaagaactgtaaggtggtcttttcccagcaggaactgaggaagcggctaacacccctgcagtaccatgtcactcaggagaaagggaccgaaagtgcctttgaaggagaatacacacatcacaaagatcctggaatatataaatgtgttgtttgtggaactccattgtttaagtcagaaaccaaatttgactccggttcaggttggccttcattccacgatgtgatcaattctgaggcaatcacattcacagatgacttttcctatgggatgcacagggtggaaacaagctgctctcagtgtggtgctcaccttgggcacatttttgatgatgggcctcgtccaactgggaaaagatactgcataaattcggctgccttgtcttttacacctgcggatagcagtggcaccgccgagggaggcagtggggtcgccagcccggcccaggcagacaaagcggagctctagagtaatggagagtgatggaaacaaagtgtacttaatgcacagcttattaaaaaaatcaaaattgttatcttaatagatatattttttcaaaaactataagggcagttttgtgctattgatattttttcttcttttgcttaaacagaagccctggccatccatgtattttgcaattgactagatcaagaactgtttatagctttagcaaatggagacagctttgtgaaacttcttcacaagccacttataccctttggcattcttttctttgagcacatggcttcttttgcagtttttccccctttgattcagaagcagagggttcatggtcttcaaacatgaaaatagagatctcctctgcagtgtagagaccagagctgggcagtgcagggcatggagacctgcaagacacatggccttgaggcctttgcacagacccacctaagataaggttggagtgatgttttaatgagactgttcagctttgtggaaagtttgagctaaggtcatttttttttttctcactgaaagggtgtgaaggtctaaagtctttccttatgttaaattgttgccagatccaaaggggcatactgagtgttgtggcagagaagtaaacattaccacactgttaggcctttattttattttattttccatcgaaagcattggaggcccagtgcaatggctcacgcctgtgatcccagcactttgggaggccaaggcgggtggatcacgaggtcaggagatggagaccatcctggctaacatggtgaaaccccgtctctactaaaaatacgaaaaattagccaggcgtggtggtgggcacctgtagtcccagctactcaggaggctgaggcaggagaatggcgtgaacccggaaggcggagcttgcagttagccgagatcatgccactgcactccagcctacatgacaatgtgacactccatctcaaaaaataataataataacaatataagaactagctgggcatggtggcgcatgcatgtagtcccagctactcctgaggctcagtcaggagaatcgcttgaacttgggaggcggaggttgcagtgagctgagctcataccactgcactccagcctgaacagagtgagatcctgtcaaaaaagaaaagaaaaagaaagcagcattcaaatgtaagacaactgtaaaatattgagccccacttggtctaaaattcaaaaagaagaacgcctgtccatcgcctttttataagtccttctctccacacctaaaagcagctgcagctggaagggcacaaattccactgtgtaaaataaaatattaggggcaacacacttcatcaaggcagcaggaatgagagagagcagagaagatcaaggatgaagtcttgggtactgaaaaattcagtgctgggcagaaaaactgacagggcagtacaagtaacaaacagaatccaagtggggtggcccttgtgcacagagctccaggtgacctctggagagacatgggcattcacatggaaagctaaaacggaagctcaagtttcatactcaacataatcttctgtgtgacaaaggacaagccatgtagcctctctgtgcctatttcttcatgcataaactgggactcataatatttgtaaaatgtattgatactctcagggcaaattcactatattgctatacagttgagatcagtgttgtaaaattaaactgatctggttctaattgcctcaaaggccaaagcccaggcatttgaaatggaaagaagcagagaggaggctgacttagctgattggtatggaaacagttgggccaagagccagaatttccctttgtagcaacacggctagttttactttgagaagctctgctcagctgctttataacattaagtctggcggaatggatgtcactgtgcacaataaagttttcacaagtataaacaatggtgatgtaagtcaacattgctgtagccaggtgtgaaggttgtatggtgtgtgacgaatgtacatcatgtttgtaggtttggatgctaatcttgaattgtagtttaaaaaatacgtatttttgtaactctttgaaagtttatgaagactgacagctttccttgtaagcactaagagaaaaaaaagaaagagggacatttgacaattttaaagaaacaacaagaaattagaatgaaaatctgtgacaaacagcgtcagtgtggccatgtccacattcctacatgtctctctctacaagcacctctctaagaagcctgacatcccggtggactctttatagtcatgtacacttgattccagatgagctctggtcttatctggatgctcagataagaggtttctatctgagcatccagatgttccctcaggttccaagacatttcaccccaggccctgggttcactctggaattcgtaggcttcacgtctctctagaaatgacgtgtaaaatttaagaccagacctcagccatcagcgtccagaccatcctagaagtctttcccaatctcacagagaaagccctagtatttcccagtgaccccaggattccacgttggggtggccaaagaaataggtctctcagggctttgccacagcctccagcccatccttcagaggcacacacagcacctctcggctgctccagctctgtaggatagcctcccctggggtccgtgggacgcgggccacagtgttgaggtagacaaggaggatcagtgagaggcctcttccctctccacagagactggattgtcattgttccttcatttatatcgtagggcttaacatttcactcaaaaaaaagcccctctttttctaatccttagtctttgtttcaaggaaagccagtttttcttctaccacattttccaggatcgactttaagaaaaatgcaacatctattgaaaaaaagtggggtgtatgcatgtggtttaattccagattgcttttgggtttaagtggtatcaaatttcagtatatttctgtcttatgtgaaagaaatatattactaaaacgtcagtgagcaataatgtcagctgtcaagcactagatttatttttgcaggatatggagtgcaatgaactgagtcaatatggcaaggtgtatgtgatctgtgggagttatgccatttaacataggaagtgcatgggactttccctctctgcactccagctcttactgtaccattagaagatgcagaattctgttggtgtgcaaaaagtatagccttacattcaagcagaatggatctgaagaaagcagcaatatctgttactagagaacattcccatgtgtttaaactcttcacttcttagatgcatttaaattcttaatgcaaatgacgtagcaatttgaaaacttctccgtattacttgtgtttaaaatgtcttgctttaaatacaaaacaaatggtaaaggggattatcttttgtttagatggttaaatattatttttgccttagatagctttgtaataatttttctccagacagttcaacacttttgaaaaatgacatgaattttcattaaaaacccttttcctatgtttattgtatacaagaattatgcaataaaatttcttt

SEQ ID NO: 153238 - DNA, 2791 bp, Homo sapiens
  Payload ID: 10149
  Gene Symbol: METAP1
  Gene Name: methionyl aminopeptidase 1
  Uniprot ID: P53582
  ENST ID: ENST00000296411
  CDS Start-End: 135-1295
ctcccgcgcccaggccagcggcgggcccagctcctcccccgactcggtctctctcccctcccctccgcccggcagttcctccctcccgccgccgcctcttcctcggtgaggcgctcttccagcgggcaggcagcatggcggccgtggagacgcgggtgtgcgagacagacggctgcagcagtgaggccaagctccagtgtcccacttgcatcaagctgggcatccagggctcgtacttctgctcgcaggaatgttttaaaggaagttgggctactcacaagttactacataagaaagcaaaagatgaaaaggcgaagcgagaagtgtcttcctggactgtggaaggtgatattaatactgacccatgggcaggttatcgatatactggtaaactcagaccacattatccactgatgccaacaaggccagtgccaagttatattcaaagaccagattatgctgatcatcccttaggaatgtctgaatctgaacaggctcttaaaggtacttctcagattaaattactctcatctgaagatatagaagggatgcgacttgtatgtaggcttgctagagaagttttggatgttgctgccggcatgattaaaccaggtgtaactactgaagaaatagatcacgctgtacacttagcatgtattgcaagaaattgctacccttctcccctgaattattataatttcccaaagtcttgttgtacctcagtgaatgaagtcatttgccatggaataccagacagaaggcccttacaagaaggtgacattgttaatgtggatatcactctttatcgcaatggttatcatggggacctgaatgagacattttttgttggagaagtggatgatggagcacggaaacttgttcagaccacatatgagtgcctgatgcaagccattgatgcagtgaagcctggtgttcggtacagagaattgggaaacattatccagaagcatgcccaagcaaatgggttttcagttgttcgaagctattgtgggcatggaatccacaagctttttcatacagctcccaatgtaccccactatgctaaaaataaagcagttggagtgatgaagtcgggccatgtatttacaattgagccaatgatttgtgaaggcggatggcaggatgaaacctggccagatggttggactgcggtgacaagagacggaaagcggtctgctcagtttgagcacaccctcctggtcacagacactggctgtgaaatcctaacccggcgacttgacagtgcacggcctcacttcatgtctcaattttaatttctcccaagatggcacatctcagtaccttcttactgtgctatgcattttattgagagtacagaaaggaagaggaacctttttttaatcacttgttttgttttgactatagataagaaaggactacagcatttgatgtgtgtcctcaagaacttgtcttgggtctgaaaaagctgagaagaataaaggaaacattgctcaactcttcagccccctccccctgcacacctgttttctcatttgccctttgagcacttttacttaaacttgcttgtagttgcttttatcactgccgcaaaacagccatcaagagccatctgctttccaggtgaacattggaaatgagaatctttgaaacttagcaatatgtgttgcaccagattttttaaattatatatatggaaatatatatgtatacattttaagttctgtatacataattaccaaacactatgtgacctggagtttgtgttgtttctgctctgacaggtttatatgttcttacaaatggatccatagtttgcagtgatttaattcctggttgggatttggcctcccctctcccccatgctaattatttacccttgtaattgtgcatagggaagcactcacccaatgagactttctccaatgtggactctgtgtgtcagtgaatgaatgtagtaaaattcactttggaaggttatcaggcttttaaaaatctagtttatggcaaaaatagccattttccaagtggtggctgactgttgcagggaatgagaatttcataatacactgctatttcagacctctgtttggtcagaaatggaaaagaaaaagccccctttcttcccttttctgttttacttcaagggcataccttggaggtgctcagagaagcgtgaagtttgcactatggtggaggatggggaaagagttctaaagtgtctccagctgtgaacccaggaggtcaagtgggctattaaaatctaacgttgagtaaatgtgatagtgatgagaaaggaattttgtgtactgtaaccttgcagtagagatgcagctgtccttcgtgtgtggaaacacacctctcctttacatagttgggaacctcattagaaatgacctcagctgccccatatctacgttcctttcagcagttgtccaagtaggagtgtatccagtgaagacatatcaaatcacaaagtcattgtcattagagtgtacttgattactgggcatccttgtaatataatttcataccactgacacattatacttgtaagagaacatctttcccagagtgcctcagaccttattgctttaaaatataataatgttttcattacttttattatttgaatgatttagtaaagttgactgaatctggtatagactttgggagtatgtgtgtgaagtttttatcaaactgtaatatttgtgaatggaatgccttgcaatatgaatgttaatataatgtgtaaagggagattaaaaagtttgaatgattatcctaccat

SEQ ID NO: 153239 - DNA, 1058 bp, Homo sapiens
  Payload ID: 10149
  Gene Symbol: METAP1
  Gene Name: methionyl aminopeptidase 1
  ENST ID: ENST00000514051
  CDS Start-End: 1-351
ctttatcgcaatggttatcatggggacctgaatgagacattttttgttggagaagtggatgatggagcacggaaacttgttcagaccacatatgagtgcctgatgcaagccattgatgcagaaaataaagcagttggagtgatgaagtcgggccatgtatttacaattgagccaatgatttgtgaaggcggatggcaggatgaaacctggccagatggttggactgcggtgacaagagacggaaagcggtctgctcagtttgagcacaccctcctggtcacagacactggctgtgaaatcctaacccggcgacttgacagtgcacggcctcacttcatgtctcaattttaatttctcccaagatggcacatctcagtaccttcttactgtgctatgcattttattgagagtacagaaaggaagaggaacctttttttaatcacttgttttgttttgactatagataagaaaggactacagcatttgatgtgtgtcctcaagaacttgtcttgggtctgaaaaagctgagaagaataaaggaaacattgctcaactcttcagccccctccccctgcacacctgttttctcatttgccctttgagcacttttacttaaacttgcttgtagttgcttttatcactgccgcaaaacagccatcaagagccatctgctttccaggtgaacattggaaatgagaatctttgaaacttagcaatatgtgttgcaccagattttttaaattatatatatggaaatatatatgtatacattttaagttctgtatacataattaccaaacactatgtgacctggagtttgtgttgtttctgctctgacaggtttatatgttcttacaaatggatccatagtttgcagtgatttaattcctggttgggatttggcctcccctctcccccatgctaattatttacccttgtaattgtgcatagggaagcactcacccaatgagactttctccaatgtggactctgtgtgtcagtgaatgaatgtagtaaaattcactttggaaggttatcaggcttttaaaaatctagtt

SEQ ID NO: 153240 - DNA, 715 bp, Homo sapiens
  Payload ID: 10149
  Gene Symbol: METAP1
  Gene Name: methionyl aminopeptidase 1
  ENST ID: ENST00000510133
  CDS Start-End: 1-513
gcatgtattgcaagaaattgctacccttctcccctgaattattataatttcccaaagtcttgttgtacctcagtgaatgaagtcatttgccatggaataccagacagaaggcccttacaagaaggtgacattgttaatgtgaagcctggtgttcggtacagagaattgggaaacattatccagaagcatgcccaagcaaatgggttttcagttgttcgaagctattgtgggcatggaatccacaagctttttcatacagctcccaatgtaccccactatgctaaaaataaagcagttggagtgatgaagtcgggccatgtatttacaattgagccaatgatttgtgaaggcggatggcaggatgaaacctggccagatggttggactgcggtgacaagagacggaaagcggtctgctcagtttgagcacaccctcctggtcacagacactggctgtgaaatcctaacccggcgacttgacagtgcacggcctcacttcatgtctcaattttaatttctcccaagatggcacatctcagtaccttcttactgtgctatgcattttattgagagtacagaaaggaagaggaacctttttttaatcacttgttttgttttgactatagataagaaaggactacagcatttgatgtgtgtcctcaagaacttgtcttgggtctgaaaaagctgagaagaataaaggaaacattgctcaa

SEQ ID NO: 153241 - DNA, 653 bp, Homo sapiens
  Payload ID: 10149
  Gene Symbol: METAP1
  Gene Name: methionyl aminopeptidase 1
  ENST ID: ENST00000503247
  CDS Start-End: 1-135
gagacgcgggtgtgcgagacagacggctgcagcagtgaggccaagctccagtgtcccacttgcatcaagctgggcatccagggctcgtacttctgctcgcagcaacgtggaaggaaccagaggctgttattctaagtgaagtaactctggaatggaaaaccaagtaccaggtcgtctcgcttacaagtaggagctaagctgtgggaatgttttaaaggaagttgggctactcacaagttactacataagaaagcaaaagatgaaaaggcgaagcgagaagtgtcttcctggactgtggaaggtgatattaatactgacccatgggcaggttatcgatatactggtaaactcagaccacattatccactgatgccaacaaggccagtgccaagttatattcaaagaccagattatgctgatcatcccttagataatgatactgagacacccagcgaagataggtaatttgcaacacaggaatgtctgaatctgaacaggctcttaaaggtacttctcagattaaattactctcatctgaagatatagaagggatgcgacttgtatgtaggcttgctagagaagttttggatgttgctgccggcatgattaaaccaggtgtaactactgaagaaatagatcacgctgtacactta

SEQ ID NO: 153242 - DNA, 553 bp, Homo sapiens
  Payload ID: 10149
  Gene Symbol: METAP1
  Gene Name: methionyl aminopeptidase 1
  ENST ID: ENST00000506238
  CDS Start-End: 15-161
agcgggcaggcagcatggcggccgtggagacgcgggtgtgcgagacagacggctgcagcagtgaggccaagctccagtgtcccacttgcatcaagctgggcatccagggctcgtacttctgctcgcagcaacgtggaaggaaccagaggctgttattctaagtgaagtaactctggaatggaaaaccaagtaccaggtcgtctcgcttacaagtaggagctaagctgaatgttttaaaggaagttgggctactcacaagttactacataagaaagcaaaagatgaaaaggcgaagcgagaagtgtcttcctggactgtggaaggtgatattaatactgacccatgggcaggttatcgatatactggtaaactcagaccacattatccactgatgccaacaaggccagtgccaagttatattcaaagaccagattatgctgatcatcccttagataatgatactgagacacccagcgaagataggtaatttgcaacacaggctcttaaaggtacttctcagattaaattactctcatctgaagatatagaaggg

SEQ ID NO: 153243 - DNA, 770 bp, Homo sapiens
  Payload ID: 10149
  Gene Symbol: METAP1
  Gene Name: methionyl aminopeptidase 1
  ENST ID: ENST00000510107
  CDS Start-End: 1-116
tcaagctgggcatccagggctcgtacttctgctcgcaggaatgttttaaaggaagttgggctactcacaagttactacataagaaagcaaagagaaggtgttatgtaatgtcttaaactggctccaccaaactttgtgaccatgggttattctaagtctcacctccaagatgctggaatcataggtttgtgtgaggattaaataaagaaatccatgagaagtgcttagcatgtgtaccatgcataaagatgaaaaggcgaagcgagaagtgtcttcctggactgtggaaggtgatattaatactgacccatgggcaggttatcgatatactggtaaactcagaccacattatccactgatgccaacaaggccagtgccaagttatattcaaagaccagattatgctgatcatcccttagaattttcctggctattcttgcatgtttgtttttccatgtgaaatttagaatcagcttgtctggttctcaaaattatcctgttgacatttttttattgggatagtattaaatttatagattaattttggaagaattgacatctttacaatattgagtcttcctgtccaggaacagggaatgtctgaatctgaacaggctcttaaaggtacttctcagattaaattactctcatctgaagatatagaagggatgcgacttgtatgtaggcttgctagagaagttttggatgttgctgccggcatgattaaaccaggtgtaactactgaagaaatagatcacgctgtacactta

SEQ ID NO: 153244 - DNA, 718 bp, Homo sapiens
  Payload ID: 10149
  Gene Symbol: METAP1
  Gene Name: methionyl aminopeptidase 1
  ENST ID: ENST00000507537
  CDS Start-End: 34-180
ctcggtgaggcgctcttccagcgggcaggcagcatggcggccgtggagacgcgggtgtgcgagacagacggctgcagcagtgaggccaagctccagtgtcccacttgcatcaagctgggcatccagggctcgtacttctgctcgcagcaacgtggaaggaaccagaggctgttattctaagtgaagtaactctggaatggaaaaccaagtaccaggtcgtctcgcttacaagtaggagctaagctgaatgttttaaaggaagttgggctactcacaagttactacataagaaagcaaaagatgaaaaggcgaagcgagaagtgtcttcctggactgtggaaggtgatattaatactgacccatgggcaggttatcgatatactggtaaactcagaccacattatccactgatgccaacaaggccagtgccaagttatattcaaagaccagattatgctgatcatcccttaggaatgtctgaatctgaacaggctcttaaaggtacttctcagattaaattactctcatctgaagatatagaagggatgcgacttgtatgtaggcttgctagagaagttttggatgttgctgccggcatgattaaaccaggtgtaactactgaagaaatagatcacgctgtacacttagcatgtattgcaagaaattgctacccttctcccctgaattattataatttcccaaagtcttgttgtacctc

SEQ ID NO: 153245 - DNA, 147 bp, Homo sapiens
  Payload ID: 10149
  Gene Symbol: METAP1
  Gene Name: methionyl aminopeptidase 1
  ENST ID: ENST00000625963
  CDS Start-End: 1-147
atggcggccgtggagacgcgggtgtgcgagacagacggctgcagcagtgaggccaagctccagtgtcccacttgcatcaagctgggcatccagggctcgtacttctgctcgcagcaacgtggaaggaaccagaggctgttattctaa

SEQ ID NO: 153246 - DNA, 1836 bp, Homo sapiens
  Payload ID: 10150
  Gene Symbol: METAP2
  Gene Name: methionyl aminopeptidase 2
  Uniprot ID: P50579
  ENST ID: ENST00000261220
  CDS Start-End: 31-1398
gtctcattccctcgcgctctctcgggcaacatggcgggtgtggaggaggtagcggcctccgggagccacctgaatggcgacctggatccagacgacagggaagaaggagctgcctctacggctgaggaagcagccaagaaaaaaagacgaaagaagaagaagagcaaagggccttctgcaggggaacaggaacctgataaagaatcaggagcctcagtggatgaagtagcaagacagttggaaagatcagcattggaagataaagaaagagatgaagatgatgaagcaaaagttcaaacagaccctccctcagttccaatatgtgacctgtatcctaatggtgtatttcccaaaggacaagaatgcgaatacccacccacacaagatgggcgaacagctgcttggagaactacaagtgaagaaaagaaagcattagatcaggcaagtgaagagatttggaatgattttcgagaagctgcagaagcacatcgacaagttagaaaatacgtaatgagctggatcaagcctgggatgacaatgatagaaatctgtgaaaagttggaagactgttcacgcaagttaataaaagagaatggattaaatgcaggcctggcatttcctactggatgttctctcaataattgtgctgcccattatactcccaatgccggtgacacaacagtattacagtatgatgacatctgtaaaatagactttggaacacatataagtggtaggattattgactgtgcttttactgtcacttttaatcccaaatatgatacgttattaaaagctgtaaaagatgctactaacactggaataaagtgtgctggaattgatgttcgtctgtgtgatgttggtgaggccatccaagaagttatggagtcctatgaagttgaaatagatgggaagacatatcaagtgaaaccaatccgtaatctaaatggacattcaattgggcaatatagaatacatgctggaaaaacagtgccgattgtgaaaggaggggaggcaacaagaatggaggaaggagaagtatatgcaattgaaacctttggtagtacaggaaaaggtgttgttcatgatgatatggaatgttcacattacatgaaaaattttgatgttggacatgtgccaataaggcttccaagaacaaaacacttgttaaatgtcatcaatgaaaactttggaacccttgccttctgccgcagatggctggatcgcttgggagaaagtaaatacttgatggctctgaagaatctgtgtgacttgggcattgtagatccatatccaccattatgtgacattaaaggatcatatacagcgcaatttgaacataccatcctgttgcgtccaacatgtaaagaagttgtcagcagaggagatgactattaaacttagtccaaagccacctcaacacctttattttctgagctttgttggaaaacatgataccagaattaatttgccacatgttgtctgttttaacagtggacccatgtaatacttttatccatgtttaaaaaagaaggaatttggacaaaggcaaaccgtctaatgtaattaaccaacgaaaaagctttccggacttttaaatgctaactgtttttccccttcctgtctaggaaaatgctataaagctcaaattagttaggaatgacttatacgttttgttttgaatacctaagagatactttttggatatttatattgccatattcttacttgaatgctttgaatgactacatccagttctgcacctataccctctggtgttgctttttaaccttcctggaatccattttctaaaaaataaagacattttcagatctg

SEQ ID NO: 153247 - DNA, 3601 bp, Homo sapiens
  Payload ID: 10150
  Gene Symbol: METAP2
  Gene Name: methionyl aminopeptidase 2
  Uniprot ID: P50579
  ENST ID: ENST00000323666
  CDS Start-End: 230-1666
gcagtcgggtctggccccagtcgactccagccaggcggggctccaagccgagactcctgcacgcccggcccgaagctagcccgacaccctcagctgagtcctccgccgtcccagcattccctgcgtccctaccatcgagagcagcttccggcgtggctggtgtaggcgggtggagaaggatcggggccctcgccgctctgtctcattccctcgcgctctctcgggcaacatggcgggtgtggaggaggtagcggcctccgggagccacctgaatggcgacctggatccagacgacagggaagaaggagctgcctctacggctgaggaagcagccaagaaaaaaagacgaaagaagaagaagagcaaagggccttctgcagcaggggaacaggaacctgataaagaatcaggagcctcagtggatgaagtagcaagacagttggaaagatcagcattggaagataaagaaagagatgaagatgatgaagatggagatggcgatggagatggagcaactggaaagaagaagaaaaagaagaagaagaagagaggaccaaaagttcaaacagaccctccctcagttccaatatgtgacctgtatcctaatggtgtatttcccaaaggacaagaatgcgaatacccacccacacaagatgggcgaacagctgcttggagaactacaagtgaagaaaagaaagcattagatcaggcaagtgaagagatttggaatgattttcgagaagctgcagaagcacatcgacaagttagaaaatacgtaatgagctggatcaagcctgggatgacaatgatagaaatctgtgaaaagttggaagactgttcacgcaagttaataaaagagaatggattaaatgcaggcctggcatttcctactggatgttctctcaataattgtgctgcccattatactcccaatgccggtgacacaacagtattacagtatgatgacatctgtaaaatagactttggaacacatataagtggtaggattattgactgtgcttttactgtcacttttaatcccaaatatgatacgttattaaaagctgtaaaagatgctactaacactggaataaagtgtgctggaattgatgttcgtctgtgtgatgttggtgaggccatccaagaagttatggagtcctatgaagttgaaatagatgggaagacatatcaagtgaaaccaatccgtaatctaaatggacattcaattgggcaatatagaatacatgctggaaaaacagtgccgattgtgaaaggaggggaggcaacaagaatggaggaaggagaagtatatgcaattgaaacctttggtagtacaggaaaaggtgttgttcatgatgatatggaatgttcacattacatgaaaaattttgatgttggacatgtgccaataaggcttccaagaacaaaacacttgttaaatgtcatcaatgaaaactttggaacccttgccttctgccgcagatggctggatcgcttgggagaaagtaaatacttgatggctctgaagaatctgtgtgacttgggcattgtagatccatatccaccattatgtgacattaaaggatcatatacagcgcaatttgaacataccatcctgttgcgtccaacatgtaaagaagttgtcagcagaggagatgactattaaacttagtccaaagccacctcaacacctttattttctgagctttgttggaaaacatgataccagaattaatttgccacatgttgtctgttttaacagtggacccatgtaatacttttatccatgtttaaaaaagaaggaatttggacaaaggcaaaccgtctaatgtaattaaccaacgaaaaagctttccggacttttaaatgctaactgtttttccccttcctgtctaggaaaatgctataaagctcaaattagttaggaatgacttatacgttttgttttgaatacctaagagatactttttggatatttatattgccatattcttacttgaatgctttgaatgactacatccagttctgcacctataccctctggtgttgctttttaaccttcctggaatccattttctaaaaaataaagacattttcagatctgagagctacatctcaatgtctgtggttataattctggacaggataaatagctaaacttaatgtaggcaaatgcagagacatttatctgaaatgtagacctctacactgagacttttctggcatagtggctaaaacaagatctacacatgcataaaaagggacaatcaccttttcttcataaatatacagctttaggaatatttcaccattctttgtaggacatagtagtccttgtctttttttctcctgacattggaaagatgtgctaattgaaacttgacttagtaggaacattgtgccaactcaaaaccttgatttagtaaaaatctcaatgtttagatcctttgtccagtggtggtgtttatcagggaatgtattcagcttgctcagaaaaccaaaagggtattaaagccacaaaagcaaagaagaaaaaaaaaaacttcccatgtttggatcttgttctagttagaaaaattaagttgaaattcttggactttttcattcatgaggcaaatgctgtaataccttcccctttgacaggtttggattcttaacattactagtggtatttcaggaagtgacgttacagttactttccttatagcggctaagtgtattaagttgaatgtaacgatggtaatattaatttgtttgaactgaggcccactactgattctttgacaaattgaattcttatatttaaataattttatgggaatgttccatcataatttctaaatcatttatatatcaaggtagccttaatttgtatatgtttcagtacaatgagattttattgcctctgggatgctgtttagtttgtattttgttgaacgtttttatcctaggaagagaaacctatgacttgtgtacctagatcatctgttacattaaaaagctgctctttcagcattagagctataaatgaatgttaccttgtcgggaaacaatctaggttttagctgtatgagctatgtttattatggtgctaatgttcagtagccacatttgactaatgtctccattctctgtgatgctgtggctagcagcagagctcgccagttcatgcctggacatactgtcagggctgggccctccagctagctcctttggggttgagtccgtatctttttgatgtggaagtataaagcaagtatcttgatttctaaacccagcaattttagaattgacctttatgagtgaagacttttggagcttttaaagaccttggcagtcatgatctcaaaccaattaggagctccaagctcccttcccaggtaactgttgggagcaatggcatcactgtatgcccttgtaatggctggaagggacatgatcttgtaagtaggaaagctgtaactaaaaattgtattgtttgcttattagccatgtatctcttaaaattttgttatgtttacaacgatgtaccttattggcaacaagttattagtttgatgtttaacaatagtgcctttagtaaattattttacaactaaaa

SEQ ID NO: 153248 - DNA, 2431 bp, Homo sapiens
  Payload ID: 10150
  Gene Symbol: METAP2
  Gene Name: methionyl aminopeptidase 2
  ENST ID: ENST00000535095
  CDS Start-End: 661-1647
gtcctgaattggaaagtgagcggagtgtgacgggttcccatcttgaaccgtccggggttgagtagtacaataaactaacacggaactccagcttccaaaattctctccagtgcctacagagcctcgcggagagctgtgattgtgaatgtcaacgcagatttgattaaatctcttagatttaagagatatgtggagtcatgacaatagaaatgtgtacaagtgaacacatttcttagcccgtttccccactgcctgtgtgatttataaaaacgcaaatataaaatatttccgttccagcagagacgccgcttgctacggcgggttgcccgtctccacaggtatctccggctgactctagagctcaacttcccctttaaacttcaccctgcgcttgccgatttgcttcgggaatgcccgaggcaccggacgaagcagtcgggtctggccccagtcgactccagccaggcggggctccaagccgagactcctgcacgcccggcccgaagctagcccgacaccctcagctgagtcctccgccgtcccagcattccctgcgtccctaccatcgagagcagcttccggcgtggctggtgtaggcgggtggagaaggatcggggccctcgccgctctgtctcattccctcgcgctctctcgggcaacatggcgggtgtggaggaggtagcggcctccgggagccacctgaatggcgacctggatccagacgacagggaagaaggagctgcctctacggctgaggaagcagccaagaaaaaaagacgaaagaagaagaagagcaaagggccttctgcagcaggggaacaggaacctgataaagaatcaggagcctcagtggatgaagtagcaagacagttggaaagatcagcattggaagataaagaaagagatgaagatgatgaagatggagatggcgatggagatggagcaactggaaagaagaagaaaaagaagaagaagaagagaggaccaaaagttcaaacagaccctccctcagttccaatatgtgacctgtatcctaatggtgtatttcccaaaggacaagaatgcgaatacccacccacacaagatgggcgaacagctgcttggagaactacaagtgaagaaaagaaagcattagatcaggcaagtgaagagatttggaatgattttcgagaagctgcagaagcacatcgacaagttagaaaatacgtaatgagctggatcaagcctgggatgacaatgatagaaatctgtgaaaagttggaagactgttcacgcaagttaataaaagagaatggattaaatgcaggcctggcatttcctactggatgttctctcaataattgtgctgcccattatactcccaatgccggtgacacaacagtattacagtatgatgacatctgtaaaatagactttggaacacatataagtggtaggattattgactgtgcttttactgtcacttttaatcccaaatatgatacgttattaaaagctgtaaaagatgctactaacactggaataaagtgtgctggaattgatgttcgtctgtgtgatgttggtgaggccatccaagaagttatggagtcctatgaagttgaaatagatgggaagacatatcaaggaaggagaagtatatgcaattgaaacctttggtagtacaggaaaaggtgttgttcatgatgatatggaatgttcacattacatgaaaaattttgatgttggacatgtgccaataaggcttccaagaacaaaacacttgttaaatgtcatcaatgaaaactttggaacccttgccttctgccgcagatggctggatcgcttgggagaaagtaaatacttgatggctctgaagaatctgtgtgacttgggcattgtagatccatatccaccattatgtgacattaaaggatcatatacagcgcaatttgaacataccatcctgttgcgtccaacatgtaaagaagttgtcagcagaggagatgactattaaacttagtccaaagccacctcaacacctttattttctgagctttgttggaaaacatgataccagaattaatttgccacatgttgtctgttttaacagtggacccatgtaatacttttatccatgtttaaaaaagaaggaatttggacaaaggcaaaccgtctaatgtaattaaccaacgaaaaagctttccggacttttaaatgctaactgtttttccccttcctgtctaggaaaatgctataaagctcaaattagttaggaatgacttatacgttttgttttgaatacctaagagatactttttggatatttatattgccatattcttacttgaatgctttgaatgactacatccagttctgcacctataccctctggtgttgctttttaaccttcctggaatccattttctaaaaaataaagacattttcagatctg

SEQ ID NO: 153249 - DNA, 538 bp, Homo sapiens
  Payload ID: 10150
  Gene Symbol: METAP2
  Gene Name: methionyl aminopeptidase 2
  ENST ID: ENST00000549808
  CDS Start-End: 50-538
gtgcaaataatttttttttaatgttggctactaaagggcttagagccaaatgtgtggtttttgtgttggcctcatttcagcaaaagttcaaacagaccctccctcagttccaatatgtgacctgtatcctaatggtgtatttcccaaaggacaagaatgcgaatacccacccacacaagatgggcgaacagctgcttggagaactacaagtgaagaaaagaaagcattagatcaggcaagtgaagagatttggaatgattttcgagaagctgcagaagcacatcgacaagttagaaaatacgtaatgagctggatcaagcctgggatgacaatgatagaaatctgtgaaaagttggaagactgttcacgcaagttaataaaagagaatggattaaatgcaggcctggcatttcctactggatgttctctcaataattgtgctgcccattatactcccaatgccggtgacacaacagtattacagtatgatgacatctgtaaaatagactttggaacacatataagtggtaaattcttg

SEQ ID NO: 153250 - DNA, 1862 bp, Homo sapiens
  Payload ID: 10150
  Gene Symbol: METAP2
  Gene Name: methionyl aminopeptidase 2
  Uniprot ID: P50579
  ENST ID: ENST00000546753
  CDS Start-End: 100-1467
accatcgagagcagcttccggcgtggctggtgtaggcgggtggagaaggatcggggccctcgccgctctgtctcattccctcgcgctctctcgggcaacatggcgggtgtggaggaggtagcggcctccgggagccacctgaatggcgacctggatccagacgacagggaagaaggagctgcctctacggctgaggaagcagccaagaaaaaaagacgaaagaagaagaagagcaaagggccttctgcagcaggggaacaggaacctgataaagaatcaggagcctcagtggatgaagtagcaagacagttggaaagatcagcattggaagataaagaaagagatgaagatgatgaagatggagatggcgatggagatggagcaactggaaagaagaagaaaaagaagaagaagaagagaggacgacaagaatgcgaatacccacccacacaagatgggcgaacagctgcttggagaactacaagtgaagaaaagaaagcattagatcaggcaagtgaagagatttggaatgattttcgagaagctgcagaagcacatcgacaagttagaaaatacgtaatgagctggatcaagcctgggatgacaatgatagaaatctgtgaaaagttggaagactgttcacgcaagttaataaaagagaatggattaaatgcaggcctggcatttcctactggatgttctctcaataattgtgctgcccattatactcccaatgccggtgacacaacagtattacagtatgatgacatctgtaaaatagactttggaacacatataagtggtaggattattgactgtgcttttactgtcacttttaatcccaaatatgatacgttattaaaagctgtaaaagatgctactaacactggaataaagtgtgctggaattgatgttcgtctgtgtgatgttggtgaggccatccaagaagttatggagtcctatgaagttgaaatagatgggaagacatatcaagtgaaaccaatccgtaatctaaatggacattcaattgggcaatatagaatacatgctggaaaaacagtgccgattgtgaaaggaggggaggcaacaagaatggaggaaggagaagtatatgcaattgaaacctttggtagtacaggaaaaggtgttgttcatgatgatatggaatgttcacattacatgaaaaattttgatgttggacatgtgccaataaggcttccaagaacaaaacacttgttaaatgtcatcaatgaaaactttggaacccttgccttctgccgcagatggctggatcgcttgggagaaagtaaatacttgatggctctgaagaatctgtgtgacttgggcattgtagatccatatccaccattatgtgacattaaaggatcatatacagcgcaatttgaacataccatcctgttgcgtccaacatgtaaagaagttgtcagcagaggagatgactattaaacttagtccaaagccacctcaacacctttattttctgagctttgttggaaaacatgataccagaattaatttgccacatgttgtctgttttaacagtggacccatgtaatacttttatccatgtttaaaaaagaaggaatttggacaaaggcaaaccgtctaatgtaattaaccaacgaaaaagctttccggacttttaaatgctaactgtttttccccttcctgtctaggaaaatgctataaagctcaaattagttaggaatgacttatacgttttgttttgaatacctaagagatactttttggatatttatattgccatattcttacttgaatgctttgaatgactacatccagttctgcacctataccctctggtgttgctttttaacctt

SEQ ID NO: 153251 - DNA, 513 bp, Homo sapiens
  Payload ID: 10150
  Gene Symbol: METAP2
  Gene Name: methionyl aminopeptidase 2
  ENST ID: ENST00000549502
  CDS Start-End: 29-513
ctcattccctcgcgctctctcgggcaacatggcgggtgtggaggaggtagcggcctccgggagccacctgaatggcgacctggatccagacgacagggaagaaggagctgcctctacggctgaggaagcagccaagaaaaaaagacgaaagaagaagaagagcaaagggccttctgcagcaggggaacaggaacctgataaagaatcaggagcctcagtggatgaagtagcaagacagttggaaagatcagcattggaagataaagaaagagatgaagatgatgaaggatacaagatctccctcccgtcacccaggctgacgtgctgtggctcgatctcagctcactgcagccttgacttccctggctcagatggagatggcgatggagatggagcaactggaaagaagaagaaaaagaagaagaagaagagaggaccaaaagttcaaacagaccctccctcagttccaatatgtgacctgtatcctaatggtgtatttcccaaaggacaaga

SEQ ID NO: 153252 - DNA, 1779 bp, Homo sapiens
  Payload ID: 10150
  Gene Symbol: METAP2
  Gene Name: methionyl aminopeptidase 2
  ENST ID: ENST00000550777
  CDS Start-End: 26-1354
attccctcgcgctctctcgggcaacatggcgggtgtggaggaggtagcggcctccgggagccacctgaatggcgacctggatccagacgacagggaagaaggagctgcctctacggctgaggaagcagccaagaaaaaaagacgaaagaagaagaagagcaaagggccttctgcagatggagatggcgatggagatggagcaactggaaagaagaagaaaaagaagaagaagaagagaggaccaaaagttcaaacagaccctccctcagttccaatatgtgacctgtatcctaatggtgtatttcccaaaggacaagaatgcgaatacccacccacacaagatgggcgaacagctgcttggagaactacaagtgaagaaaagaaagcattagatcaggcaagtgaagagatttggaatgattttcgagaagctgcagaagcacatcgacaagttagaaaatacgtaatgagctggatcaagcctgggatgacaatgatagaaatctgtgaaaagttggaagactgttcacgcaagttaataaaagagaatggattaaatgcaggcctggcatttcctactggatgttctctcaataattgtgctgcccattatactcccaatgccggtgacacaacagtattacagtatgatgacatctgtaaaatagactttggaacacatataagtggtaggattattgactgtgcttttactgtcacttttaatcccaaatatgatacgttattaaaagctgtaaaagatgctactaacactggaataaagtgtgctggaattgatgttcgtctgtgtgatgttggtgaggccatccaagaagttatggagtcctatgaagttgaaatagatgggaagacatatcaagtgaaaccaatccgtaatctaaatggacattcaattgggcaatatagaatacatgctggaaaaacagtgccgattgtgaaaggaggggaggcaacaagaatggaggaaggagaagtatatgcaattgaaacctttggtagtacaggaaaaggtgttgttcatgatgatatggaatgttcacattacatgaaaaattttgatgttggacatgtgccaataaggcttccaagaacaaaacacttgttaaatgtcatcaatgaaaactttggaacccttgccttctgccgcagatggctggatcgcttgggagaaagtaaatacttgatggctctgaagaatctgtgtgacttgggcattgtagatccatatccaccattatgtgacattaaaggatcatatacagcgcaatttgaacataccatcctgttgcgtccaacatgtaaagaagttgtcagcagaggagatgactattaaacttagtccaaagccacctcaacacctttattttctgagctttgttggaaaacatgataccagaattaatttgccacatgttgtctgttttaacagtggacccatgtaatacttttatccatgtttaaaaaagaaggaatttggacaaaggcaaaccgtctaatgtaattaaccaacgaaaaagctttccggacttttaaatgctaactgtttttccccttcctgtctaggaaaatgctataaagctcaaattagttaggaatgacttatacgttttgttttgaatacctaagagatactttttggatatttatattgccatattcttacttgaatgctttgaatgactacatccagttctgcacctataccctctggtgttgctttttaaccttcctggaatccattttctaaaaaataaagac

SEQ ID NO: 153253 - DNA, 564 bp, Homo sapiens
  Payload ID: 10150
  Gene Symbol: METAP2
  Gene Name: methionyl aminopeptidase 2
  ENST ID: ENST00000553151
  CDS Start-End: 29-564
ctcattccctcgcgctctctcgggcaacatggcgggtgtggaggaggtagcggcctccgggagccacctgaatggcgacctggatccagacgacagggaagaaggagctgcctctacggctgaggaagcagccaagaaaaaaagacgaaagaagaagaagagcaaagggccttctgcagcattggaagataaagaaagagatgaagatgatgaagatggagatggcgatggagatggagcaactggaaagaagaagaaaaagaagaagaagaagagaggaccaaaagttcaaacagaccctccctcagttccaatatgtgacctgtatcctaatggtgtatttcccaaaggacaagaatgcgaatacccacccacacaagatgggcgaacagctgcttggagaactacaagtgaagaaaagaaagcattagatcaggcaagtgaagagatttggaatgattttcgagaagctgcagaagcacatcgacaagttagaaaatacgtaatgagctggatcaagcctgggatgacaatgatagaaatctgtgaaaagttggaagactg

SEQ ID NO: 153254 - DNA, 1874 bp, Homo sapiens
  Payload ID: 10150
  Gene Symbol: METAP2
  Gene Name: methionyl aminopeptidase 2
  ENST ID: ENST00000551840
  CDS Start-End: 19-1452
cgcgctctctcgggcaacatggcgggtgtggaggaggtagcggcctccgggagccacctgaatggcgacctggatccagacgacagggaagaaggagctgcctctacggctgaggaagcagccaagaaaaaaagacgaaagaagaagaagagcaaagggccttctgcaggggaacaggaacctgataaagaatcaggagcctcagtggatgaagtagcaagacagttggaaagatcagcattggaagataaagaaagagatgaagatgatgaagatggagatggcgatggagatggagcaactggaaagaagaagaaaaagaagaagaagaagagaggaccaaaagttcaaacagaccctccctcagttccaatatgtgacctgtatcctaatggtgtatttcccaaaggacaagaatgcgaatacccacccacacaagatgggcgaacagctgcttggagaactacaagtgaagaaaagaaagcattagatcaggcaagtgaagagatttggaatgattttcgagaagctgcagaagcacatcgacaagttagaaaatacgtaatgagctggatcaagcctgggatgacaatgatagaaatctgtgaaaagttggaagactgttcacgcaagttaataaaagagaatggattaaatgcaggcctggcatttcctactggatgttctctcaataattgtgctgcccattatactcccaatgccggtgacacaacagtattacagtatgatgacatctgtaaaatagactttggaacacatataagtggtaggattattgactgtgcttttactgtcacttttaatcccaaatatgatacgttattaaaagctgtaaaagatgctactaacactggaataaagtgtgctggaattgatgttcgtctgtgtgatgttggtgaggccatccaagaagttatggagtcctatgaagttgaaatagatgggaagacatatcaagtgaaaccaatccgtaatctaaatggacattcaattgggcaatatagaatacatgctggaaaaacagtgccgattgtgaaaggaggggaggcaacaagaatggaggaaggagaagtatatgcaattgaaacctttggtagtacaggaaaaggtgttgttcatgatgatatggaatgttcacattacatgaaaaattttgatgttggacatgtgccaataaggcttccaagaacaaaacacttgttaaatgtcatcaatgaaaactttggaacccttgccttctgccgcagatggctggatcgcttgggagaaagtaaatacttgatggctctgaagaatctgtgtgacttgggcattgtagatccatatccaccattatgtgacattaaaggatcatatacagcgcaatttgaacataccatcctgttgcgtccaacatgtaaagaagttgtcagcagaggagatgactattaaacttagtccaaagccacctcaacacctttattttctgagctttgttggaaaacatgataccagaattaatttgccacatgttgtctgttttaacagtggacccatgtaatacttttatccatgtttaaaaaagaaggaatttggacaaaggcaaaccgtctaatgtaattaaccaacgaaaaagctttccggacttttaaatgctaactgtttttccccttcctgtctaggaaaatgctataaagctcaaattagttaggaatgacttatacgttttgttttgaatacctaagagatactttttggatatttatattgccatattcttacttgaatgctttgaatgactacatccagttctgcacctataccctctggtgttgctttttaaccttcctggaatccattttctaaaaaataaa

SEQ ID NO: 153255 - DNA, 3419 bp, Homo sapiens
  Payload ID: 10151
  Gene Symbol: METAP1D
  Gene Name: methionyl aminopeptidase type 1D (mitochondrial)
  Uniprot ID: Q6UB28
  ENST ID: ENST00000315796
  CDS Start-End: 388-1395
atgttgaacactagattgtgctttattttttccgcccaacttcacgtttccatgcaccaaaatgttgatgctataaatattggatgccacgcttacctgacaggcttcttccatcccacctgggcgcgggggctcagagcgagcgcgcgagccgcggctggagcccgcctctcgcggctggagaggactcagccggccgcgggttctgctgcttgcccgggtgccctagccgcttcccagccagggctcccgcagtcagccccgcgcgcgcacgcgcgctcccctcgggcggcctcgacgcctcagggcttcggcagggctgcgactggccggctccagcgggcggggcggcgagcgagtgctcgcggccacgtgaccgacgccaacatggcggcgcccagtggcgtccacctgctcgtccgcagaggttctcatagaattttctcttcaccactcaatcatatctacttacacaagcagtcaagcagtcaacaaagaagaaatttcttttttcggagacaaagagatatttcacacagtatagttttgccggctgcagtttcttcagctcatccggttcctaagcacataaagaagccagactatgtgacgacaggcattgtaccagactggggagacagcatagaagttaagaatgaagatcagattcaagggcttcatcaggcttgtcagctggcccgccacgtcctcctcttggctgggaagagtttaaaggttgacatgacaactgaagagatagatgctcttgttcatcgggaaatcatcagtcataatgcctatccctcacctctaggctatggaggttttccaaaatctgtttgtacctctgtaaacaacgtgctctgtcatggtattcctgacagtcgacctcttcaggatggagatattatcaacattgatgtcacagtctattacaatggctaccatggagacacctctgaaacatttttggtgggcaatgtggacgaatgtggtaaaaagttagtggaggttgccaggaggtgtagagatgaagcaattgcagcttgcagagcaggggctcccttctctgtaattggaaacacaatcagccacataactcatcagaatggttttcaagtctgtccacattttgtgggacatggaataggatcttactttcatggacatccagaaatttggcatcatgcaaacgacagtgatctacccatggaggagggcatggcattcactatagagccaatcatcacggagggatcccctgaatttaaagtcctggaggatgcatggactgtggtctccctagacaatcaaaggtcggcgcagttcgagcacacggttctgatcacgtcgaggggcgcgcagatcctgaccaaactaccccatgaggcctgaggagccgcccgaaggtcgcggtgacctggtgcctttttaaataaattgctgaaatttggctggagaacttttagaagaaacagggaaatgaccggtggtgcggtaacctgcgtggctcctgatagcgtttggaagaacgcgggggagactgaagagcaactgggaactcggatctgaagccctgctggggtcgcgcggctttggaaaaacaaatcctggccctggactcggtttcccagcgcggtcaacgcatctggaggggactggaggaaacccccttgttggaagagattccaagagaagcacggttttctctttcccttgccctgactgttggagtaaaaaacctcttaaatccattgtatcagaggtccttacctctctgacagttacagtgatctttgtatctgaactttgcacgtctgccgaaaaatccgaacctgttgactgggatttttaagaatccgtttctcccttttgtgtattccatattggccggccccaaggatgctcgcagaagccagcccccaaccccagcccttccgtatctttcccctccatcgcggctttgcgatgaaagattagcccgcgaacagaggcattgattacaaacatgtccttggcagtggactctgggcctggccattcttcaggtttctgtcaatccagaaacgcgactttcctggacccctgcggctcttcctcccccgcccacatccagccctccaaggccagtccagaggtgaagtttgaggccctccccccacccaccccacacgcacgcacgcacgctagaccgtttgctgcactaggaattcgagcttgggccccactcgcccaggtgtgaacagtggctgattagtgggcggtctagtctctaaaatgacccctccccagactggcccttctcgcatcgggacccgcgcttgcacgctgcaggagccgcaaacgtcagctgttctggaaaccgagagggtcccagagagaggagatacgggcgcatttgagagcaagggcctacttggccgggactgaagcttgcgagttgagctccagttcggccggcagttccatcccgcttcaggaacaggaatccaagggcccacgctctgtctgccaagggccattcctgcccggagcaccctcctttcccttgcgcttgctctccggtacctgttcctcacctgagctcaagggcagggagaggccgggcctctggcagtccacgaaggaagccgtctgccttcggttatgattttaggaacaagtccaacgagggtgttcaagcagttaatggttgtgctaactcttgtttctactgaagcgggttttgcaaagctgacatcccttaaagataacttgggctttcggaagcggcaaggaaatggcacctgtagttgccaggacaggtggtgtcctcggccaggactaagagccagctcatctttgtaacattcataatacgggaaactgaggaccaggtggctcggaaaagagatgagttccagcttttacctaacacagggttctctcgtcgtcccccaacccctccagctcggcttctttgtgtccagggttgtagatttttggatagaggtgtttctgattctagtgagtctgagaactggaaaagaccaaggaggggttgatgatttacaaggtccatagaaaaactttttgtgtggtcggaagttggccaagcagaggcccacagcctgatgctactgccccccacccccccaaagatctgaattccctaaagatcaagagggttcagctggccttgggagatgtttgctggagaatgacttcagttttctcctaaggcaatcagattgcaaccattagcattgtatcttatctgcaaatcagtttactccgaggttccccaaggatagttttattaggaccacaggactttactaaccactgaggtaacacgctgcttgtgcagcaattattttgaggtggaggtatttatgggacaagtttataattccatttattaaagggactaacctaaa

SEQ ID NO: 153256 - DNA, 2905 bp, Homo sapiens
  Payload ID: 10152
  Gene Symbol: MARS
  Gene Name: methionyl-tRNA synthetase
  Uniprot ID: P56192
  ENST ID: ENST00000262027
  CDS Start-End: 135-2837
agtctactttccggtagcggtgccagggcagtggcctaatacggaactccatttcccggcgtgcctcgcggaggccgctgaactcagaagcgggaggccggttccggttgcatcagcgagggattcacggcgaaatgagactgttcgtgagtgatggcgtcccgggttgcttgccggtgctggccgccgccgggagagcccggggcagagcagaggtgctcatcagcactgtaggcccggaagattgtgtggtcccgttcctgacccggcctaaggtccctgtcttgcagctggatagcggcaactacctcttctccactagtgcaatctgccgatatttttttttgttatctggctgggagcaagatgacctcactaaccagtggctggaatgggaagcgacagagctgcagccagctttgtctgctgccctgtactatttagtggtccaaggcaagaagggggaagatgttcttggttcagtgcggagagccctgactcacattgaccacagcttgagtcgtcagaactgtcctttcctggctggggagacagaatctctagccgacattgttttgtggggagccctatacccattactgcaagatcccgcctacctccctgaggagctgagtgccctgcacagctggttccagacactgagtacccaggaaccatgtcagcgagctgcagagactgtactgaaacagcaaggtgtcctggctctccggccttacctccaaaagcagccccagcccagccccgctgagggaagggctgtcaccaatgagcctgaggaggaggagctggctaccctatctgaggaggagattgctatggctgttactgcttgggagaagggcctagaaagtttgcccccgctgcggccccagcagaatccagtgttgcctgtggctggagaaaggaatgtgctcatcaccagtgccctcccttacgtcaacaatgtcccccaccttgggaacatcattggttgtgtgctcagtgccgatgtctttgccaggtactctcgcctccgccagtggaacaccctctatctgtgtgggacagatgagtatggtacagcaacagagaccaaggctctggaggagggactaaccccccaggagatctgcgacaagtaccacatcatccatgctgacatctaccgctggtttaacatttcgtttgatatttttggtcgcaccaccactccacagcagaccaaaatcacccaggacattttccagcagttgctgaaacgaggttttgtgctgcaagatactgtggagcaactgcgatgtgagcactgtgctcgcttcctggctgaccgcttcgtggagggcgtgtgtcccttctgtggctatgaggaggctcggggtgaccagtgtgacaagtgtggcaagctcatcaatgctgtcgagcttaagaagcctcagtgtaaagtctgccgatcatgccctgtggtgcagtcgagccagcacctgtttctggacctgcctaagctggagaagcgactggaggagtggttggggaggacattgcctggcagtgactggacacccaatgcccagtttatcacccgttcttggcttcgggatggcctcaagccacgctgcataacccgagacctcaaatggggaacccctgtacccttagaaggttttgaagacaaggtattctatgtctggtttgatgccactattggctatctgtccatcacagccaactacacagaccagtgggagagatggtggaagaacccagagcaagtggacctgtatcagttcatggccaaagacaatgttcctttccatagcttagtctttccttgctcagccctaggagctgaggataactataccttggtcagccacctcattgctacagagtacctgaactatgaggatgggaaattctctaagagccgcggtgtgggagtgtttggggacatggcccaggacacggggatccctgctgacatctggcgcttctatctgctgtacattcggcctgagggccaggacagtgctttctcctggacggacctgctgctgaagaataattctgagctgcttaacaacctgggcaacttcatcaacagagctgggatgtttgtgtctaagttctttgggggctatgtgcctgagatggtgctcacccctgatgatcagcgcctgctggcccatgtcaccctggagctccagcactatcaccagctacttgagaaggttcggatccgggatgccttgcgcagtatcctcaccatatctcgacatggcaaccaatatattcaggtgaatgagccctggaagcggattaaaggcagtgaggctgacaggcaacgggcaggaacagtgactggcttggcagtgaatatagctgccttgctctctgtcatgcttcagccttacatgcccacggttagtgccacaatccaggcccagctgcagctcccacctccagcctgcagtatcctgctgacaaacttcctgtgtaccttaccagcaggacaccagattggcacagtcagtcccttgttccaaaaattggaaaatgaccagattgaaagtttaaggcagcgctttggagggggccaggcaaaaacgtccccgaagccagcagttgtagagactgttacaacagccaagccacagcagatacaagcgctgatggatgaagtgacaaaacaaggaaacattgtccgagaactgaaagcacaaaaggcagacaagaacgaggttgctgcggaggtggcgaaactcttggatctaaagaaacagttggctgtagctgaggggaaaccccctgaagcccctaaaggcaagaagaaaaagtaaaagaccttggctcatagaaagtcactttaatagatagggacagtaataaataaatgtacaatctctat

SEQ ID NO: 153257 - DNA, 2979 bp, Homo sapiens
  Payload ID: 10152
  Gene Symbol: MARS
  Gene Name: methionyl-tRNA synthetase
  ENST ID: ENST00000545888
  CDS Start-End: 26-448
gcatcagcgagggattcacggcgaaatgagactgttcgtgagtgatggcgtcccgggttgcttgccggtgctggccgccgccgggagagcccggggcagagcagaggtgctcatcagcactgtaggcccggaagattgtgtggtcccgttcctgacccggcctaaggtccctgtcttgcagctggatagcggcaactacctcttctccactagtgcaatctgccgatatttttttttgttatctggctgggagcaagatgacctcactaaccagtggctggaatgggaagcgacagagctgcagccagctttgtctgctgccctgtactatttagtggtccaaggcaagaagggggaagatgttcttggttcagtgcggagagccctgactcacattgaccacagcttgagtcgtcagaactgtcctttcctggctgggaggagctgagtgccctgcacagctggttccagacactgagtacccaggaaccatgtcagcgagctgcagagactgtactgaaacagcaaggtgtcctggctctccggccttacctccaaaagcagccccagcccagccccgctgagggaagggctgtcaccaatgagcctgaggaggaggagctggctaccctatctgaggaggagattgctatggctgttactgcttgggagaagggcctagaaagtttgcccccgctgcggccccagcagaatccagtgttgcctgtggctggagaaaggaatgtgctcatcaccagtgccctcccttacgtcaacaatgtcccccaccttgggaacatcattggttgtgtgctcagtgccgatgtctttgccaggtactctcgcctccgccagtggaacaccctctatctgtgtgggacagatgagtatggtacagcaacagagaccaaggctctggaggagggactaaccccccaggagatctgcgacaagtaccacatcatccatgctgacatctaccgctggtttaacatttcgtttgatatttttggtcgcaccaccactccacagcagaccaaaatcacccaggacattttccagcagttgctgaaacgaggttttgtgctgcaagatactgtggagcaactgcgatgtgagcactgtgctcgcttcctggctgaccgcttcgtggagggcgtgtgtcccttctgtggctatgaggaggctcggggtgaccagtgtgacaagtgtggcaagctcatcaatgctgtcgagcttaagaagcctcagtgtaaagtctgccgatcatgccctgtggtgcagtcgagccagcacctgtttctggacctgcctaagctggagaagcgactggaggagtggttggggaggacattgcctggcagtgactggacacccaatgcccagtttatcacccgttcttggcttcgggatggcctcaagccacgctgcataacccgagacctcaaatggggaacccctgtacccttagaaggttttgaagacaaggtattctatgtctggtttgatgccactattggctatctgtccatcacagccaactacacagaccagtgggagagatggtggaagaacccagagcaagtggacctgtatcagttcatggccaaagacaatgttcctttccatagcttagtctttccttgctcagccctaggagctgaggataactataccttggtcagccacctcattgctacagagtacctgaactatgaggatgggaaattctctaagagccgcggtgtgggagtgtttggggacatggcccaggacacggggatccctgctgacatctggcgcttctatctgctgtacattcggcctgagggccaggacagtgctttctcctggacggacctgctgctgaagaataattctgagctgcttaacaacctgggcaacttcatcaacagagctgggatgtttgtgtctaagttctttgggggctatgtgcctgagatggtgctcacccctgatgatcagcgcctgctggcccatgtcaccctggagctccagcactatcaccagctacttgagaaggttcggatccgggatgccttgcgcagtatcctcaccatatctcgacatggcaaccaatatattcaggtgaatgagccctggaagcggattaaaggcagtgaggctgacaggcaacgggcaggaacagtgactggcttggcagtgaatatagctgccttgctctctgtcatgcttcagccttacatgcccacggttagtgccacaatccaggcccagctgcagctcccacctccagcctgcagtatcctgctgacaaacttcctgtgtaccttaccagcaggacaccagattggcacagtcagtcccttgttccaaaaattggaaaatgaccagattgaaagtttaaggcagcgctttggagggggccaggtgagaaagctaaaggctgtgccctcgctccacaacagccacagcatcacttccctaatttccctaagtagtcctcacccatcactctttccatcttttggccctgccgcttcctcacttacagtttttctttcctgtcttaactagaagagaccttcgacttaaaggtaaccactttccctctgagatgctgtataaaactggaggttaggggatatttatggttgctggtgataactttgttgttctccaggcaaaaacgtccccgaagccagcagttgtagagactgttacaacagccaagccacagcagatacaagcgctgatggatgaagtgacaaaacaaggaaacattgtccgagaactgaaagcacaaaaggcagacaagaacgaggttgctgcggaggtggcgaaactcttggatctaaagaaacagttggctgtagctgaggggaaaccccctgaagcccctaaaggcaagaagaaaaagtaaaagaccttggctcatagaaagtcactttaatagatagggacagtaataaataaatgtacaatctctatatacaa

SEQ ID NO: 153258 - DNA, 3592 bp, Homo sapiens
  Payload ID: 10152
  Gene Symbol: MARS
  Gene Name: methionyl-tRNA synthetase
  Uniprot ID: P56192
  ENST ID: ENST00000537638
  CDS Start-End: 687-2327
tgttgttgataggatggatatgtacactaacttccactttgtcactaattccgcacatggtaactccgaactctaaaactctgaccgttaagagcttgcatcgagagccactgcgagtagctgctgttatgacatggccatttcattctccacaacaagagaagcagccgcggcttcagtcaccgccctccagcagcgtaagaggataaaagtgcgacttgccctaaaacctaaacgtctcttctggatctccagaaaaaaagtgctgctctaggccgggcgcagtggctcacgcctgtaatcctagcactttggcaggccgaggcgggcggatcatctgaggtgaggacttcgagaccagcctagccaaaatggtcaaagcccgcctctactaaaaatacaaaaattagccgagcgtggtggcacgtgcctgtagtcccagctgcatgggaggctgaggccggagaatcacttgaaccctggaggcagaggttgcagcgagccaagaccgtgccactgcacttcagcccagcgttgcatgatgggagaaatagtctactttccggtagcggtgccagggcagtggcctaatacggaactccatttcccggcgtgcctcgcggaggccgctgaactcagaagcgggaggccggttccggttgcatcagcgagggattcacggcgaaatgagactgttcgtgagtgatggcgtcccgggttgcttgccggtgctggccgccgccgggagagcccggggcagagcagaggtgctcatcagcactgtaggcccggaagattgtgtggtcccgttcctgacccggcctaaggtccctgtcttgcagctggatagcggcaactacctcttctccactagtgcaatctgccgatatttttttttgttatctggctgggagcaagatgacctcactaaccagtggctggaatgggaagcgacagagctgcagccagctttgtctgctgccctgtactatttagtggtccaaggcaagaagggggaagatgttcttggttcagtgcggagagccctgactcacattgaccacagcttgagtcgtcagaactgtcctttcctggctggggagacagaatctctagccgacattgttttgtggggagccctatacccattactgcaagatcccgcctacctccctgaggagctgagtgccctgcacagctggttccagacactgagtacccaggaaccatgtcagcgagctgcagagactgtactgaaacagcaaggtgtcctggctctccggccttacctccaaaagcagccccagcccagccccgctgagggaagggctgtcaccaatgagcctgaggaggaggagctggctaccctatctgaggaggagattgctatggctgttactgcttgggagaagggcctagaaagtttgcccccgctgcggccccagcagaatccagtgttgcctgtggctggagaaaggaatgtgctcatcaccagtgccctcccttacgtcaacaatgtcccccaccttgggaacatcattggttgtgtgctcagtgccgatgtctttgccaggtactctcgcctccgccagtggaacaccctctatctgtgtgggacagatgagtatggtacagcaacagagaccaaggctctggaggagggactaaccccccaggagatctgcgacaagtaccacatcatccatgctgacatctaccgctggtttaacatttcgtttgatatttttggtcgcaccaccactccacagcagaccaaaatcacccaggacattttccagcagttgctgaaacgaggttttgtgctgcaagatactgtggagcaactgcgatgtgagcactgtgctcgcttcctggctgaccgcttcgtggagggcgtgtgtcccttctgtggctatgaggaggctcggggtgaccagtgtgacaagtgtggcaagctcatcaatgctgtcgagcttaagaagcctcagtgtaaagtctgccgatcatgccctgtggtgcagtcgagccagcacctgtttctggacctgcctaagctggagaagcgactggaggagtggttggggaggacattgcctggcagtgactggacacccaatgcccagtttatcacccgttcttggcttcgggatggcctcaagccacgctgcataacccgagacctcaaatggggaacccctgtacccttagaaggttttgaagacaaggtattctatgtctggtttgatgccactattggctatctgtccatcacagccaactacacagaccagtgggagagatggtggaagaacccagagcaaccctaggagctgaggataactataccttggtcagccacctcattgctacagagtacctgaactatgaggatgggaaattctctaagagccgcggtgtgggagtgtttggggacatggcccaggacacggggatccctgctgacatctggcgcttctatctgctgtacattcggcctgagggccaggacagtgctttctcctggacggacctgctgctgaagaataattctgagctgcttaacaacctgggcaacttcatcaacagagctgggatgtttgtgtctaagttctttgggggctatgtgcctgagatggtgctcacccctgatgatcagcgcctgctggcccatgtcaccctggagctccagcactatcaccagctacttgagaaggttcggatccgggatgccttgcgcagtatcctcaccatatctcgacatggcaaccaatatattcaggtgaatgagccctggaagcggattaaaggcagtgaggctgacaggcaacgggcaggaacagtgactggcttggcagtgaatatagctgccttgctctctgtcatgcttcagccttacatgcccacggttagtgccacaatccaggcccagctgcagctcccacctccagcctgcagtatcctgctgacaaacttcctgtgtaccttaccagcaggacaccagattggcacagtcagtcccttgttccaaaaattggaaaatgaccagattgaaagtttaaggcagcgctttggagggggccaggcaaaaacgtccccgaagccagcagttgtagagactgttacaacagccaagccacagcagatacaagcgctgatggatgaagtgacaaaacaaggaaacattgtccgagaactgaaagcacaaaaggcagacaagaacgaggttgctgcggaggtggcgaaactcttggatctaaagaaacagttggctgtagctgaggggaaaccccctgaagcccctaaaggaggtgaaacataggtacccccattttcatctgaagacaggacctcttgcaggtcctcataccaggcttccagctcccagctggacagtgtcccgaaggagaaaggcaatgactcagctgccatctctgcagttggatcagtctggaaaagcacatctgcaggataatggggagtggctggaacaagctccatgtagcaaacagtctatgccacaagttggcaagctggtctgatgcctgtttttgtaggtaaagttgtactggaatacagccacatctgtttattt

SEQ ID NO: 153259 - DNA, 559 bp, Homo sapiens
  Payload ID: 10152
  Gene Symbol: MARS
  Gene Name: methionyl-tRNA synthetase
  ENST ID: ENST00000551431
  CDS Start-End: 24-311
atcagcgagggattcacggcgaaatgagactgttcgtgagtgatggcgtcccgggttgcttgccggtgctggccgccgccgggagagcccggggcagagcagaggtgctcatcagcactgtaggcccggaagattgtgtggtcccgttcctgacccggcctaaggtccctgtcttgcagctggatagcggcaactacctcttctccactagtgcaatctgccgatatttttttttgttatctggctgggagcaagatgacctcactaaccagtggctggaatgggaagcgacagagctgcagaggagctgagtgccctgcacagctggttccagacactgagtacccaggaaccatgtcagcgagctgcagagactgtactgaaacagcaaggtgtcctggctctccggccttacctccaaaagcagccccagcccagccccgctgagggaagggctgtcaccaatgagcctgaggaggaggagctggctaccctatctgaggaggagattgctatggctgttactgcttgggagaagggcctagaaagtttgcccccg

SEQ ID NO: 153260 - DNA, 510 bp, Homo sapiens
  Payload ID: 10152
  Gene Symbol: MARS
  Gene Name: methionyl-tRNA synthetase
  ENST ID: ENST00000547501
  CDS Start-End: 24-356
atcagcgagggattcacggcgaaatgagactgttcgtgagtgatggcgtcccgggttgcttgccggtgctggccgccgccgggagagcccggggcagagcagaggtgctcatcagcactgtaggcccggaagattgtgtggtcccgttcctgacccggcctaaggtccctgtcttgcagctggatagcggcaactacctcttctccactagtgcaatctgccgatatttttttttgttatctggctgggagcaagatgacctcactaaccagtggctggaatgggaagcgacagagctgcagtggtccaaggcaagaagggggaagatgttcttggttcagtgcggagagccctgactcacattgaccacagcttgagtcgtcagaactgtcctttcctggctggggagacagaatctctagccgacattgttttgtggggagccctatacccattactgcaagatcccgcctacctccctgaggagctgagtgccctgcacagctggtt

SEQ ID NO: 153261 - DNA, 532 bp, Homo sapiens
  Payload ID: 10152
  Gene Symbol: MARS
  Gene Name: methionyl-tRNA synthetase
  ENST ID: ENST00000549074
  CDS Start-End: 24-368
atcagcgagggattcacggcgaaatgagactgttcgtgagtgatggcgtcccgggttgcttgccggtgctggccgccgccgggagagcccggggcagagcagaggtgctcatcagcactgtaggcccggaagattgtgtggtcccgttcctgacccggcctaaggtccctgtcttgcagctggatagcggcaactacctcttctccactagtgcaatctgccgaggagctgagtgccctgcacagctggttccagacactgagtacccaggaaccatgtcagcgagctgcagagactgtactgaaacagcaaggtgtcctggctctccggccttacctccaaaagcagccccagcccagccccgctgagggaagggctgtcaccaatgagcctgaggaggaggagctggctaccctatctgaggaggagattgctatggctgttactgcttgggagaagggcctagaaagtttgcccccgctgcggccccagcagaatccagtgttgcctgtggctggagaaaggaatgtgc

SEQ ID NO: 153262 - DNA, 555 bp, Homo sapiens
  Payload ID: 10152
  Gene Symbol: MARS
  Gene Name: methionyl-tRNA synthetase
  ENST ID: ENST00000552499
  CDS Start-End: 1-246
gtgaatatagctgccttgctctctgtcatgcttcagccttacatgcccacggttagtgccacaatccaggcccagctgcagctcccacctccagcctgcagtatcctgctgacaaacttcctgtgtaccttaccagcaggacaccagattggcacagtcagtcccttgttccaaaaattggaaaatgaccagattgaaagtttaaggcagcgctttggagggggccagaagagaccttcgacttaaaggcaaaaacgtccccgaagccagcagttgtagagactgttacaacagccaagccacagcagatacaagcgctgatggatgaagtgacaaaacaaggaaacattgtccgagaactgaaagcacaaaaggcagacaagaacgaggttgctgcggaggtggcgaaactcttggatctaaagaaacagttggctgtagctgaggggaaaccccctgaagcccctaaaggcaagaagaaaaagtaaaagaccttggctcatagaaagtcactttaatagatagggacagtaataaataaatgtacaatctcta

SEQ ID NO: 153263 - DNA, 699 bp, Homo sapiens
  Payload ID: 10152
  Gene Symbol: MARS
  Gene Name: methionyl-tRNA synthetase
  ENST ID: ENST00000552371
  CDS Start-End: 1-699
gtcgtcagaactgtcctttcctggctggggagacagaatctctagccgacattgttttgtggggagccctatacccattactgcaagatcccgcctacctccctgaggagctgagtgccctgcacagctggttccagacactgagtacccaggaaccatgtcagcgagctgcagagactgtactgaaacagcaaggtgtcctggctctccggccttacctccaaaagcagccccagcccagccccgctgagggaagggctgtcaccaatgagcctgaggaggaggagctggctaccctatctgaggaggagattgctatggctgttactgcttgggagaagggcctagaaagtttgcccccgctgcggccccagcagaatccagtgtactctcgcctccgccagtggaacaccctctatctgtgtgggacagatgagtatggtacagcaacagagaccaaggctctggaggagggactaaccccccaggagatctgcgacaagtaccacatcatccatgctgacatctaccgctggtttaacatttcgtttgatatttttggtcgcaccaccactccacagcagaccaaaatcacccaggacattttccagcagttgctgaaacgaggttttgtgctgcaagatactgtggagcaactgcgatgtgagcactgtgctcgcttcctggctgaccgcttcg

SEQ ID NO: 153264 - DNA, 699 bp, Homo sapiens
  Payload ID: 10152
  Gene Symbol: MARS
  Gene Name: methionyl-tRNA synthetase
  ENST ID: ENST00000551172
  CDS Start-End: 1-373
gaatatagctgccttgctctctgtcatgcttcagccttacatgcccacggttagtgccacaatccaggcccagctgcagctcccacctccagcctgcagtatcctgctgacaaacttcctgtgtaccttaccagcaggacaccagattggcacagtcagtcccttgttccaaaaattggaaaatgaccagattgaaagtttaaggcagcgctttggagggggccaggtgagaaagctaaaggctgtgccctcgctccacaacagccacagcatcacttccctaatttccctaagtagtcctcacccatcactctttccatcttttggccctgccgcttcctcacttacagtttttctttcctgtcttaactagaagagaccttcgacttaaaggcaaaaacgtccccgaagccagcagttgtagagactgttacaacagccaagccacagcagatacaagcgctgatggatgaagtgacaaaacaaggaaacattgtccgagaactgaaagcacaaaaggcagacaagaacgaggttgctgcggaggtggcgaaactcttggatctaaagaaacagttggctgtagctgaggggaaaccccctgaagcccctaaaggcaagaagaaaaagtaaaagaccttggctcatagaaagtcactttaatagatagggacagtaataaataaatgtacaatctct

SEQ ID NO: 153265 - DNA, 434 bp, Homo sapiens
  Payload ID: 10152
  Gene Symbol: MARS
  Gene Name: methionyl-tRNA synthetase
  ENST ID: ENST00000552007
  CDS Start-End: 7-222
ggcgaaatgagactgttcgtgagtgatggcgtcccgggttgcttgccggtgctggccgccgccgggagagcccggggcagagcagaggtgctcatcagcactgtaggcccggaagattgtgtggtcccgttcctgacccggcctaaggtccctgtcttgcagctggatagcggcaactacctcttctccactagtgcaatctgccggagacagaatctctagccgacattgttttgtggggagccctatacccattactgcaagatcccgcctacctccctgaggagctgagtgccctgcacagctggttccagacactgagtacccaggaaccatgtcagcgagctgcagagactgtactgaaacagcaaggtgtcctggctctccggccttacctccaaaagcagccccagcccagccccgctgagggaagg

SEQ ID NO: 153266 - DNA, 670 bp, Homo sapiens
  Payload ID: 10152
  Gene Symbol: MARS
  Gene Name: methionyl-tRNA synthetase
  ENST ID: ENST00000547665
  CDS Start-End: 1-358
gcaacgggcaggaacagtgactggcttggcagtgaatatagctgccttgctctctgtcatgcttcagccttacatgcccacggttagtgccacaatccaggcccagctgcagctcccacctccagcctgcagtatcctgctgacaaacttcctgtgtaccttaccagcaggacaccagattggcacagtcagtcccttgttccaaaaattggaaaatgaccagattgaaagtttaaggcagcgctttggagggggccaggcaaaaacgtccccgaagccagcagttgtagagactgttacaacagccaagccacagcagatacaagcgctgatggatgaagtgacaaaacaagtatgaagcttaagccctgtgggagactggacaagctgaatcctaaatagatctttttcttgcctcactgttacctccccacccccctttatcttagggaaacattgtccgagaactgaaagcacaaaaggcagacaagaacgaggttgctgcggaggtggcgaaactcttggatctaaagaaacagttggctgtagctgaggggaaaccccctgaagcccctaaaggcaagaagaaaaagtaaaagaccttggctcatagaaagtcactttaatagatagggacagtaataaataaatgtacaatctctatatacaa

SEQ ID NO: 153267 - DNA, 294 bp, Homo sapiens
  Payload ID: 10152
  Gene Symbol: MARS
  Gene Name: methionyl-tRNA synthetase
  ENST ID: ENST00000548944
  CDS Start-End: 1-177
ggttttgtgctgcaagatactgtggagcaactgcgatgtgagcactgtgctcgcttcctggctgaccgcttcgtggagggcgtgtgtcccttctgtggctatgaggaggctcggggtgaccagtgtgacaagtgtggcgaaactcttggatctaaagaaacagttggctgtagctgaggggaaaccccctgaagcccctaaaggcaagaagaaaaagtaaaagaccttggctcatagaaagtcactttaatagatagggacagtaataaataaatgtacaatctctatatacaa

SEQ ID NO: 153268 - DNA, 734 bp, Homo sapiens
  Payload ID: 10152
  Gene Symbol: MARS
  Gene Name: methionyl-tRNA synthetase
  ENST ID: ENST00000552914
  CDS Start-End: 1-660
gagctgcttaacaacctgggcaacttcatcaacagagctgggatgtttgtgtctaagttctttgggggctatgtgcctgagatggtgctcacccctgatgatcagcgcctgctggcccatgtcaccctggagctccagcactatcaccagctacttgagaaggttcggatccgggatgccttgcgcagtatcctcaccatatctcgacatggcaaccaatatattcagccttacatgcccacggttagtgccacaatccaggcccagctgcagctcccacctccagcctgcagtatcctgctgacaaacttcctgtgtaccttaccagcaggacaccagattggcacagtcagtcccttgttccaaaaattggaaaatgaccagattgaaagtttaaggcagcgctttggagggggccaggcaaaaacgtccccgaagccagcagttgtagagactgttacaacagccaagccacagcagatacaagcgctgatggatgaagtgacaaaacaaggaaacattgtccgagaactgaaagcacaaaaggcagacaagaacgaggttgctgcggaggtggcgaaactcttggatctaaagaaacagttggctgtagctgaggggaaaccccctgaagcccctaaaggcaagaagaaaaagtaaaagaccttggctcatagaaagtcactttaatagatagggacagtaataaataaatgtacaatctctatatacaa

SEQ ID NO: 153269 - DNA, 748 bp, Homo sapiens
  Payload ID: 10152
  Gene Symbol: MARS
  Gene Name: methionyl-tRNA synthetase
  ENST ID: ENST00000551892
  CDS Start-End: 7-189
ggcgaaatgagactgttcgtgagtgatggcgtcccgggttgcttgccggtgctggccgccgccgggagagcccggggcagagcagaggtgctcatcagcactgtaggcccggaagactgtactgaaacagcaaggtgtcctggctctccggccttacctccaaaagcagccccagcccagccccgctgagggaagggctgtcaccaatgagcctgaggaggaggagctggctaccctatctgaggaggagattgctatggctgttactgcttgggagaagggcctagaaagtttgcccccgctgcggccccagcagaatccagtgttgcctgtggctggagaaaggaatgtgctcatcaccagtgccctcccttacgtcaacaatgtcccccaccttgggaacatcattggttgtgtgctcagtgccgatgtctttgccaggtactctcgcctccgccagtggaacaccctctatctgtgtgggacagatgagtatggtacagcaacagagaccaaggctctggaggagggactaaccccccaggagatctgcgacaagtaccacatcatccatgctgacatctaccgctggtttaacatttcgtttgatatttttggtcgcaccaccactccacagcagaccaaaatcacccaggacattttccagcagttgctgaaacgaggttttgtgctgcaagatactgtggagcaactgcgatgtgagcactgtgctcgcttcctggctgac

SEQ ID NO: 153270 - DNA, 216 bp, Homo sapiens
  Payload ID: 10152
  Gene Symbol: MARS
  Gene Name: methionyl-tRNA synthetase
  ENST ID: ENST00000630571
  CDS Start-End: 1-216
atgagactgttcgtgagtgatggcgtcccgggttgcttgccggtgctggccgccgccgggagagcccggggcagagcagaggtgctcatcagcactgtaggcccggaagattgtgtggtcccgttcctgacccggcctaaggtccctgtcttgcagctggatagcggcaactacctcttctccactagtgcaatctgccggagacagaatctctag

SEQ ID NO: 153271 - DNA, 183 bp, Homo sapiens
  Payload ID: 10152
  Gene Symbol: MARS
  Gene Name: methionyl-tRNA synthetase
  ENST ID: ENST00000630803
  CDS Start-End: 1-183
atgagactgttcgtgagtgatggcgtcccgggttgcttgccggtgctggccgccgccgggagagcccggggcagagcagaggtgctcatcagcactgtaggcccggaagactgtactgaaacagcaaggtgtcctggctctccggccttacctccaaaagcagccccagcccagccccgctga

SEQ ID NO: 153272 - DNA, 2583 bp, Homo sapiens
  Payload ID: 10152
  Gene Symbol: MARS
  Gene Name: methionyl-tRNA synthetase
  ENST ID: ENST00000628866
  CDS Start-End: 24-311
atcagcgagggattcacggcgaaatgagactgttcgtgagtgatggcgtcccgggttgcttgccggtgctggccgccgccgggagagcccggggcagagcagaggtgctcatcagcactgtaggcccggaagattgtgtggtcccgttcctgacccggcctaaggtccctgtcttgcagctggatagcggcaactacctcttctccactagtgcaatctgccgatatttttttttgttatctggctgggagcaagatgacctcactaaccagtggctggaatgggaagcgacagagctgcagaggagctgagtgccctgcacagctggttccagacactgagtacccaggaaccatgtcagcgagctgcagagactgtactgaaacagcaaggtgtcctggctctccggccttacctccaaaagcagccccagcccagccccgctgagggaagggctgtcaccaatgagcctgaggaggaggagctggctaccctatctgaggaggagattgctatggctgttactgcttgggagaagggcctagaaagtttgcccccgctgcggccccagcagaatccagtgttgcctgtggctggagaaaggaatgtgctcatcaccagtgccctcccttacgtcaacaatgtcccccaccttgggaacatcattggttgtgtgctcagtgccgatgtctttgccaggtactctcgcctccgccagtggaacaccctctatctgtgtgggacagatgagtatggtacagcaacagagaccaaggctctggaggagggactaaccccccaggagatctgcgacaagtaccacatcatccatgctgacatctaccgctggtttaacatttcgtttgatatttttggtcgcaccaccactccacagcagaccaaaatcacccaggacattttccagcagttgctgaaacgaggttttgtgctgcaagatactgtggagcaactgcgatgtgagcactgtgctcgcttcctggctgaccgcttcgtggagggcgtgtgtcccttctgtggctatgaggaggctcggggtgaccagtgtgacaagtgtggcaagctcatcaatgctgtcgagcttaagaagcctcagtgtaaagtctgccgatcatgccctgtggtgcagtcgagccagcacctgtttctggacctgcctaagctggagaagcgactggaggagtggttggggaggacattgcctggcagtgactggacacccaatgcccagtttatcacccgttcttggcttcgggatggcctcaagccacgctgcataacccgagacctcaaatggggaacccctgtacccttagaaggttttgaagacaaggtattctatgtctggtttgatgccactattggctatctgtccatcacagccaactacacagaccagtgggagagatggtggaagaacccagagcaagtggacctgtatcagttcatggccaaagacaatgttcctttccatagcttagtctttccttgctcagccctaggagctgaggataactataccttggtcagccacctcattgctacagagtacctgaactatgaggatgggaaattctctaagagccgcggtgtgggagtgtttggggacatggcccaggacacggggatccctgctgacatctggcgcttctatctgctgtacattcggcctgagggccaggacagtgctttctcctggacggacctgctgctgaagaataattctgagctgcttaacaacctgggcaacttcatcaacagagctgggatgtttgtgtctaagttctttgggggctatgtgcctgagatggtgctcacccctgatgatcagcgcctgctggcccatgtcaccctggagctccagcactatcaccagctacttgagaaggttcggatccgggatgccttgcgcagtatcctcaccatatctcgacatggcaaccaatatattcaggtgaatgagccctggaagcggattaaaggcagtgaggctgacaggcaacgggcaggaacagtgactggcttggcagtgaatatagctgccttgctctctgtcatgcttcagccttacatgcccacggttagtgccacaatccaggcccagctgcagctcccacctccagcctgcagtatcctgctgacaaacttcctgtgtaccttaccagcaggacaccagattggcacagtcagtcccttgttccaaaaattggaaaatgaccagattgaaagtttaaggcagcgctttggagggggccaggcaaaaacgtccccgaagccagcagttgtagagactgttacaacagccaagccacagcagatacaagcgctgatggatgaagtgacaaaacaaggaaacattgtccgagaactgaaagcacaaaaggcagacaagaacgaggttgctgcggaggtggcgaaactcttggatctaaagaaacagttggctgtagctgaggggaaaccccctgaagcccctaaaggcaagaagaaaaagtaaaagaccttggctcatagaaagtcactttaatagatagggacagtaataaataaatgtacaatctctat

SEQ ID NO: 153273 - DNA, 3019 bp, Homo sapiens
  Payload ID: 10153
  Gene Symbol: MARS2
  Gene Name: methionyl-tRNA synthetase 2, mitochondrial
  Uniprot ID: Q96GW9
  ENST ID: ENST00000282276
  CDS Start-End: 38-1819
agaacgccgcctcctccgcttgcggccggtctgcaccatgctgcgaacgtccgtcctccgcctgctaggacgcacgggggctagtaggctgtctctcctggaggacttcggcccacgctactacagttcgggctccctcagtgccggcgatgatgcttgtgatgtgcgcgcctacttcactacacccattttctacgtgaacgcggcgccgcacatcgggcacctgtactcggcactactggcggacgccctatgccgccaccgtcgcctccgaggtcccagcacggccgccacgcgattctccactggtaccgacgagcacgggctgaagattcagcaggcagcagctaccgcgggcctggccccgaccgagctgtgcgaccgagtctctgagcagttccagcagcttttccaggaggccggtatctcctgcacagatttcatccgcaccacggaggcccggcaccgggtggctgtgcagcacttctggggggtgcttaagtcccgcggtctgctctacaagggcgtctatgaaggttggtattgcgcttccgacgagtgcttcctgcctgaggccaaggtcacccagcagccgggcccatcgggggattcgtttcctgtatctctcgagagcgggcatccagtctcctggaccaaggaagaaaactacattttcaggctttcccagttccggaagccactccagcggtggctgcggggcaaccctcaggcgatcacccccgaaccatttcatcacgtagttcttcagtggctggacgaggagctgcccgacctgtccgtgtctcgcagaagtagccacttgcactggggcattccggtgcccggggatgattcgcagaccatctatgtatggctggatgccctggtcaactacctcactgtaattggctacccaaatgctgagttcaaatcttggtggccggccacctctcatatcataggtaaggacattctcaaattccatgccatctattggcctgccttcctgttaggggccggcatgagcccgccacagcgcatctgtgtccattcccactggacagtctgtggccaaaagatgtccaagagcttgggcaacgtggtggatcctaggacttgccttaaccgctataccgtggatggcttccgctactttctccttcggcagggcgtccccaactgggactgtgactactatgatgaaaaggtggttaagttgctgaactccgagctggcagatgccttgggaggtctcttgaaccgatgcactgccaaaagaataaatccttctgagacctacccagccttctgcactacctgcttccctagtgagccagggttggtggggccgtcagttcgtgctcaggcagaggattatgctctggtgagcgcagtggccactttgccaaagcaggtagcagaccactatgataactttcggatatataaggctctggaggccgtgtccagctgtgtccggcaaactaatggttttgtccaaaggcatgcaccatggaagctgaactgggagagcccagtggatgctccctggctgggtactgtgcttcatgtggccttggaatgtttgcgagtctttgggactttgctgcagcctgtcaccccaagcctagctgacaagctgctgtctaggctgggggtctctgcctcagagaggagtcttggagagctctatttcttgcctcgattctatggacatccatgcccttttgaagggaggaggctgggacctgaaactgggcttttgtttccaagactagaccagtccaggacttggctggtgaaagcccaccggacctagaaactcagttcttaccggcttgtggtaaaaaagcaaatgtgttatctttttattttttattttcaggaaagttatactagtattttcttaagtgtggaatcaaatgagcacataagctgtgtccctgtgaaaagaggtttgtagcctttcaggtgcctgctcctattcatttctctgtgaccattgatcactgtcctttgtgcattgtgtgtctaagatgtcttcaggggaaagatgggtaagagacagtgttgctaatgctgttccttctttgtgcctccttccaaaccacagttatttgcccaaactacctctcgtggctggtttttcattggcctggcctctgcttctcaggctaattagtgactcctttctttgagggtcagggttggaggccccttactggtggttttacagggggatcctactttgttacacatgttgggtttcctgataaaaagagagtattttattaaacccttgaaccagtgtcctagaccagatgatttttgcccatgtgtatccccatttaaattcctacaactaagtctccctgctttgttaatagtccaacagttgggttgtgtaacatcacacttcaaccggtagatggctctaatctcacacatttacttactaaagattgaggattcggaatatttagaataaattagttttctgctttctaattttgcagatctttacatttttattgcttttcttaaaataagggatagctttgcaaccactattgttttaatggaaagcaaaaaacccccccaaacttatcagaatcctcgttctttttcagactactgaaaaatgacatttactctgttaaatgtttaataagtgaataagtaaatgtatcaagttgtttatataataaattataaaactcttgaggcacttggtatgttaaaaattttaaactttagtaacattaggttacaggtatgatttaaaaatttgtaaatagttcaaaagggcaatgttttctttatatttcttatagtcttaattttgttatccatgtgcataatttacctcatgatttcttttggtcaatcaggatctttaatacaatatagaaattgtgtaatagttattataaatgttaatacacaactttcaggtaattttaactgattatttcttttgctcttttaacttaagttattaaagtttaaaagttcgtaa

SEQ ID NO: 153274 - DNA, 10505 bp, Homo sapiens
  Payload ID: 10154
  Gene Symbol: MECP2
  Gene Name: methyl CpG binding protein 2
  Uniprot ID: P51608
  ENST ID: ENST00000303391
  CDS Start-End: 251-1711
gcgcgacgtcggccgtgcggggtcccggcgtcggcggcgcgcgcgctccctcctctcggagagagggctgtggtaaaagccgtccggaaaatggccgccgccgccgccgccgcgccgagcggaggaggaggaggaggcgaggaggagagactgctccataaaaatacagactcaccagttcctgctttgatgtgacatgtgactccccagaatacaccttgcttctgtagaccagctccaacaggattccatggtagctgggatgttagggctcagggaagaaaagtcagaagaccaggacctccagggcctcaaggacaaacccctcaagtttaaaaaggtgaagaaagataagaaagaagagaaagagggcaagcatgagcccgtgcagccatcagcccaccactctgctgagcccgcagaggcaggcaaagcagagacatcagaagggtcaggctccgccccggctgtgccggaagcttctgcctcccccaaacagcggcgctccatcatccgtgaccggggacccatgtatgatgaccccaccctgcctgaaggctggacacggaagcttaagcaaaggaaatctggccgctctgctgggaagtatgatgtgtatttgatcaatccccagggaaaagcctttcgctctaaagtggagttgattgcgtacttcgaaaaggtaggcgacacatccctggaccctaatgattttgacttcacggtaactgggagagggagcccctcccggcgagagcagaaaccacctaagaagcccaaatctcccaaagctccaggaactggcagaggccggggacgccccaaagggagcggcaccacgagacccaaggcggccacgtcagagggtgtgcaggtgaaaagggtcctggagaaaagtcctgggaagctccttgtcaagatgccttttcaaacttcgccagggggcaaggctgaggggggtggggccaccacatccacccaggtcatggtgatcaaacgccccggcaggaagcgaaaagctgaggccgaccctcaggccattcccaagaaacggggccgaaagccggggagtgtggtggcagccgctgccgccgaggccaaaaagaaagccgtgaaggagtcttctatccgatctgtgcaggagaccgtactccccatcaagaagcgcaagacccgggagacggtcagcatcgaggtcaaggaagtggtgaagcccctgctggtgtccaccctcggtgagaagagcgggaaaggactgaagacctgtaagagccctgggcggaaaagcaaggagagcagccccaaggggcgcagcagcagcgcctcctcaccccccaagaaggagcaccaccaccatcaccaccactcagagtccccaaaggcccccgtgccactgctcccacccctgcccccacctccacctgagcccgagagctccgaggaccccaccagcccccctgagccccaggacttgagcagcagcgtctgcaaagaggagaagatgcccagaggaggctcactggagagcgacggctgccccaaggagccagctaagactcagcccgcggttgccaccgccgccacggccgcagaaaagtacaaacaccgaggggagggagagcgcaaagacattgtttcatcctccatgccaaggccaaacagagaggagcctgtggacagccggacgcccgtgaccgagagagttagctgactttacacggagcggattgcaaagcaaaccaacaagaataaaggcagctgttgtctcttctccttatgggtagggctctgacaaagcttcccgattaactgaaataaaaaatatttttttttctttcagtaaacttagagtttcgtggcttcagggtgggagtagttggagcattggggatgtttttcttaccgacaagcacagtcaggttgaagacctaaccagggccagaagtagctttgcacttttctaaactaggctccttcaacaaggcttgctgcagatactactgaccagacaagctgttgaccaggcacctcccctcccgcccaaacctttcccccatgtggtcgttagagacagagcgacagagcagttgagaggacactcccgttttcggtgccatcagtgccccgtctacagctcccccagctccccccacctcccccactcccaaccacgttgggacagggaggtgtgaggcaggagagacagttggattctttagagaagatggatatgaccagtggctatggcctgtgcgatcccacccgtggtggctcaagtctggccccacaccagccccaatccaaaactggcaaggacgcttcacaggacaggaaagtggcacctgtctgctccagctctggcatggctaggaggggggagtcccttgaactactgggtgtagactggcctgaaccacaggagaggatggcccagggtgaggtggcatggtccattctcaagggacgtcctccaacgggtggcgctagaggccatggaggcagtaggacaaggtgcaggcaggctggcctggggtcaggccgggcagagcacagcggggtgagagggattcctaatcactcagagcagtctgtgacttagtggacaggggagggggcaaagggggaggagaagaaaatgttcttccagttactttccaattctcctttagggacagcttagaattatttgcactattgagtcttcatgttcccacttcaaaacaaacagatgctctgagagcaaactggcttgaattggtgacatttagtccctcaagccaccagatgtgacagtgttgagaactacctggatttgtatatatacctgcgcttgttttaaagtgggctcagcacatagggttcccacgaagctccgaaactctaagtgtttgctgcaattttataaggacttcctgattggtttctcttctccccttccatttctgccttttgttcatttcatcctttcacttctttcccttcctccatcctcctccttcctagttcatcccttctcttccaggcagccgcggtgcccaaccacacttgtcggctccagtccccagaactctgcctgccctttgtcctcctgctgccagtaccagccccaccctgttttgagccctgaggaggccttgggctctgctgagtccgacctggcctgtctgtgaagagcaagagagcagcaaggtcttgctctcctaggtagccccctcttccctggtaagaaaaagcaaaaggcatttcccaccctgaacaacgagccttttcacccttctactctagagaagtggactggaggagctgggcccgatttggtagttgaggaaagcacagaggcctcctgtggcctgccagtcatcgagtggcccaacaggggctccatgccagccgaccttgacctcactcagaagtccagagtctagcgtagtgcagcagggcagtagcggtaccaatgcagaactcccaagacccgagctgggaccagtacctgggtccccagcccttcctctgctcccccttttccctcggagttcttcttgaatggcaatgttttgcttttgctcgatgcagacagggggccagaacaccacacatttcactgtctgtctggtccatagctgtggtgtaggggcttagaggcatgggcttgctgtgggtttttaattgatcagttttcatgtgggatcccatctttttaacctctgttcaggaagtccttatctagctgcatatcttcatcatattggtatatccttttctgtgtttacagagatgtctcttatatctaaatctgtccaactgagaagtaccttatcaaagtagcaaatgagacagcagtcttatgcttccagaaacacccacaggcatgtcccatgtgagctgctgccatgaactgtcaagtgtgtgttgtcttgtgtatttcagttattgtccctggcttccttactatggtgtaatcatgaaggagtgaaacatcatagaaactgtctagcacttccttgccagtctttagtgatcaggaaccatagttgacagttccaatcagtagcttaagaaaaaaccgtgtttgtctcttctggaatggttagaagtgagggagtttgccccgttctgtttgtagagtctcatagttggactttctagcatatatgtgtccatttccttatgctgtaaaagcaagtcctgcaaccaaactcccatcagcccaatccctgatccctgatcccttccacctgctctgctgatgacccccccagcttcacttctgactcttccccaggaagggaaggggggtcagaagagagggtgagtcctccagaactcttcctccaaggacagaaggctcctgcccccatagtggcctcgaactcctggcactaccaaaggacacttatccacgagagcgcagcatccgaccaggttgtcactgagaagatgtttattttggtcagttgggtttttatgtattatacttagtcaaatgtaatgtggcttctggaatcattgtccagagctgcttccccgtcacctgggcgtcatctggtcctggtaagaggagtgcgtggcccaccaggcccccctgtcacccatgacagttcattcagggccgatggggcagtcgtggttgggaacacagcatttcaagcgtcactttatttcattcgggccccacctgcagctccctcaaagaggcagttgcccagcctctttcccttccagtttattccagagctgccagtggggcctgaggctccttagggttttctctctatttccccctttcttcctcattccctcgtctttcccaaaggcatcacgagtcagtcgcctttcagcaggcagccttggcggtttatcgccctggcaggcaggggccctgcagctctcatgctgcccctgccttggggtcaggttgacaggaggttggagggaaagccttaagctgcaggattctcaccagctgtgtccggcccagttttggggtgtgacctcaatttcaattttgtctgtacttgaacattatgaagatgggggcctctttcagtgaatttgtgaacagcagaattgaccgacagctttccagtacccatggggctaggtcattaaggccacatccacagtctcccccacccttgttccagttgttagttactacctcctctcctgacaatactgtatgtcgtcgagctccccccaggtctacccctcccggccctgcctgctggtgggcttgtcatagccagtgggattgccggtcttgacagctcagtgagctggagatacttggtcacagccaggcgctagcacagctcccttctgttgatgctgtattcccatatcaaaagacacaggggacacccagaaacgccacatcccccaatccatcagtgccaaactagccaacggccccagcttctcagctcgctggatggcggaagctgctactcgtgagcgccagtgcgggtgcagacaatcttctgttgggtggcatcattccaggcccgaagcatgaacagtgcacctgggacagggagcagccccaaattgtcacctgcttctctgcccagcttttcattgctgtgacagtgatggcgaaagagggtaataaccagacacaaactgccaagttgggtggagaaaggagtttctttagctgacagaatctctgaattttaaatcacttagtaagcggctcaagcccaggagggagcagagggatacgagcggagtcccctgcgcgggaccatctggaattggtttagcccaagtggagcctgacagccagaactctgtgtcccccgtctaaccacagctccttttccagagcattccagtcaggctctctgggctgactgggccaggggaggttacaggtaccagttctttaagaagatctttgggcatatacatttttagcctgtgtcattgccccaaatggattcctgtttcaagttcacacctgcagattctaggacctgtgtcctagacttcagggagtcagctgtttctagagttcctaccatggagtgggtctggaggacctgcccggtgggggggcagagccctgctccctccgggtcttcctactcttctctctgctctgacgggatttgttgattctctccattttggtgtctttctcttttagatattgtatcaatctttagaaaaggcatagtctacttgttataaatcgttaggatactgcctcccccagggtctaaaattacatattagaggggaaaagctgaacactgaagtcagttctcaacaatttagaaggaaaacctagaaaacatttggcagaaaattacatttcgatgtttttgaatgaatacgagcaagcttttacaacagtgctgatctaaaaatacttagcacttggcctgagatgcctggtgagcattacaggcaaggggaatctggaggtagccgacctgaggacatggcttctgaacctgtcttttgggagtggtatggaaggtggagcgttcaccagtgacctggaaggcccagcaccaccctccttcccactcttctcatcttgacagagcctgccccagcgctgacgtgtcaggaaaacacccagggaactaggaaggcacttctgcctgaggggcagcctgccttgcccactcctgctctgctcgcctcggatcagctgagccttctgagctggcctctcactgcctccccaaggccccctgcctgccctgtcaggaggcagaaggaagcaggtgtgagggcagtgcaaggagggagcacaacccccagctcccgctccgggctccgacttgtgcacaggcagagcccagaccctggaggaaatcctacctttgaattcaagaacatttggggaatttggaaatctctttgcccccaaacccccattctgtcctacctttaatcaggtcctgctcagcagtgagagcagatgaggtgaaaaggccaagaggtttggctcctgcccactgatagcccctctccccgcagtgtttgtgtgtcaagtggcaaagctgttcttcctggtgaccctgattatatccagtaacacatagactgtgcgcataggcctgctttgtctcctctatcctgggcttttgttttgctttttagttttgcttttagtttttctgtcccttttatttaacgcaccgactagacacacaaagcagttgaatttttatatatatatctgtatattgcacaattataaactcattttgcttgtggctccacacacacaaaaaaagacctgttaaaattatacctgttgcttaattacaatatttctgataaccatagcataggacaagggaaaataaaaaaagaaaaaaaagaaaaaaaaacgacaaatctgtctgctggtcacttcttctgtccaagcagattcgtggtcttttcctcgcttctttcaagggctttcctgtgccaggtgaaggaggctccaggcagcacccaggttttgcactcttgtttctcccgtgcttgtgaaagaggtcccaaggttctgggtgcaggagcgctcccttgacctgctgaagtccggaacgtagtcggcacagcctggtcgccttccacctctgggagctggagtccactggggtggcctgactcccccagtccccttcccgtgacctggtcagggtgagcccatgtggagtcagcctcgcaggcctccctgccagtagggtccgagtgtgtttcatccttcccactctgtcgagcctgggggctggagcggagacgggaggcctggcctgtctcggaacctgtgagctgcaccaggtagaacgccagggaccccagaatcatgtgcgtcagtccaaggggtcccctccaggagtagtgaagactccagaaatgtccctttcttctcccccatcctacgagtaattgcatttgcttttgtaattcttaatgagcaatatctgctagagagtttagctgtaacagttctttttgatcatctttttttaataattagaaacaccaaaaaaatccagaaacttgttcttccaaagcagagagcattataatcaccagggccaaaagcttccctccctgctgtcattgcttcttctgaggcctgaatccaaaagaaaaacagccataggccctttcagtggccgggctacccgtgagcccttcggaggaccagggctggggcagcctctgggcccacatccggggccagctccggcgtgtgttcagtgttagcagtgggtcatgatgctctttcccacccagcctgggataggggcagaggaggcgaggaggccgttgccgctgatgtttggccgtgaacaggtgggtgtctgcgtgcgtccacgtgcgtgttttctgactgacatgaaatcgacgcccgagttagcctcacccggtgacctctagccctgcccggatggagcggggcccacccggttcagtgtttctggggagctggacagtggagtgcaaaaggcttgcagaacttgaagcctgctccttcccttgctaccacggcctcctttccgtttgatttgtcactgcttcaatcaataacagccgctccagagtcagtagtcaatgaatatatgaccaaatatcaccaggactgttactcaatgtgtgccgagcccttgcccatgctgggctcccgtgtatctggacactgtaacgtgtgctgtgtttgctccccttccccttccttctttgccctttacttgtctttctggggtttttctgtttgggtttggtttggtttttatttctccttttgtgttccaaacatgaggttctctctactggtcctcttaactgtggtgttgaggcttatatttgtgtaatttttggtgggtgaaaggaattttgctaagtaaatctcttctgtgtttgaactgaagtctgtattgtaactatgtttaaagtaattgttccagagacaaatatttctagacactttttctttacaaacaaaagcattcggagggagggggatggtgactgagatgagaggggagagctgaacagatgacccctgcccagatcagccagaagccacccaaagcagtggagcccaggagtcccactccaagccagcaagccgaatagctgatgtgttgccactttccaagtcactgcaaaaccaggttttgttccgcccagtggattcttgttttgcttcccctccccccgagattattaccaccatcccgtgcttttaaggaaaggcaagattgatgtttccttgaggggagccaggaggggatgtgtgtgtgcagagctgaagagctggggagaatggggctgggcccacccaagcaggaggctgggacgctctgctgtgggcacaggtcaggctaatgttggcagatgcagctcttcctggacaggccaggtggtgggcattctctctccaaggtgtgccccgtgggcattactgtttaagacacttccgtcacatcccaccccatcctccagggctcaacactgtgacatctctattccccaccctccccttcccagggcaataaaatgaccatggagggggcttgcactctcttggctgtcacccgatcgccagcaaaacttagatgtgagaaaaccccttcccattccatggcgaaaacatctccttagaaaagccattaccctcattaggcatggttttgggctcccaaaacacctgacagcccctccctcctctgagaggcggagagtgctgactgtagtgaccattgcatgccgggtgcagcatctggaagagctaggcagggtgtctgccccctcctgagttgaagtcatgctcccctgtgccagcccagaggccgagagctatggacagcattgccagtaacacaggccaccctgtgcagaagggagctggctccagcctggaaacctgtctgaggttgggagaggtgcacttggggcacagggagaggccgggacacacttagctggagatgtctctaaaagccctgtatcgtattcaccttcagtttttgtgttttgggacaattactttagaaaataagtaggtcgttttaaaaacaaaaattattgattgcttttttgtagtgttcagaaaaaaggttctttgtgtatagccaaatgactgaaagcactgatatatttaaaaacaaaaggcaatttattaaggaaatttgtaccatttcagtaaacctgtctgaatgtacctgtatacgtttcaaaaacaccccccccccactgaatccctgtaacctatttattatataaagagtttgccttataaatttacataaaaatgtccgtttgtgtcttttgttgtaaaaatcaagtgattttttcataaggttcttttactattggaaaagatgggcagcacgcagttttattttatttttgtaagttttttaatacatgtgaaagcaaagaatactcagcatgcctttctaagtgacgcgtttgcaccttttgttgggaagtactgtatcctgtgctgttagcattctcgataaatctctctgtgaaagtga

SEQ ID NO: 153275 - DNA, 784 bp, Homo sapiens
  Payload ID: 10154
  Gene Symbol: MECP2
  Gene Name: methyl CpG binding protein 2
  ENST ID: ENST00000369957
  CDS Start-End: 159-272
ggccgccgccgccgccgccgcgccgagcggaggaggaggaggaggcgaggaggagagactgctccataaaaatacagactcaccagttcctgctttgatgtgacatgtgactccccagaatacaccttgcttctgtagaccagctccaacaggattccatggtagctgggatgttagggctcagctgcaagatgggattcagatctgttctcaagcctgtcgttccaggacccaggagggagaagcagctgccaggggaagtctcttcgtaggcggaggtcaggagtccaagaggagtgagcagagtcacagaagcctcttaaagcctcttcttcccccatcccatcaacacggaagaaaagtcagaagaccaggacctccagggcctcaaggacaaacccctcaagtttaaaaaggtgaagaaagataagaaagaagagaaagagggcaagcatgagcccgtgcagccatcagcccaccactctgctgagcccgcagaggcaggcaaagcagagacatcagaagggtcaggctccgccccggctgtgccggaagcttctgcctcccccaaacagcggcgctccatcatccgtgaccggggacccatgtatgatgaccccaccctgcctgaaggctggacacggaagcttaagcaaaggaaatctggccgctctgctgggaagtatgatgtgtatttgatcaatccccagggaaaagcctttcgctctaaagtggagttgattgcgtacttcgaaaaggtaggcgacacatccctggaccctaa

SEQ ID NO: 153276 - DNA, 1174 bp, Homo sapiens
  Payload ID: 10154
  Gene Symbol: MECP2
  Gene Name: methyl CpG binding protein 2
  ENST ID: ENST00000407218
  CDS Start-End: 25-579
gctgtggtaaaagccgtccggaaaatggccgccgccgccgccgccgcgccgagcggaggaggaggaggaggcgaggaggagagactggaagaaaagtcagaagaccaggacctccagggcctcaaggacaaacccctcaagtttaaaaaggtgaagaaagataagaaagaagagaaagagggcaagcatgagcccgtgcagccatcagcccaccactctgctgagcccgcagaggcaggcaaagcagagacatcagaagggtcaggctccgccccggctgtgccggaagcttctgcctcccccaaacagcggcgctccatcatccgtgaccggggacccatgtatgatgaccccaccctgcctgaaggctggacacggaagcttaagcaaaggaaatctggccgctctgctgggaagtatgatgtgtatttgatcaatccccagggaaaagcctttcgctctaaagtggagttgattgcgtacttcgaaaagctccaggaactggcagaggccggggacgccccaaagggagcggcaccacgagacccaaggcggccacgtcagagggtgtgcaggtgaaaagggtcctggagaaaagtcctgggaagctccttgtcaagatgccttttcaaacttcgccagggggcaaggctgaggggggtggggccaccacatccacccaggtcatggtgatcaaacgccccggcaggaagcgaaaagctgaggccgaccctcaggccattcccaagaaacggggccgaaagccggggagtgtggtggcagccgctgccgccgaggccaaaaagaaagccgtgaaggagtcttctatccgatctgtgcaggagaccgtactccccatcaagaagcgcaagacccgggagacggtcagcatcgaggtcaaggaagtggtgaagcccctgctggtgtccaccctcggtgagaagagcgggaaaggactgaagacctgtaagagccctgggcggaaaagcaaggagagcagccccaaggggcgcagcagcagcgcctcctcaccccccaagaaggagcaccaccaccatcaccaccactcagagtccccaaaggcccccgtgccactgctcccacccctgcccccacctccacctgagcccgagagctccgaggaccccaccagcccccctgagccccaggactt

SEQ ID NO: 153277 - DNA, 1729 bp, Homo sapiens
  Payload ID: 10154
  Gene Symbol: MECP2
  Gene Name: methyl CpG binding protein 2
  Uniprot ID: P51608
  ENST ID: ENST00000453960
  CDS Start-End: 100-1596
gagggcggggcgcgacgtcggccgtgcggggtcccggcgtcggcggcgcgcgcgctccctcctctcggagagagggctgtggtaaaagccgtccggaaaatggccgccgccgccgccgccgcgccgagcggaggaggaggaggaggcgaggaggagagactggaagaaaagtcagaagaccaggacctccagggcctcaaggacaaacccctcaagtttaaaaaggtgaagaaagataagaaagaagagaaagagggcaagcatgagcccgtgcagccatcagcccaccactctgctgagcccgcagaggcaggcaaagcagagacatcagaagggtcaggctccgccccggctgtgccggaagcttctgcctcccccaaacagcggcgctccatcatccgtgaccggggacccatgtatgatgaccccaccctgcctgaaggctggacacggaagcttaagcaaaggaaatctggccgctctgctgggaagtatgatgtgtatttgatcaatccccagggaaaagcctttcgctctaaagtggagttgattgcgtacttcgaaaaggtaggcgacacatccctggaccctaatgattttgacttcacggtaactgggagagggagcccctcccggcgagagcagaaaccacctaagaagcccaaatctcccaaagctccaggaactggcagaggccggggacgccccaaagggagcggcaccacgagacccaaggcggccacgtcagagggtgtgcaggtgaaaagggtcctggagaaaagtcctgggaagctccttgtcaagatgccttttcaaacttcgccagggggcaaggctgaggggggtggggccaccacatccacccaggtcatggtgatcaaacgccccggcaggaagcgaaaagctgaggccgaccctcaggccattcccaagaaacggggccgaaagccggggagtgtggtggcagccgctgccgccgaggccaaaaagaaagccgtgaaggagtcttctatccgatctgtgcaggagaccgtactccccatcaagaagcgcaagacccgggagacggtcagcatcgaggtcaaggaagtggtgaagcccctgctggtgtccaccctcggtgagaagagcgggaaaggactgaagacctgtaagagccctgggcggaaaagcaaggagagcagccccaaggggcgcagcagcagcgcctcctcaccccccaagaaggagcaccaccaccatcaccaccactcagagtccccaaaggcccccgtgccactgctcccacccctgcccccacctccacctgagcccgagagctccgaggaccccaccagcccccctgagccccaggacttgagcagcagcgtctgcaaagaggagaagatgcccagaggaggctcactggagagcgacggctgccccaaggagccagctaagactcagcccgcggttgccaccgccgccacggccgcagaaaagtacaaacaccgaggggagggagagcgcaaagacattgtttcatcctccatgccaaggccaaacagagaggagcctgtggacagccggacgcccgtgaccgagagagttagctgactttacacggagcggattgcaaagcaaaccaacaagaataaaggcagctgttgtctcttctccttatgggtagggctctgacaaagcttcccgattaactgaaataaaaaatatttttttttctttcagtaaa

SEQ ID NO: 153278 - DNA, 413 bp, Homo sapiens
  Payload ID: 10154
  Gene Symbol: MECP2
  Gene Name: methyl CpG binding protein 2
  ENST ID: ENST00000415944
  CDS Start-End: 265-413
gcaggaacaagtaggtggggattattatccacaaaagggactagacattgtgttctgggtcccacaactcatcataaagaggtggttatagttcccatcaggagccgtgggtaggggactgtgcgtccagcagcacccgaggctcttcggcgccagaggctctaaggctccataaaaatacagactcaccagttcctgctttgatgtgacatgtgactccccagaatacaccttgcttctgtagaccagctccaacaggattccatggtagctgggatgttagggctcagggaagaaaagtcagaagaccaggacctccagggcctcaaggacaaacccctcaagtttaaaaaggtgaagaaagataagaaagaagagaaagagggcaagcatgagcccgtgcagccatcagc

SEQ ID NO: 153279 - DNA, 603 bp, Homo sapiens
  Payload ID: 10154
  Gene Symbol: MECP2
  Gene Name: methyl CpG binding protein 2
  ENST ID: ENST00000611468
  CDS Start-End: 97-603
cagactcaccagttcctgctttgatgtgacatgtgactccccagaatacaccttgcttctgtagaccagctccaacaggattccatggtagctgggatgttagggctcagggaagaaaagtcagaagaccaggacctccagggcctcaaggacaaacccctcaagtttaaaaaggtgaagaaagataagaaagaagagaaagagggcaagcatgagcccgtgcagccatcagcccaccactctgctgagcccgcagaggcaggcaaagcagagacatcagaagggtcaggctccgccccggctgtgccggaagcttctgcctcccccaaacagcggcgctccatcatccgtgaccggggacccatgtatgatgaccccaccctgcctgaaggctggacacggaagcttaagcaaaggaaatctggccgctctgctgggaagtatgatgtgtatttgatcaatccccagggaaaagcctttcgctctaaagtggagttgattgcgtacttcgaaaaggtaggcgacacatccctggaccctaatgattttgacttcacggtaactgggagggagcccctcccggcgagagcagaaaccacctaa

SEQ ID NO: 153280 - DNA, 10237 bp, Homo sapiens
  Payload ID: 10154
  Gene Symbol: MECP2
  Gene Name: methyl CpG binding protein 2
  ENST ID: ENST00000619732
  CDS Start-End: 227-1756
ccggcgtcggcggcgcgcgcgctccctcctctcggagagagggctgtggtaaaagccgtccggaaaatggccgccgccgccgccgccgcgccgagcggaggaggaggaggaggcgaggaggagagactgctccataaaaatacagactcaccagttcctgctttgatgtgacatgtgactccccagaatacaccttgcttctgtagaccagctccaacaggattccatggtagctgggatgttagggctcagggaagaaaagtcagaagaccaggacctccagggcctcaaggacaaacccctcaagtttaaaaaggtgaagaaagataagaaagaagagaaagagggcaagcatgagcccgtgcagccatcagcccaccactctgctgagcccgcagaggcaggcaaagcagagacatcagaagggtcaggctccgccccggctgtgccggaagcttctgcctcccccaaacagcggcgctccatcatccgtgaccggggacccatgtatgatgaccccaccctgcctgaaggctggacacggaagcttaagcaaaggaaatctggccgctctgctgggaagtatgatgtgtatttgatcaatccccagggaaaagcctttcgctctaaagtggagttgattgcgtacttcgaaaaggtaggcgacacatccctggaccctaatgattttgacttcacggtaactgggagagggagcccctcccggcgagagcagaaaccacctaagaagcccaaatctcccaaagctccaggaactggcagaggccggggacgccccaaagggagcggcaccacgagacccaaggcggccacgtcagagggtgtgcaggtgaaaagggtcctggagaaaagtcctgggaagctccttgtcaagatgccttttcaaacttcgccagggggcaaggctgaggggggtggggccaccacatccacccaggtcatggtgatcaaacgccccggcaggaagcgaaaagctgaggccgaccctcaggccattcccaagaaacggggccgaaagccggggagtgtggtggcagccgctgccgccgaggccaaaaagaaagccgtgaaggagtcttctatccgatctgtgcaggagaccgtactccccatcaagaagcgcaagacccgggagacggtcagcatcgaggtcaaggaagtggtgaagcccctgctggtgtccaccctcggtgagaagagcgggaaaggactgaagacctgtaagagccctgggcggaaaagcaaggagagcagccccaaggggcgcagcagcagcgcctcctcaccccccaagaaggagcaccaccaccatcaccaccactcagagtccccaaaggcccccgtgccactgctcccacccctgcccccacctccacctgagcccgagagctccgaggaccccaccagcccccctgagccccaggacttgagcagcagcgtctgcaaagaggagaagatgcccagaggaggctcactggagagcgacggctgccccaaggagccagctaagactcagcccgcggttgccaccgccgccacggccgcagaaaagtacaaacaccgaggggagggagagcgcaaagacattgtttcatcctccatgccaaggccaaacagagaggagcctgtggacagccggacgcccgtgaccgagttagctgactttacacggagcggattgcaaagcaaaccaacaagaataaaggcagctgttgtctcttctccttatgggtagggctctgacaaagcttcccgattaactgaaataaaaaatatttttttttctttcagtaaacttagagtttcgtggcttcagggtgggagtagttggagcattggggatgtttttcttaccgacaagcacagtcaggttgaagacctaaccagggccagaagtagctttgcacttttctaaactaggctccttcaacaaggcttgctgcagatactactgaccagacaagctgttgaccaggcacctcccctcccgcccaaacctttcccccatgtggtcgttagagacagagcgacagagcagttgagaggacactcccgttttcggtgccatcagtgccccgtctacagctcccccagctccccccacctcccccactcccaaccacgttgggacagggaggtgtgaggcaggagagacagttggattctttagagaagatggatatgaccagtggctatggcctgtgcgatcccacccgtggtggctcaagtctggccccacaccagccccaatccaaaactggcaaggacgcttcacaggacaggaaagtggcacctgtctgctccagctctggcatggctaggaggggggagtcccttgaactactgggtgtagactggcctgaaccacaggagaggatggcccagggtgaggtggcatggtccattctcaagggacgtcctccaacgggtggcgctagaggccatggaggcagtaggacaaggtgcaggcaggctggcctggggtcaggccgggcagagcacagcggggtgagagggattcctaatcactcagagcagtctgtgacttagtggacaggggagggggcaaagggggaggagaagaaaatgttcttccagttactttccaattctcctttagggacagcttagaattatttgcactattgagtcttcatgttcccacttcaaaacaaacagatgctctgagagcaaactggcttgaattggtgacatttagtccctcaagccaccagatgtgacagtgttgagaactacctggatttgtatatatacctgcgcttgttttaaagtgggctcagcacatagggttcccacgaagctccgaaactctaagtgtttgctgcaattttataaggacttcctgattggtttctcttctccccttccatttctgccttttgttcatttcatcctttcacttctttcccttcctccatcctcctccttcctagttcatcccttctcttccaggcagccgcggtgcccaaccacacttgtcggctccagtccccagaactctgcctgccctttgtcctcctgctgccagtaccagccccaccctgttttgagccctgaggaggccttgggctctgctgagtccgacctggcctgtctgtgaagagcaagagagcagcaaggtcttgctctcctaggtagccccctcttccctggtaagaaaaagcaaaaggcatttcccaccctgaacaacgagccttttcacccttctactctagagaagtggactggaggagctgggcccgatttggtagttgaggaaagcacagaggcctcctgtggcctgccagtcatcgagtggcccaacaggggctccatgccagccgaccttgacctcactcagaagtccagagtctagcgtagtgcagcagggcagtagcggtaccaatgcagaactcccaagacccgagctgggaccagtacctgggtccccagcccttcctctgctcccccttttccctcggagttcttcttgaatggcaatgttttgcttttgctcgatgcagacagggggccagaacaccacacatttcactgtctgtctggtccatagctgtggtgtaggggcttagaggcatgggcttgctgtgggtttttaattgatcagttttcatgtgggatcccatctttttaacctctgttcaggaagtccttatctagctgcatatcttcatcatattggtatatccttttctgtgtttacagagatgtctcttatatctaaatctgtccaactgagaagtaccttatcaaagtagcaaatgagacagcagtcttatgcttccagaaacacccacaggcatgtcccatgtgagctgctgccatgaactgtcaagtgtgtgttgtcttgtgtatttcagttattgtccctggcttccttactatggtgtaatcatgaaggagtgaaacatcatagaaactgtctagcacttccttgccagtctttagtgatcaggaaccatagttgacagttccaatcagtagcttaagaaaaaaccgtgtttgtctcttctggaatggttagaagtgagggagtttgccccgttctgtttgtagagtctcatagttggactttctagcatatatgtgtccatttccttatgctgtaaaagcaagtcctgcaaccaaactcccatcagcccaatccctgatccctgatcccttccacctgctctgctgatgacccccccagcttcacttctgactcttccccaggaagggaaggggggtcagaagagagggtgagtcctccagaactcttcctccaaggacagaaggctcctgcccccatagtggcctcgaactcctggcactaccaaaggacacttatccacgagagcgcagcatccgaccaggttgtcactgagaagatgtttattttggtcagttgggtttttatgtattatacttagtcaaatgtaatgtggcttctggaatcattgtccagagctgcttccccgtcacctgggcgtcatctggtcctggtaagaggagtgcgtggcccaccaggcccccctgtcacccatgacagttcattcagggccgatggggcagtcgtggttgggaacacagcatttcaagcgtcactttatttcattcgggccccacctgcagctccctcaaagaggcagttgcccagcctctttcccttccagtttattccagagctgccagtggggcctgaggctccttagggttttctctctatttccccctttcttcctcattccctcgtctttcccaaaggcatcacgagtcagtcgcctttcagcaggcagccttggcggtttatcgccctggcaggcaggggccctgcagctctcatgctgcccctgccttggggtcaggttgacaggaggttggagggaaagccttaagctgcaggattctcaccagctgtgtccggcccagttttggggtgtgacctcaatttcaattttgtctgtacttgaacattatgaagatgggggcctctttcagtgaatttgtgaacagcagaattgaccgacagctttccagtacccatggggctaggtcattaaggccacatccacagtctcccccacccttgttccagttgttagttactacctcctctcctgacaatactgtatgtcgtcgagctccccccaggtctacccctcccggccctgcctgctggtgggcttgtcatagccagtgggattgccggtcttgacagctcagtgagctggagatacttggtcacagccaggcgctagcacagctcccttctgttgatgctgtattcccatatcaaaagacacaggggacacccagaaacgccacatcccccaatccatcagtgccaaactagccaacggccccagcttctcagctcgctggatggcggaagctgctactcgtgagcgccagtgcgggtgcagacaatcttctgttgggtggcatcattccaggcccgaagcatgaacagtgcacctgggacagggagcagccccaaattgtcacctgcttctctgcccagcttttcattgctgtgacagtgatggcgaaagagggtaataaccagacacaaactgccaagttgggtggagaaaggagtttctttagctgacagaatctctgaattttaaatcacttagtaagcggctcaagcccaggagggagcagagggatacgagcggagtcccctgcgcgggaccatctggaattggtttagcccaagtggagcctgacagccagaactctgtgtcccccgtctaaccacagctccttttccagagcattccagtcaggctctctgggctgactgggccaggggaggttacaggtaccagttctttaagaagatctttgggcatatacatttttagcctgtgtcattgccccaaatggattcctgtttcaagttcacacctgcagattctaggacctgtgtcctagacttcagggagtcagctgtttctagagttcctaccatggagtgggtctggaggacctgcccggtgggggggcagagccctgctccctccgggtcttcctactcttctctctgctctgacgggatttgttgattctctccattttggtgtctttctcttttagatattgtatcaatctttagaaaaggcatagtctacttgttataaatcgttaggatactgcctcccccagggtctaaaattacatattagaggggaaaagctgaacactgaagtcagttctcaacaatttagaaggaaaacctagaaaacatttggcagaaaattacatttcgatgtttttgaatgaatacgagcaagcttttacaacagtgctgatctaaaaatacttagcacttggcctgagatgcctggtgagcattacaggcaaggggaatctggaggtagccgacctgaggacatggcttctgaacctgtcttttgggagtggtatggaaggtggagcgttcaccagtgacctggaaggcccagcaccaccctccttcccactcttctcatcttgacagagcctgccccagcgctgacgtgtcaggaaaacacccagggaactaggaaggcacttctgcctgaggggcagcctgccttgcccactcctgctctgctcgcctcggatcagctgagccttctgagctggcctctcactgcctccccaaggccccctgcctgccctgtcaggaggcagaaggaagcaggtgtgagggcagtgcaaggagggagcacaacccccagctcccgctccgggctccgacttgtgcacaggcagagcccagaccctggaggaaatcctacctttgaattcaagaacatttggggaatttggaaatctctttgcccccaaacccccattctgtcctacctttaatcaggtcctgctcagcagtgagagcagatgaggtgaaaaggccaagaggtttggctcctgcccactgatagcccctctccccgcagtgtttgtgtgtcaagtggcaaagctgttcttcctggtgaccctgattatatccagtaacacatagactgtgcgcataggcctgctttgtctcctctatcctgggcttttgttttgctttttagttttgcttttagtttttctgtcccttttatttaacgcaccgactagacacacaaagcagttgaatttttatatatatatctgtatattgcacaattataaactcattttgcttgtggctccacacacacaaaaaaagacctgttaaaattatacctgttgcttaattacaatatttctgataaccatagcataggacaagggaaaataaaaaaagaaaaaaaagaaaaaaaaacgacaaatctgtctgctggtcacttcttctgtccaagcagattcgtggtcttttcctcgcttctttcaagggctttcctgtgccaggtgaaggaggctccaggcagcacccaggttttgcactcttgtttctcccgtgcttgtgaaagaggtcccaaggttctgggtgcaggagcgctcccttgacctgctgaagtccggaacgtagtcggcacagcctggtcgccttccacctctgggagctggagtccactggggtggcctgactcccccagtccccttcccgtgacctggtcagggtgagcccatgtggagtcagcctcgcaggcctccctgccagtagggtccgagtgtgtttcatccttcccactctgtcgagcctgggggctggagcggagacgggaggcctggcctgtctcggaacctgtgagctgcaccaggtagaacgccagggaccccagaatcatgtgcgtcagtccaaggggtcccctccaggagtagtgaagactccagaaatgtccctttcttctcccccatcctacgagtaattgcatttgcttttgtaattcttaatgagcaatatctgctagagagtttagctgtaacagttctttttgatcatctttttttaataattagaaacaccaaaaaaatccagaaacttgttcttccaaagcagagagcattataatcaccagggccaaaagcttccctccctgctgtcattgcttcttctgaggcctgaatccaaaagaaaaacagccataggccctttcagtggccgggctacccgtgagcccttcggaggaccagggctggggcagcctctgggcccacatccggggccagctccggcgtgtgttcagtgttagcagtgggtcatgatgctctttcccacccagcctgggataggggcagaggaggcgaggaggccgttgccgctgatgtttggccgtgaacaggtgggtgtctgcgtgcgtccacgtgcgtgttttctgactgacatgaaatcgacgcccgagttagcctcacccggtgacctctagccctgcccggatggagcggggcccacccggttcagtgtttctggggagctggacagtggagtgcaaaaggcttgcagaacttgaagcctgctccttcccttgctaccacggcctcctttccgtttgatttgtcactgcttcaatcaataacagccgctccagagtcagtagtcaatgaatatatgaccaaatatcaccaggactgttactcaatgtgtgccgagcccttgcccatgctgggctcccgtgtatctggacactgtaacgtgtgctgtgtttgctccccttccccttccttctttgccctttacttgtctttctggggtttttctgtttgggtttggtttggtttttatttctccttttgtgttccaaacatgaggttctctctactggtcctcttaactgtggtgttgaggcttatatttgtgtaatttttggtgggtgaaaggaattttgctaagtaaatctcttctgtgtttgaactgaagtctgtattgtaactatgtttaaagtaattgttccagagacaaatatttctagacactttttctttacaaacaaaagcattcggagggagggggatggtgactgagatgagaggggagagctgaacagatgacccctgcccagatcagccagaagccacccaaagcagtggagcccaggagtcccactccaagccagcaagccgaatagctgatgtgttgccactttccaagtcactgcaaaaccaggttttgttccgcccagtggattcttgttttgcttcccctccccccgagattattaccaccatcccgtgcttttaaggaaaggcaagattgatgtttccttgaggggagccaggaggggatgtgtgtgtgcagagctgaagagctggggagaatggggctgggcccacccaagcaggaggctgggacgctctgctgtgggcacaggtcaggctaatgttggcagatgcagctcttcctggacaggccaggtggtgggcattctctctccaaggtgtgccccgtgggcattactgtttaagacacttccgtcacatcccaccccatcctccagggctcaacactgtgacatctctattccccaccctccccttcccagggcaataaaatgaccatggagggggcttgcactctcttggctgtcacccgatcgccagcaaaacttagatgtgagaaaaccccttcccattccatggcgaaaacatctccttagaaaagccattaccctcattaggcatggttttgggctcccaaaacacctgacagcccctccctcctctgagaggcggagagtgctgactgtagtgaccattgcatgccgggtgcagcatctggaagagctaggcagggtgtctgccccctcctgagttgaagtcatgctcccctgtgccagcccagaggccgagagctatggacagcattgccagtaacacaggccaccctgtgcagaagggagctggctccagcctggaaacctgtctgaggttgggagaggtgcacttggggcacagggagaggccgggacacacttagctggagatgtctctaaaagccctgtatcgtattcaccttcagtttttgtgttttgggacaattactttagaaaataagtaggtcgttttaaaaacaaaaattattgattgcttttttgtagtgttcagaaaaaaggttctttgtgtatagccaaatgactgaaagcactgatatatttaaaaacaaaaggcaatttattaaggaaatttgtaccatttcagtaaacctgtctgaatgtacctgtatacgtttcaaaaacaccccccccccactgaatccctgtaacctatttattatataaagagtttgccttataaattt

SEQ ID NO: 153281 - DNA, 1071 bp, Homo sapiens
  Payload ID: 10154
  Gene Symbol: MECP2
  Gene Name: methyl CpG binding protein 2
  ENST ID: ENST00000622433
  CDS Start-End: 97-1071
cagactcaccagttcctgctttgatgtgacatgtgactccccagaatacaccttgcttctgtagaccagctccaacaggattccatggtagctgggatgttagggctcagggaagaaaagtcagaagaccaggacctccagggcctcaaggacaaacccctcaagtttaaaaaggtgaagaaagataagaaagaagagaaagagggcaagcatgagcccgtgcagccatcagcccaccactctgctgagcccgcagaggcaggcaaagcagagacatcagaagggtcaggctccgccccggctgtgccggaagcttctgcctcccccaaacagcggcgctccatcatccgtgaccggggacccatgtatgatgaccccaccctgcctgaaggctggacacggaagcttaagcaaaggaaatctggccgctctgctgggaagtatgatgtgtatttgatcaatccccagggaaaagcctttcgctctaaagtggagttgattgcgtacttcgaaaaggtaggcgacacatccctggaccctaatgattttgacttcacggtaactgggagagggagcccctcccggcgagagcagaaaccacctaagaagcccaaatctcccaaagctccaggaactggcagaggccggggacgccccaaagggagcggcaccacgagacccaaggcggccacgtcagagggtgtgcaggtgaaaagggtcctggagaaaagtcctgggaagctccttgtcaagatgccttttcaaacttcgccagggggcaaggctgaggggggtggggccaccacatccacccaggtcatggtgatcaaacgccccggcaggaagcgaaaagctgaggccgaccctcaggccattcccaagaaacggggccgaaagccggggagtgtggtggcagccgctgccgccgaggccaaaaagaaagccgtgaaggagttctatccgatctgtgcaggagaccgtactccccatcaagaagcgcaagacccgggagacggtcagcatcgaggtcaaggaagtggtgaagcccctgctggtgtccaccctcggtga

SEQ ID NO: 153282 - DNA, 261 bp, Homo sapiens
  Payload ID: 10154
  Gene Symbol: MECP2
  Gene Name: methyl CpG binding protein 2
  ENST ID: ENST00000630151
  CDS Start-End: 137-261
ctgtcccggcaagcccctgtgcgtgtgcatcattccgggctccataaaaatacagactcaccagttcctgctttgatgtgacatgtgactccccagaatacaccttgcttctgtagaccagctccaacaggattccatggtagctgggatgttagggctcagggaagaaaagtcagaagaccaggacctccagggcctcaaggacaaacccctcaagtttaaaaaggtgaagaaagataagaaagaagagaaagagggcaa

SEQ ID NO: 153283 - DNA, 1712 bp, Homo sapiens
  Payload ID: 10154
  Gene Symbol: MECP2
  Gene Name: methyl CpG binding protein 2
  ENST ID: ENST00000628176
  CDS Start-End: 233-751
ggggtcccggcgtcggcggcgcgcgcgctccctcctctcggagagagggctgtggtaaaagccgtccggaaaatggccgccgccgccgccgccgcgccgagcggaggaggaggaggaggcgaggaggagagactgctccataaaaatacagactcaccagttcctgctttgatgtgacatgtgactccccagaatacaccttgcttctgtagaccagctccaacaggattccatggtagctgggatgttagggctcagggaagaaaagtcagaagaccaggacctccagggcctcaaggacaaacccctcaagtttaaaaaggtgaagaaagataagaaagaagagaaagagggcaagcatgagcccgtgcagccatcagcccaccactctgctgagcccgcagaggcaggcaaagcagagacatcagaagggtcaggctccgccccggctgtgccggaagcttctgcctcccccaaacagcggcgctccatcatccgtgaccggggacccatgtatgatgaccccaccctgcctgaaggctggacacggaagcttaagcaaaggaaatctggccgctctgctgggaagtatgatgtgtatttgatcaatccccagggaaaagcctttcgctctaaagtggagttgattgcgtacttcgaaaagctccaggaactggcagaggccggggacgccccaaagggagcggcaccacgagacccaaggcggccacgtcagagggtgtgcaggtgaaaagggtcctggagaaaagtcctgggaagctccttgtcaagatgccttttcaaacttcgccagggggcaaggctgaggggggtggggccaccacatccacccaggtcatggtgatcaaacgccccggcaggaagcgaaaagctgaggccgaccctcaggccattcccaagaaacggggccgaaagccggggagtgtggtggcagccgctgccgccgaggccaaaaagaaagccgtgaaggagtcttctatccgatctgtgcaggagaccgtactccccatcaagaagcgcaagacccgggagacggtcagcatcgaggtcaaggaagtggtgaagcccctgctggtgtccaccctcggtgagaagagcgggaaaggactgaagacctgtaagagccctgggcggaaaagcaaggagagcagccccaaggggcgcagcagcagcgcctcctcaccccccaagaaggagcaccaccaccatcaccaccactcagagtccccaaaggcccccgtgccactgctcccacccctgcccccacctccacctgagcccgagagctccgaggaccccaccagcccccctgagccccaggacttgagcagcagcgtctgcaaagaggagaagatgcccagaggaggctcactggagagcgacggctgccccaaggagccagctaagactcagcccgcggttgccaccgccgccacggccgcagaaaagtacaaacaccgaggggagggagagcgcaaagacattgtttcatcctccatgccaaggccaaacagagaggagcctgtggacagccggacgcccgtgaccgagagagttagctgactttacacggagcggattgcaaagcaaaccaacaagaataaaggcagctgttgtctcttctccttatgggtagggctctgacaaagcttcccgattaactgaaataaaaaatatttttttttctttca

SEQ ID NO: 153284 - DNA, 2470 bp, Homo sapiens
  Payload ID: 10155
  Gene Symbol: MBD4
  Gene Name: methyl-CpG binding domain 4 DNA glycosylase
  Uniprot ID: O95243
  ENST ID: ENST00000249910
  CDS Start-End: 177-1919
ggcggctgtagccgagggggcggccggaaagcagcggcggcgtctggggcgctttcgcaacattcagacctcggttgcagcccggtgccgtgagctgaagaggtttcacatcttactccgccccacaccctgggcgttgcggcgctgggctcgttgctgcagccggaccctgctcgatgggcacgactgggctggagagtctgagtctgggggaccgcggagctgcccccaccgtcacctctagtgagcgcctagtcccagacccgccgaatgacctccgcaaagaagatgttgctatggaattggaaagagtgggagaagatgaggaacaaatgatgataaaaagaagcagtgaatgtaatcccttgctacaagaacccatcgcttctgctcagtttggtgctactgcaggaacagaatgccgtaagtctgtcccatgtggatgggaaagagttgtgaagcaaaggttatttgggaagacagcaggaagatttgatgtgtactttatcagcccacaaggactgaagttcagatccaaaagttcacttgctaattatcttcacaaaaatggagagacttctcttaagccagaagattttgattttactgtactttctaaaaggggtatcaagtcaagatataaagactgcagcatggcagccctgacatcccatctacaaaaccaaagtaacaattcaaactggaacctcaggacccgaagcaagtgcaaaaaggatgtgtttatgccgccaagtagtagttcagagttgcaggagagcagaggactctctaactttacttccactcatttgcttttgaaagaagatgagggtgttgatgatgttaacttcagaaaggttagaaagcccaaaggaaaggtgactattttgaaaggaatcccaattaagaaaactaaaaaaggatgtaggaagagctgttcaggttttgttcaaagtgatagcaaaagagaatctgtgtgtaataaagcagatgctgaaagtgaacctgttgcacaaaaaagtcagcttgatagaactgtctgcatttctgatgctggagcatgtggtgagaccctcagtgtgaccagtgaagaaaacagccttgtaaaaaaaaaagaaagatcattgagttcaggatcaaatttttgttctgaacaaaaaacttctggcatcataaacaaattttgttcagccaaagactcagaacacaacgagaagtatgaggatacctttttagaatctgaagaaatcggaacaaaagtagaagttgtggaaaggaaagaacatttgcatactgacattttaaaacgtggctctgaaatggacaacaactgctcaccaaccaggaaagacttcactggtgagaaaatatttcaagaagataccatcccacgaacacagatagaaagaaggaaaacaagcctgtatttttccagcaaatataacaaagaagctcttagccccccacgacgtaaagcctttaagaaatggacacctcctcggtcaccttttaatctcgttcaagaaacactttttcatgatccatggaagcttctcatcgctactatatttctcaatcggacctcaggcaaaatggcaatacctgtgctttggaagtttctggagaagtatccttcagctgaggtagcaagaaccgcagactggagagatgtgtcagaacttcttaaacctcttggtctctacgatcttcgggcaaaaaccattgtcaagttctcagatgaatacctgacaaagcagtggaagtatccaattgagcttcatgggattggtaaatatggcaacgactcttaccgaattttttgtgtcaatgagtggaagcaggtgcaccctgaagaccacaaattaaataaatatcatgactggctttgggaaaatcatgaaaaattaagtctatcttaaactctgcagctttcaagctcatctgttatgcatagctttgcacttcaaaaaagcttaattaagtacaaccaaccacctttccagccatagagattttaattagcccaactagaagcctagtgtgtgtgctttcttaatgtgtgtgccaatggtggatctttgctactgaatgtgtttgaacatgttttgagatttttttaaaataaattattatttgacaacaatccaaaaaaaatacggcttttccaatgatgaaatataatcagaagatgaaaaatagttctaaactatcaataatacaaagcaaatttctatcagccttgctaaagctaggggcccactaaatatttttatcggctaggcgtggtggtgcatgcctgtaatctcggaaggctgaggcaggaggatcatttgagctcatgagggcccaggaggtcaaggcttcagtgagccatgatcatgccactgcactccagtctggatgacagagagagaccctgtctcaaaaaatatatatttaaaaaataaaaataaaagctgaccccaaagac

SEQ ID NO: 153285 - DNA, 1684 bp, Homo sapiens
  Payload ID: 10155
  Gene Symbol: MBD4
  Gene Name: methyl-CpG binding domain 4 DNA glycosylase
  Uniprot ID: O95243
  ENST ID: ENST00000393278
  CDS Start-End: 347-1135
cttgctccgagcgcgcatgtccgaaagggaaagccagaaaagcagcaaaagcaatggtggcactggagcccctaaggcgccagcgcaaccagagcgcgagcgattggtcggggcgtgtgggggcggtgcgtcttcctcgagaatggatttgattggtggagcgtggaaatggcggctgtagccgagggggcggccggaaagcagcggcggcgtctggggcgctttcgcaacattcagacctcggttgcagcccggtgccgtgagctgaagaggtttcacatcttactccgccccacaccctgggcgttgcggcgctgggctcgttgctgcagccggaccctgctcgatgggcacgactgggctggagagtctgagtctgggggaccgcggagctgcccccaccgtcacctctagtgagcgcctagtcccagacccgccgaatgacctccgcaaagaagatgttgctatggaattggaaagagtgggagaagatgaggaacaaatgatgataaaaagaagcagtgaatgtaatcccttgctacaagaacccatcgcttctgctcagtttggtgctactgcaggaacagaatgccaagataccatcccacgaacacagatagaaagaaggaaaacaagcctgtatttttccagcaaatataacaaagaagctcttagccccccacgacgtaaagcctttaagaaatggacacctcctcggtcaccttttaatctcgttcaagaaacactttttcatgatccatggaagcttctcatcgctactatatttctcaatcggacctcaggcaaaatggcaatacctgtgctttggaagtttctggagaagtatccttcagctgaggtagcaagaaccgcagactggagagatgtgtcagaacttcttaaacctcttggtctctacgatcttcgggcaaaaaccattgtcaagttctcagatgaatacctgacaaagcagtggaagtatccaattgagcttcatgggattggtaaatatggcaacgactcttaccgaattttttgtgtcaatgagtggaagcaggtgcaccctgaagaccacaaattaaataaatatcatgactggctttgggaaaatcatgaaaaattaagtctatcttaaactctgcagctttcaagctcatctgttatgcatagctttgcacttcaaaaaagcttaattaagtacaaccaaccacctttccagccatagagattttaattagcccaactagaagcctagtgtgtgtgctttcttaatgtgtgtgccaatggtggatctttgctactgaatgtgtttgaacatgttttgagatttttttaaaataaattattatttgacaacaatccaaaaaaaatacggcttttccaatgatgaaatataatcagaagatgaaaaatagttctaaactatcaataatacaaagcaaatttctatcagccttgctaaagctaggggcccactaaatatttttatcggctaggcgtggtggtgcatgcctgtaatctcggaaggctgaggcaggaggatcatttgagctcatgagggcccaggaggtcaaggcttcagtgagccatgatcatgccactgcactccagtctggatgacagagagagaccctgtctcaaaaaatatatatttaaaaaataaaaataaaagctgaccccaaag

SEQ ID NO: 153286 - DNA, 2478 bp, Homo sapiens
  Payload ID: 10155
  Gene Symbol: MBD4
  Gene Name: methyl-CpG binding domain 4 DNA glycosylase
  Uniprot ID: O95243
  ENST ID: ENST00000429544
  CDS Start-End: 197-1921
gattggtggagcgtggaaatggcggctgtagccgagggggcggccggaaagcagcggcggcgtctggggcgctttcgcaacattcagacctcggttgcagcccggtgccgtgagctgaagaggtttcacatcttactccgccccacaccctgggcgttgcggcgctgggctcgttgctgcagccggaccctgctcgatgggcacgactgggctggagagtctgagtctgggggaccgcggagctgcccccaccgtcacctctagtgagcgcctagtcccagacccgccgaatgacctccgcaaagaagatgttgctatggaattggaaagagtgggagaagatgaggaacaaatgatgataaaaagaagcagtgaatgtaatcccttgctacaagaacccatcgcttctgctcagtttggtgctactgcaggaacagaatgccgtaagtctgtcccatgtggatgggaaagagttgtgaagcaaaggttatttgggaagacagcaggaagatttgatgtgtactttatcagcccacaaggactgaagttcagatccaaaagttcacttgctaattatcttcacaaaaatggagagacttctcttaagccagaagattttgattttactgtactttctaaaaggggtatcaagtcaagatataaagactgcagcatggcagccctgacatcccatctacaaaaccaaagtaacaattcaaactggaacctcaggacccgaagcaagtgcaaaaaggatgtgtttatgccgccaagtagtagttcagagttgcaggagagcagaggactctctaactttacttccactcatttgcttttgaaagaagatgagggtgttgatgatgttaacttcagaaaggttagaaagcccaaaggaaaggtgactattttgaaaggaatcccaattaagaaaactaaaaaaggatgtaggaagagctgttcaggttttgttcaaagtgatagcaaaagagaatctgtgtgtaataaagcagatgctgaaagtgaacctgttgcacaaaaaagtcagcttgatagaactgtctgcatttctgatgctggagcatgtggtgagaccctcagtgtgaccagtgaagaaaacagccttgtaaaaaaaaaagaaagatcattgagttcaggatcaaatttttgttctgaacaaaaaacttctggcatcataaacaaattttgttcagccaaagactcagaacacaacgagaagtatgaggatacctttttagaatctgaagaaatcggaacaaaagtagaagttgtggaaaggaaagaacatttgcatactgacattttaaaacgtggctctgaaatggacaacaactgctcaccaaccaggaaagacttcactgaagataccatcccacgaacacagatagaaagaaggaaaacaagcctgtatttttccagcaaatataacaaagaagctcttagccccccacgacgtaaagcctttaagaaatggacacctcctcggtcaccttttaatctcgttcaagaaacactttttcatgatccatggaagcttctcatcgctactatatttctcaatcggacctcaggcaaaatggcaatacctgtgctttggaagtttctggagaagtatccttcagctgaggtagcaagaaccgcagactggagagatgtgtcagaacttcttaaacctcttggtctctacgatcttcgggcaaaaaccattgtcaagttctcagatgaatacctgacaaagcagtggaagtatccaattgagcttcatgggattggtaaatatggcaacgactcttaccgaattttttgtgtcaatgagtggaagcaggtgcaccctgaagaccacaaattaaataaatatcatgactggctttgggaaaatcatgaaaaattaagtctatcttaaactctgcagctttcaagctcatctgttatgcatagctttgcacttcaaaaaagcttaattaagtacaaccaaccacctttccagccatagagattttaattagcccaactagaagcctagtgtgtgtgctttcttaatgtgtgtgccaatggtggatctttgctactgaatgtgtttgaacatgttttgagatttttttaaaataaattattatttgacaacaatccaaaaaaaatacggcttttccaatgatgaaatataatcagaagatgaaaaatagttctaaactatcaataatacaaagcaaatttctatcagccttgctaaagctaggggcccactaaatatttttatcggctaggcgtggtggtgcatgcctgtaatctcggaaggctgaggcaggaggatcatttgagctcatgagggcccaggaggtcaaggcttcagtgagccatgatcatgccactgcactccagtctggatgacagagagagaccctgtctcaaaaaatatatatttaaaaaataaaaataaaagctgaccccaaagacaaataa

SEQ ID NO: 153287 - DNA, 2194 bp, Homo sapiens
  Payload ID: 10155
  Gene Symbol: MBD4
  Gene Name: methyl-CpG binding domain 4 DNA glycosylase
  Uniprot ID: O95243
  ENST ID: ENST00000507208
  CDS Start-End: 203-1921
ggatttgattggtggagcgtggaaatggcggctgtagccgagggggcggccggaaagcagcggcggcgtctggggcgctttcgcaacattcagacctcggttgcagcccggtgccgtgagctgaagaggtttcacatcttactccgccccacaccctgggcgttgcggcgctgggctcgttgctgcagccggaccctgctcgatgggcacgactgggctggagagtctgagtctgggggaccgcggagctgcccccaccgtcacctctagtgagcgcctagtcccagacccgccgaatgacctccgcaaagaagatgttgctatggaattggaaagagtgggagaagatgaggaacaaatgatgataaaaagaagcagtgaatgtaatcccttgctacaagaacccatcgcttctgctcagtttggtgctactgcaggaacagaatgccgtaagtctgtcccatgtggatgggaaagagttgtgaagcaaaggttatttgggaagacagcaggaagatttgatgtgtactttatcagcccacaaggactgaagttcagatccaaaagttcacttgctaattatcttcacaaaaatggagagacttctcttaagccagaagattttgattttactgtactttctaaaaggggtatcaagtcaagatataaagactgcagcatggcagccctgacatcccatctacaaaaccaaagtaacaattcaaactggaacctcaggacccgaagcaagtgcaaaaaggatgtgtttatgccgccaagtagtagttcagagttgcaggagagcagaggactctctaactttacttccactcatttgcttttgaaagaagatgagggtgttgatgatgttaacttcagaaaggttagaaagcccaaaggaaaggtgactattttgaaaggaatcccaattaagaaaactaaaaaaggatgtaggaagagctgttcaggttttgttcaaagtgatagcaaaagagaatctgtgtgtaataaagcagatgctgaaagtgaacctgttgcacaaaaaagtcagcttgatagaactgtctgcatttctgatgctggagcatgtggtgagaccctcagtgtgaccagtgaagaaaacagccttgtaaaaaaaaaagaaagatcattgagttcaggatcaaatttttgttctgaacaaaaaacttctggcatcataaacaaattttgttcagccaaagactcagaacacaacgagaagtatgaggatacctttttagaatctgaagaaatcggaacaaaagtagaagttgtggaaaggaaagaacatttgcatactgacattttaaaacgtggctctgaaatggacaacaactgctcaccaaccaggaaagacttcactggtgagaaaatatttcaagaagataccatcccacgaacacagatagaaagaaggaaaacaagcctgtatttttccagcaaatataacaaagaagctcttagccccccacgacgtaaagcctttaagaaatggacacctcctcggtcaccttttaatctcgttcaagaaacactttttcatgatccatggaagcttctcatcgctactatatttctcaatcggacctcaggcaaaatggcaatacctgtgctttggaagtttctggagaagtatccttcagctgaggtagcaagaaccgcagactggagagatgtgtcagaacttcttaaacctcttggtctctacgatcttcgggcaaaaaccattgtcaagttctcagatgaatacctgacaaagcagtggaagtatccaattgagcttcatgggattggtaaatatggcaacgactcttaccgaattttttgtgtcaatgagtggaagcaggtgaggctcactcccatccataattcagcacatttggtctctgaggcaaaataagtccaccattatggttaagactatttattggatacaaatgctattacagtcacaaacaattgtgttcctggctgcggggaagcgggtggcatgtgggttttggggtttttgatcagtaggcgctcccaagtccacaaagaccagtccagcggcgtggcctctgactcatctccagtggtttgtcacctctggccctgttcctgtcattccctatttgtgtgctatctctaagcctgacgtggttttcctcctgtcaaaagtacaccactacag

SEQ ID NO: 153288 - DNA, 576 bp, Homo sapiens
  Payload ID: 10155
  Gene Symbol: MBD4
  Gene Name: methyl-CpG binding domain 4 DNA glycosylase
  ENST ID: ENST00000509828
  CDS Start-End: 95-253
cggtgccgtgagctgaagaggtttcacatcttactccgccccacaccctgggcgttgcggcgctgggctcgttgctgcagccggaccctgctcgatgggcacgactgggctggagagtctgagtctgggggaccgcggagctgcccccaccgtcacctctagtgagcgcctagtcccagacccgccgaatgacctccggcaaaatggcaatacctgtgctttggaagtttctggagaagtatccttcagctgaggtagcaagaaccgcagactggagagatgtgtcagaacttcttaaacctcttggtctctacgatcttcgggcaaaaaccattgtcaagttctcagatgaatacctgacaaagcagtggaagtatccaattgagcttcatgggattggtaaatatggcaacgactcttaccgaattttttgtgtcaatgagtggaagcaggtgcaccctgaagaccacaaattaaataaatatcatgactggctttgggaaaatcatgaaaaattaagtctatcttaaactctgcagctttcaagctcatctgttatgcatagctttgcacttc

SEQ ID NO: 153289 - DNA, 2099 bp, Homo sapiens
  Payload ID: 10155
  Gene Symbol: MBD4
  Gene Name: methyl-CpG binding domain 4 DNA glycosylase
  Uniprot ID: O95243
  ENST ID: ENST00000503197
  CDS Start-End: 175-1797
cggctgtagccgagggggcggccggaaagcagcggcggcgtctggggcgctttcgcaacattcagacctcggttgcagcccggtgccgtgagctgaagaggtttcacatcttactccgccccacaccctgggcgttgcggcgctgggctcgttgctgcagccggaccctgctcgatgggcacgactgggctggagagtctgagtctgggggaccgcggagctgcccccaccgtcacctctagtgagcgcctagtcccagacccgccgaatgacctccgcaaagaagatgttgctatggaattggaaagagtgggagaagatgaggaacaaatgatgataaaaagaagcagtgaatgtaatcccttgctacaagaacccatcgcttctgctcagtttggtgctactgcaggaacagaatgccgtaagtctgtcccatgtggatgggaaagagttgtgaagcaaaggttatttgggaagacagcaggaagatttgatgtgtactttatcagcccacaaggactgaagttcagatccaaaagttcacttgctaattatcttcacaaaaatggagagacttctcttaagccagaagattttgattttactgtactttctaaaaggggtatcaagtcaagatataaagactgcagcatggcagccctgacatcccatctacaaaaccaaagtaacaattcaaactggaacctcaggacccgaagcaagtgcaaaaaggatgtgtttatgccgccaagtagtagttcagagttgcaggagagcagaggactctctaactttacttccactcatttgcttttgaaagaagatgagggtgttgatgatgttaacttcagaaaggttagaaagcccaaaggaaaggtgactattttgaaaggaatcccaattaagaaaactaaaaaaggatgtaggaagagctgttcaggttttgttcaaagtgatagcaaaagagaatctgtgtgtaataaagcagatgctgaaagtgaacctgttgcacaaaaaagtcagcttgatagaactgtctgcatttctgatgctggagcatgtggtgagaccctcagtgtgaccagtgaagaaaacagccttgtaaaaaaaaaagaaagatcattgagttcaggatcaaatttttgttctgaacaaaaaacttctggcatcataaacaaattttgttcagccaaagactcagaacacaacgagaagtatgaggatacctttttagaatctgaagaaatcggaacaaaagtagaagttgtggaaaggaaagaacatttgcatactgacattttaaaacgtggctctgaaatggacaacaactgctcaccaaccaggaaagacttcactggtgagaaaatatttcaagaagataccatcccacgaacacagatagaaagaaggaaaacaagcctgtatttttccagcaaatataacaaagaagctcttagccccccacgacgtaaagcctttaagaaatggacacctcctcggtcaccttttaatctcgttcaagaaacactttttcatgatccatggaagcttctcatcgctactatatttctcaatcggacctcaggcaaaatggcaatacctgtgctttggaagtttctggagaagtatccttcagctgaggtagcaagaaccgcagactggagagatgtgtcagaacttcttaaacctcttggtctctacgatcttcgggcaaaaaccattgtcaagttctcagatgaatacctgacaaagcagtggaagtatccaattgagcttcatgggattggtgcaccctgaagaccacaaattaaataaatatcatgactggctttgggaaaatcatgaaaaattaagtctatcttaaactctgcagctttcaagctcatctgttatgcatagctttgcacttcaaaaaagcttaattaagtacaaccaaccacctttccagccatagagattttaattagcccaactagaagcctagtgtgtgtgctttcttaatgtgtgtgccaatggtggatctttgctactgaatgtgtttgaacatgttttgagatttttttaaaataaattattatttgacaacaatccaaaaaaaa

SEQ ID NO: 153290 - DNA, 3259 bp, Homo sapiens
  Payload ID: 10156
  Gene Symbol: MBD1
  Gene Name: methyl-CpG binding domain protein 1
  Uniprot ID: Q9UIS9
  ENST ID: ENST00000269468
  CDS Start-End: 438-2255
aaagcgcatgcgccagctagatgggcagcgaggagagccgcaactgccagtccctcgaaggggttagctgtcgttgaacgtcagcacgcagatgcaactggctctcggcaggggggcgcgcgcaccgctgcggagcgccggcccgtaggcgcgggagcctccctattaagggcacgcgacatcgaggcaatagtgcgcaggtgcttagccagaggcggagcccgagaggcaggcagcggacttccggttccgggagcaacgaacagccgcggaggcgacagctaccgcttcagaggaggcggccgcggaggaggaggaaggggaggagggcgaggcgggaggtgcaggagggaccctcgccatgggtccacgggcctagagtggcggaagataccggcctggtgccaaactggctactgctgcttcctgtggcctccatggctgaggactggctggactgcccggccctgggccctggctggaagcgccgcgaagtctttcgcaagtcaggggccacctgtggacgctcagacacctattaccagagccccacaggagacaggatccgaagcaaagttgagctgactcgatacctgggccctgcgtgtgatctcaccctcttcgacttcaaacaaggcatcttgtgctatccagcccccaaggcccatcccgtggcggttgccagcaagaagcgaaagaagccttcaaggccagccaagactcggaaacgtcaggttggaccccagagtggtgaggtcaggaaggaggccccgagggatgagaccaaggctgacactgacacagccccagcttcattccctgctcctgggtgctgtgagaactgtggaatcagcttctcaggggatggcacccaaaggcagcggctcaaaacgttgtgcaaagactgtcgagcacagagaattgccttcaaccgggaacagagaatgtttaagcgtgtgggctgtggggagtgtgcagcctgccaggtaacagaagactgtggggcctgctccacctgcctcctgcagctgccccatgatgtggcatcggggctgttctgcaagtgtgaacggagacgctgcctccggattgtggaaaggagccgagggtgtggagtatgccggggctgtcagacccaagaggattgtggccattgccccatctgccttcgccctccccgccctggtctcaggcgccagtggaaatgtgtccagcgacgttgcctacggggtaaacatgcccgccgcaagggaggctgtgactccaagatggctgccaggcggcgccccggagcccagccactgcctccaccacccccatcacagtccccagagcccacagagccgcaccccagagccctggccccctcgccacctgccgagttcatctattactgtgtagacgaggacgagctacagccctacacgaaccgccggcagaaccgcaagtgcggggcctgtgcagcctgcctacggcggatggactgtggccgctgcgacttctgctgcgacaagcccaaattcgggggcagcaaccagaagcgccagaagtgtcgttggcgccaatgcctgcagtttgccatgaagcggctgctgcccagtgtctggtcagagtctgaggatggggcaggatcgcccccaccttaccgtcgtcgaaagaggcccagctctgcccgacggcaccatcttggccctaccttgaagcccaccttggctacacgcacagcccaaccagaccatacccaggctccaacgaagcaggaagcaggtggtggctttgtgctgcccccgcctggcactgaccttgtgtttttacgggaaggcgcaagcagtcctgtgcaggtgccgggccctgttgcagcttccacagaagccctgttgcaggaggcccagtgctctggcctgagttgggttgtggccttaccccaggtgaagcaagagaaggcggatacccaggacgagtggacaccaggcacagctgtcctgacttctcccgtattggtgcctggctgccctagcaaggcagtagacccaggcctgccttctgtgaagcaagagccacctgacccagaggaggacaaggaggagaacaaggatgattctgcctccaaattggccccagaggaagaggcaggaggggctggcacacccgtgatcacggagattttcagcctgggtggaacccgcttccgagatacagcagtctggttgccaaggtccaaagaccttaaaaaacctggagctagaaagcagtagactggaggcttctacagactgtaggattcaagtctgcagggcaggcactcgggaagggaagatggatgtaaagtgtgggagaccgaggacacagtggagcccacgagcacgagctggaacccacgaggatggcctggaacccatgtcagtctctcaccacctccagcttcgatgatgtgggtgtcctgcagaagaagctggtgcccttcctcacagagttaaatatgcatctggcccaggaattagagaagctgaaaggatgatcctggggaaggtggagcagctgcaggcctggctgcaggcctgactactgcccacaccaacgaggtgatctagcagatacatggcaacgtgtgaactgcaacaacgcctggtgccccagcaccaaccttccaagtgtaaaaacaatgtgctgctgcttcacttccgccctccggttatcaagcaaaatgtctcttgtggcccatcttactggaagagagttccgggaaacatagcctcaccaaggtgacacattacaaagccaccctaccatgaatccgctcccaagggtctcactgctcacctgaggataactcaatataactatgtggctgaaaatgcaaagctgaagaccatggatttcatggtgattccagcaagtacagagattctatgaagcccacccagaaaaaacttgctggtcctggctatttttgtgtcatttattcaagtattgagaacctggcctgtggtaggcactgtacttaatactaggatacagaaatgcaaaagatacggcccatgcaattttattaaatgcatcaatatgtattacaaatggtgaatggatttccaactttatcatggaatttaatgctgaatatatagaattcagaaaattgttgggaggacagcccttttgtgaaccttgtttggggcacagtaggaattggaaataatttagtttctatctctaagctgttctattttaaaattatttttaaatttttattgtcccactt

SEQ ID NO: 153291 - DNA, 2820 bp, Homo sapiens
  Payload ID: 10156
  Gene Symbol: MBD1
  Gene Name: methyl-CpG binding domain protein 1
  Uniprot ID: Q9UIS9
  ENST ID: ENST00000353909
  CDS Start-End: 140-1810
gcggccgcggaggaggaggaaggggaggagggcgaggcgggaggtgcaggagggaccctcgccatgggtccacgggcctagagtggcggaagataccggcctggtgccaaactggctactgctgcttcctgtggcctccatggctgaggactggctggactgcccggccctgggccctggctggaagcgccgcgaagtctttcgcaagtcaggggccacctgtggacgctcagacacctattaccagagccccacaggagacaggatccgaagcaaagttgagctgactcgatacctgggccctgcgtgtgatctcaccctcttcgacttcaaacaaggcatcttgtgctatccagcccccaaggcccatcccgtggcggttgccagcaagaagcgaaagaagccttcaaggccagccaagactcggaaacgtcaggttggaccccagagtggtgaggtcaggaaggaggccccgagggatgagaccaaggctgacactgacacagccccagcttcattccctgctcctgggtgctgtgagaactgtggaatcagcttctcaggggatggcacccaaaggcagcggctcaaaacgttgtgcaaagactgtcgagcacagagaattgccttcaaccgggaacagagaatgtttaagagccgagggtgtggagtatgccggggctgtcagacccaagaggattgtggccattgccccatctgccttcgccctccccgccctggtctcaggcgccagtggaaatgtgtccagcgacgttgcctacggggtaaacatgcccgccgcaagggaggctgtgactccaagatggctgccaggcggcgccccggagcccagccactgcctccaccacccccatcacagtccccagagcccacagagccgcaccccagagccctggccccctcgccacctgccgagttcatctattactgtgtagacgaggacgagctacagccctacacgaaccgccggcagaaccgcaagtgcggggcctgtgcagcctgcctacggcggatggactgtggccgctgcgacttctgctgcgacaagcccaaattcgggggcagcaaccagaagcgccagaagtgtcgttggcgccaatgcctgcagtttgccatgaagcggctgctgcccagtgtctggtcagagtctgaggatggggcaggatcgcccccaccttaccgtcgtcgaaagaggcccagctctgcccgacggcaccatcttggccctaccttgaagcccaccttggctacacgcacagcccaaccagaccatacccaggctccaacgaagcaggaagcaggtggtggctttgtgctgcccccgcctggcactgaccttgtgtttttacgggaaggcgcaagcagtcctgtgcaggtgccgggccctgttgcagcttccacagaagccctgttgcaggaggcccagtgctctggcctgagttgggttgtggccttaccccaggtgaagcaagagaaggcggatacccaggacgagtggacaccaggcacagctgtcctgacttctcccgtattggtgcctggctgccctagcaaggcagtagacccaggcctgccttctgtgaagcaagagccacctgacccagaggaggacaaggaggagaacaaggatgattctgcctccaaattggccccagaggaagaggcaggaggggctggcacacccgtgatcacggagattttcagcctgggtggaacccgcttccgagatacagcagtctggttgccaaggtccaaagaccttaaaaaacctggagctagaaagcagtagactggaggcttctacagactgtaggattcaagtctgcagggcaggcactcgggaagggaagatggatgtaaagtgtgggagaccgaggacacagtggagcccacgagcacgagctggaacccacgaggatggcctggaacccatgtcagtctctcaccacctccagcttcgatgatgtgggtgtcctgcagaagaagctggtgcccttcctcacagagttaaatatgcatctggcccaggaattagagaagctgaaaggatgatcctggggaaggtggagcagctgcaggcctggctgcaggcctgactactgcccacaccaacgaggtgatctagcagatacatggcaacgtgtgaactgcaacaacgcctggtgccccagcaccaaccttccaagtgtaaaaacaatgtgctgctgcttcacttccgccctccggttatcaagcaaaatgtctcttgtggcccatcttactggaagagagttccgggaaacatagcctcaccaaggtgacacattacaaagccaccctaccatgaatccgctcccaagggtctcactgctcacctgaggataactcaatataactatgtggctgaaaatgcaaagctgaagaccatggatttcatggtgattccagcaagtacagagattctatgaagcccacccagaaaaaacttgctggtcctggctatttttgtgtcatttattcaagtattgagaacctggcctgtggtaggcactgtacttaatactaggatacagaaatgcaaaagatacggcccatgcaattttattaaatgcatcaatatgtattacaaatggtgaatggatttccaactttatcatggaatttaatgctgaatatatagaattcagaaaattgttgggaggacagcccttttgtgaaccttgtttggggcacagtaggaattggaaataatttagtttctatctctaagctgttctattttaaaattatttttaaatttttattgtcccacttacttac

SEQ ID NO: 153292 - DNA, 2980 bp, Homo sapiens
  Payload ID: 10156
  Gene Symbol: MBD1
  Gene Name: methyl-CpG binding domain protein 1
  Uniprot ID: Q9UIS9
  ENST ID: ENST00000269471
  CDS Start-End: 438-2198
aaagcgcatgcgccagctagatgggcagcgaggagagccgcaactgccagtccctcgaaggggttagctgtcgttgaacgtcagcacgcagatgcaactggctctcggcaggggggcgcgcgcaccgctgcggagcgccggcccgtaggcgcgggagcctccctattaagggcacgcgacatcgaggcaatagtgcgcaggtgcttagccagaggcggagcccgagaggcaggcagcggacttccggttccgggagcaacgaacagccgcggaggcgacagctaccgcttcagaggaggcggccgcggaggaggaggaaggggaggagggcgaggcgggaggtgcaggagggaccctcgccatgggtccacgggcctagagtggcggaagataccggcctggtgccaaactggctactgctgcttcctgtggcctccatggctgaggactggctggactgcccggccctgggccctggctggaagcgccgcgaagtctttcgcaagtcaggggccacctgtggacgctcagacacctattaccagagccccacaggagacaggatccgaagcaaagttgagctgactcgatacctgggccctgcgtgtgatctcaccctcttcgacttcaaacaaggcatcttgtgctatccagcccccaaggcccatcccgtggcggttgccagcaagaagcgaaagaagccttcaaggccagccaagactcggaaacgtcaggttggaccccagagtggtgaggtcaggaaggaggccccgagggatgagaccaaggctgacactgacacagccccagcttcattccctgctcctgggtgctgtgagaactgtggaatcagcttctcaggggatggcacccaaaggcagcggctcaaaacgttgtgcaaagactgtcgagcacagagaattgccttcaaccgggaacagagaatgtttaagcgtgtgggctgtggggagtgtgcagcctgccaggtaacagaagactgtggggcctgctccacctgcctcctgcagctgccccatgatgtggcatcggggctgttctgcaagtgtgaacggagacgctgcctccggattgtggaaaggagccgagggtgtggagtatgccggggctgtcagacccaagaggattgtggccattgccccatctgccttcgccctccccgccctggtctcaggcgccagtggaaatgtgtccagcgacgttgcctacggggtaaacatgcccgccgcaagggaggctgtgactccaagatggctgccaggcggcgccccggagcccagccactgcctccaccacccccatcacagtccccagagcccacagagccgcagccctacacgaaccgccggcagaaccgcaagtgcggggcctgtgcagcctgcctacggcggatggactgtggccgctgcgacttctgctgcgacaagcccaaattcgggggcagcaaccagaagcgccagaagtgtcgttggcgccaatgcctgcagtttgccatgaagcggctgctgcccagtgtctggtcagagtctgaggatggggcaggatcgcccccaccttaccgtcgtcgaaagaggcccagctctgcccgacggcaccatcttggccctaccttgaagcccaccttggctacacgcacagcccaaccagaccatacccaggctccaacgaagcaggaagcaggtggtggctttgtgctgcccccgcctggcactgaccttgtgtttttacgggaaggcgcaagcagtcctgtgcaggtgccgggccctgttgcagcttccacagaagccctgttgcaggcagtagacccaggcctgccttctgtgaagcaagagccacctgacccagaggaggacaaggaggagaacaaggatgattctgcctccaaattggccccagaggaagaggcaggaggggctggcacacccgtgatcacggagattttcagcctgggtggaacccgcttccgagatacagcagtctggttgccaagtctgcagggcaggcactcgggaagggaagatggatgtaaagtgtgggagaccgaggacacagtggagcccacgagcacgagctggaacccacgaggatggcctggaacccatgtcagtctctcaccacctccagcttcgatgatgtgggtgtcctgcagaagaagctggtgcccttcctcacagagttaaatatgcatctggcccaggaattagagaagctgaaaggatgatcctggggaaggtggagcagctgcaggcctggctgcaggcctgactactgcccacaccaacgaggtgatctagcagatacatggcaacgtgtgaactgcaacaacgcctggtgccccagcaccaaccttccaagtgtaaaaacaatgtgctgctgcttcacttccgccctccggttatcaagcaaaatgtctcttgtggcccatcttactggaagagagttccgggaaacatagcctcaccaaggtgacacattacaaagccaccctaccatgaatccgctcccaagggtctcactgctcacctgaggataactcaatataactatgtggctgaaaatgcaaagctgaagaccatggatttcatggtgattccagcaagtacagagattctatgaagcccacccagaaaaaacttgctggtcctggctatttttgtgtcatttattcaagtattgagaacctggcctgtggtaggcactgtacttaatactaggatacagaaatgcaaaagatacggcccatgcaattttattaaatgcatcaatatgtattacaaatggtgaatggatttccaactttatcatggaatttaatgctgaatatatagaattcagaaaattgttgggaggacagcccttttgtgaaccttgtttggggcacagtaggaattggaaataatttagtttctatctctaagctgttctattttaaaattatttttaaatttttattgtcccactt

SEQ ID NO: 153293 - DNA, 3091 bp, Homo sapiens
  Payload ID: 10156
  Gene Symbol: MBD1
  Gene Name: methyl-CpG binding domain protein 1
  Uniprot ID: Q9UIS9
  ENST ID: ENST00000347968
  CDS Start-End: 438-2087
aaagcgcatgcgccagctagatgggcagcgaggagagccgcaactgccagtccctcgaaggggttagctgtcgttgaacgtcagcacgcagatgcaactggctctcggcaggggggcgcgcgcaccgctgcggagcgccggcccgtaggcgcgggagcctccctattaagggcacgcgacatcgaggcaatagtgcgcaggtgcttagccagaggcggagcccgagaggcaggcagcggacttccggttccgggagcaacgaacagccgcggaggcgacagctaccgcttcagaggaggcggccgcggaggaggaggaaggggaggagggcgaggcgggaggtgcaggagggaccctcgccatgggtccacgggcctagagtggcggaagataccggcctggtgccaaactggctactgctgcttcctgtggcctccatggctgaggactggctggactgcccggccctgggccctggctggaagcgccgcgaagtctttcgcaagtcaggggccacctgtggacgctcagacacctattaccagagccccacaggagacaggatccgaagcaaagttgagctgactcgatacctgggccctgcgtgtgatctcaccctcttcgacttcaaacaaggcatcttgtgctatccagcccccaaggcccatcccgtggcggttgccagcaagaagcgaaagaagccttcaaggccagccaagactcggaaacgtcaggttggaccccagagtggtgaggtcaggaaggaggccccgagggatgagaccaaggctgacactgacacagccccagcttcattccctgctcctgggtgctgtgagaactgtggaatcagcttctcaggggatggcacccaaaggcagcggctcaaaacgttgtgcaaagactgtcgagcacagagaattgccttcaaccgggaacagagaatgtttaagcgtgtgggctgtggggagtgtgcagcctgccaggtaacagaagactgtggggcctgctccacctgcctcctgcagctgccccatgatgtggcatcggggctgttctgcaagtgtgaacggagacgctgcctccggattgtggaaaggagccgagggtgtggagtatgccggggctgtcagacccaagaggattgtggccattgccccatctgccttcgccctccccgccctggtctcaggcgccagtggaaatgtgtccagcgacgttgcctacggggtaaacatgcccgccgcaagggaggctgtgactccaagatggctgccaggcggcgccccggagcccagccactgcctccaccacccccatcacagtccccagagcccacagagccgcaccccagagccctggccccctcgccacctgccgagttcatctattactgtgtagacgaggacgagctaaagcggctgctgcccagtgtctggtcagagtctgaggatggggcaggatcgcccccaccttaccgtcgtcgaaagaggcccagctctgcccgacggcaccatcttggccctaccttgaagcccaccttggctacacgcacagcccaaccagaccatacccaggctccaacgaagcaggaagcaggtggtggctttgtgctgcccccgcctggcactgaccttgtgtttttacgggaaggcgcaagcagtcctgtgcaggtgccgggccctgttgcagcttccacagaagccctgttgcaggaggcccagtgctctggcctgagttgggttgtggccttaccccaggtgaagcaagagaaggcggatacccaggacgagtggacaccaggcacagctgtcctgacttctcccgtattggtgcctggctgccctagcaaggcagtagacccaggcctgccttctgtgaagcaagagccacctgacccagaggaggacaaggaggagaacaaggatgattctgcctccaaattggccccagaggaagaggcaggaggggctggcacacccgtgatcacggagattttcagcctgggtggaacccgcttccgagatacagcagtctggttgccaaggtccaaagaccttaaaaaacctggagctagaaagcagtagactggaggcttctacagactgtaggattcaagtctgcagggcaggcactcgggaagggaagatggatgtaaagtgtgggagaccgaggacacagtggagcccacgagcacgagctggaacccacgaggatggcctggaacccatgtcagtctctcaccacctccagcttcgatgatgtgggtgtcctgcagaagaagctggtgcccttcctcacagagttaaatatgcatctggcccaggaattagagaagctgaaaggatgatcctggggaaggtggagcagctgcaggcctggctgcaggcctgactactgcccacaccaacgaggtgatctagcagatacatggcaacgtgtgaactgcaacaacgcctggtgccccagcaccaaccttccaagtgtaaaaacaatgtgctgctgcttcacttccgccctccggttatcaagcaaaatgtctcttgtggcccatcttactggaagagagttccgggaaacatagcctcaccaaggtgacacattacaaagccaccctaccatgaatccgctcccaagggtctcactgctcacctgaggataactcaatataactatgtggctgaaaatgcaaagctgaagaccatggatttcatggtgattccagcaagtacagagattctatgaagcccacccagaaaaaacttgctggtcctggctatttttgtgtcatttattcaagtattgagaacctggcctgtggtaggcactgtacttaatactaggatacagaaatgcaaaagatacggcccatgcaattttattaaatgcatcaatatgtattacaaatggtgaatggatttccaactttatcatggaatttaatgctgaatatatagaattcagaaaattgttgggaggacagcccttttgtgaaccttgtttggggcacagtaggaattggaaataatttagtttctatctctaagctgttctattttaaaattatttttaaatttttattgtcccactt

SEQ ID NO: 153294 - DNA, 2956 bp, Homo sapiens
  Payload ID: 10156
  Gene Symbol: MBD1
  Gene Name: methyl-CpG binding domain protein 1
  Uniprot ID: Q9UIS9
  ENST ID: ENST00000339998
  CDS Start-End: 140-1792
gcggccgcggaggaggaggaaggggaggagggcgaggcgggaggtgcaggagggaccctcgccatgggtccacgggcctagagtggcggaagataccggcctggtgccaaactggctactgctgcttcctgtggcctccatggctgaggactggctggactgcccggccctgggccctggctggaagcgccgcgaagtctttcgcaagtcaggggccacctgtggacgctcagacacctattaccagagccccacaggagacaggatccgaagcaaagttgagctgactcgatacctgggccctgcgtgtgatctcaccctcttcgacttcaaacaaggcatcttgtgctatccagcccccaaggcccatcccgtggcggttgccagcaagaagcgaaagaagccttcaaggccagccaagactcggaaacgtcaggttggaccccagagtggtgaggtcaggaaggaggccccgagggatgagaccaaggctgacactgacacagccccagcttcattccctgctcctgggtgctgtgagaactgtggaatcagcttctcaggggatggcacccaaaggcagcggctcaaaacgttgtgcaaagactgtcgagcacagagaattgccttcaaccgggaacagagaatgtttaagcgtgtgggctgtggggagtgtgcagcctgccaggtaacagaagactgtggggcctgctccacctgcctcctgcagctgccccatgatgtggcatcggggctgttctgcaagtgtgaacggagacgctgcctccggattgtggaaaggagccgagggtgtggagtatgccggggctgtcagacccaagaggattgtggccattgccccatctgccttcgccctccccgccctggtctcaggcgccagtggaaatgtgtccagcgacgttgcctacggggtaaacatgcccgccgcaagggaggctgtgactccaagatggctgccaggcggcgccccggagcccagccactgcctccaccacccccatcacagtccccagagcccacagagccgcaccccagagccctggccccctcgccacctgccgagttcatctattactgtgtagacgaggacgagctacagccctacacgaaccgccggcagaaccgcaagtgcggggcctgtgcagcctgcctacggcggatggactgtggccgctgcgacttctgctgcgacaagcccaaattcgggggcagcaaccagaagcgccagaagtgtcgttggcgccaatgcctgcagtttgccatgaagcggctgctgcccagtgtctggtcagagtctgaggatggggcaggatcgcccccaccttaccgtcgtcgaaagaggcccagctctgcccgacggcaccatcttggccctaccttgaagcccaccttggctacacgcacagcccaaccagaccatacccaggctccaacgaagcaggaagcaggtggtggctttgtgctgcccccgcctggcactgaccttgtgtttttacgggaaggcgcaagcagtcctgtgcaggtgccgggccctgttgcagcttccacagaagccctgttgcaggcagtagacccaggcctgccttctgtgaagcaagagccacctgacccagaggaggacaaggaggagaacaaggatgattctgcctccaaattggccccagaggaagaggcaggaggggctggcacacccgtggaaccaaccacccaaccccagtattctggtaattttgacaatgatctatatgaaatttatttgattgacatttagactcatgagttaagcttctgctgaccatttatgttagggtacaatcagaggagcagaaccactaagataaagattatgtatatatgtattttaagggatttattatagggatctgaccgcatgccattgtgggagctggttaaacagtctctgtaaggctgttgtctttgcatctaatgctggagcttgaagtctgcagggcaggcactcgggaagggaagatggatgtaaagtgtgggagaccgaggacacagtggagcccacgagcacgagctggaacccacgaggatggcctggaacccatgtcagtctctcaccacctccagcttcgatgatgtgggtgtcctgcagaagaagctggtgcccttcctcacagagttaaatatgcatctggcccaggaattagagaagctgaaaggatgatcctggggaaggtggagcagctgcaggcctggctgcaggcctgactactgcccacaccaacgaggtgatctagcagatacatggcaacgtgtgaactgcaacaacgcctggtgccccagcaccaaccttccaagtgtaaaaacaatgtgctgctgcttcacttccgccctccggttatcaagcaaaatgtctcttgtggcccatcttactggaagagagttccgggaaacatagcctcaccaaggtgacacattacaaagccaccctaccatgaatccgctcccaagggtctcactgctcacctgaggataactcaatataactatgtggctgaaaatgcaaagctgaagaccatggatttcatggtgattccagcaagtacagagattctatgaagcccacccagaaaaaacttgctggtcctggctatttttgtgtcatttattcaagtattgagaacctggcctgtggtaggcactgtacttaatactaggatacagaaatgcaaaagatacggcccatgcaattttattaaatgcatcaatatgtattacaaatggtgaatggatttccaactttatcatggaatttaatgctgaatatatagaattcagaaaattgttgggaggacagcccttttgtgaaccttgtttggggcacagtaggaattggaaataatttagtttctatctctaagctgttctattttaaaattatttttaaatttttattgtcccactt

SEQ ID NO: 153295 - DNA, 2434 bp, Homo sapiens
  Payload ID: 10156
  Gene Symbol: MBD1
  Gene Name: methyl-CpG binding domain protein 1
  Uniprot ID: Q9UIS9
  ENST ID: ENST00000382948
  CDS Start-End: 438-2255
aaagcgcatgcgccagctagatgggcagcgaggagagccgcaactgccagtccctcgaaggggttagctgtcgttgaacgtcagcacgcagatgcaactggctctcggcaggggggcgcgcgcaccgctgcggagcgccggcccgtaggcgcgggagcctccctattaagggcacgcgacatcgaggcaatagtgcgcaggtgcttagccagaggcggagcccgagaggcaggcagcggacttccggttccgggagcaacgaacagccgcggaggcgacagctaccgcttcagaggaggcggccgcggaggaggaggaaggggaggagggcgaggcgggaggtgcaggagggaccctcgccatgggtccacgggcctagagtggcggaagataccggcctggtgccaaactggctactgctgcttcctgtggcctccatggctgaggactggctggactgcccggccctgggccctggctggaagcgccgcgaagtctttcgcaagtcaggggccacctgtggacgctcagacacctattaccagagccccacaggagacaggatccgaagcaaagttgagctgactcgatacctgggccctgcgtgtgatctcaccctcttcgacttcaaacaaggcatcttgtgctatccagcccccaaggcccatcccgtggcggttgccagcaagaagcgaaagaagccttcaaggccagccaagactcggaaacgtcaggttggaccccagagtggtgaggtcaggaaggaggccccgagggatgagaccaaggctgacactgacacagccccagcttcattccctgctcctgggtgctgtgagaactgtggaatcagcttctcaggggatggcacccaaaggcagcggctcaaaacgttgtgcaaagactgtcgagcacagagaattgccttcaaccgggaacagagaatgtttaagcgtgtgggctgtggggagtgtgcagcctgccaggtaacagaagactgtggggcctgctccacctgcctcctgcagctgccccatgatgtggcatcggggctgttctgcaagtgtgaacggagacgctgcctccggattgtggaaaggagccgagggtgtggagtatgccggggctgtcagacccaagaggattgtggccattgccccatctgccttcgccctccccgccctggtctcaggcgccagtggaaatgtgtccagcgacgttgcctacggggtaaacatgcccgccgcaagggaggctgtgactccaagatggctgccaggcggcgccccggagcccagccactgcctccaccacccccatcacagtccccagagcccacagagccgcaccccagagccctggccccctcgccacctgccgagttcatctattactgtgtagacgaggacgagctacagccctacacgaaccgccggcagaaccgcaagtgcggggcctgtgcagcctgcctacggcggatggactgtggccgctgcgacttctgctgcgacaagcccaaattcgggggcagcaaccagaagcgccagaagtgtcgttggcgccaatgcctgcagtttgccatgaagcggctgctgcccagtgtctggtcagagtctgaggatggggcaggatcgcccccaccttaccgtcgtcgaaagaggcccagctctgcccgacggcaccatcttggccctaccttgaagcccaccttggctacacgcacagcccaaccagaccatacccaggctccaacgaagcaggaagcaggtggtggctttgtgctgcccccgcctggcactgaccttgtgtttttacgggaaggcgcaagcagtcctgtgcaggtgccgggccctgttgcagcttccacagaagccctgttgcaggaggcccagtgctctggcctgagttgggttgtggccttaccccaggtgaagcaagagaaggcggatacccaggacgagtggacaccaggcacagctgtcctgacttctcccgtattggtgcctggctgccctagcaaggcagtagacccaggcctgccttctgtgaagcaagagccacctgacccagaggaggacaaggaggagaacaaggatgattctgcctccaaattggccccagaggaagaggcaggaggggctggcacacccgtgatcacggagattttcagcctgggtggaacccgcttccgagatacagcagtctggttgccaaggtccaaagaccttaaaaaacctggagctagaaagcagtagactggaggcttctacagactgtaggattcaaggtattaccaccttgctcttgactggaaatgcaactgtggttaccacctgtgctgcaggtccgtcctggttccctgatttgtgtttcctgttctgcctggatcctgattctcagaaaccagttactggacttctgatccacatcctga

SEQ ID NO: 153296 - DNA, 1512 bp, Homo sapiens
  Payload ID: 10156
  Gene Symbol: MBD1
  Gene Name: methyl-CpG binding domain protein 1
  Uniprot ID: Q9UIS9
  ENST ID: ENST00000398488
  CDS Start-End: 1-1512
atggctgaggactggctggactgcccggccctgggccctggctggaagcgccgcgaagtctttcgcaagtcaggggccacctgtggacgctcagacacctattaccagagccccacaggagacaggatccgaagcaaagttgagctgactcgatacctgggccctgcgtgtgatctcaccctcttcgacttcaaacaaggcatcttgtgctatccagcccccaaggcccatcccgtggcggttgccagcaagaagcgaaagaagccttcaaggccagccaagactcggaaacgtcaggttggaccccagagtggtgaggtcaggaaggaggccccgagggatgagaccaaggctgacactgacacagccccagcttcattccctgctcctgggtgctgtgagaactgtggaatcagcttctcaggggatggcacccaaaggcagcggctcaaaacgttgtgcaaagactgtcgagcacagagaattgccttcaaccgggaacagagaatgtttaagcgtgtgggctgtggggagtgtgcagcctgccaggtaacagaagactgtggggcctgctccacctgcctcctgcagctgccccatgatgtggcatcggggctgttctgcaagtgtgaacggagacgctgcctccggattgtggaaaggagccgagggtgtggagtatgccggggctgtcagacccaagaggattgtggccattgccccatctgccttcgccctccccgccctggtctcaggcgccagtggaaatgtgtccagcgacgttgcctacggggtaaacatgcccgccgcaagggaggctgtgactccaagatggctgccaggcggcgccccggagcccagccactgcctccaccacccccatcacagtccccagagcccacagagccgcaccccagagccctggccccctcgccacctgccgagttcatctattactgtgtagacgaggacgagctaaagcggctgctgcccagtgtctggtcagagtctgaggatggggcaggatcgcccccaccttaccgtcgtcgaaagaggcccagctctgcccgacggcaccatcttggccctaccttgaagcccaccttggctacacgcacagcccaaccagaccatacccaggctccaacgaagcaggaagcaggtggtggctttgtgctgcccccgcctggcactgaccttgtgtttttacgggaaggcgcaagcagtcctgtgcaggtgccgggccctgttgcagcttccacagaagccctgttgcaggcagtagacccaggcctgccttctgtgaagcaagagccacctgacccagaggaggacaaggaggagaacaaggatgattctgcctccaaattggccccagaggaagaggcaggaggggctggcacacccgtgatcacggagattttcagcctgggtggaacccgcttccgagatacagcagtctggttgccaaggtccaaagaccttaaaaaacctggagctagaaagcagtag

SEQ ID NO: 153297 - DNA, 1845 bp, Homo sapiens
  Payload ID: 10156
  Gene Symbol: MBD1
  Gene Name: methyl-CpG binding domain protein 1
  Uniprot ID: Q9UIS9
  ENST ID: ENST00000398493
  CDS Start-End: 164-1813
gcgacagctaccgcttcagaggaggcggccgcggaggaggaggaaggggaggagggcgaggcgggaggtgcaggagggaccctcgccatgggtccacgggcctagagtggcggaagataccggcctggtgccaaactggctactgctgcttcctgtggcctccatggctgaggactggctggactgcccggccctgggccctggctggaagcgccgcgaagtctttcgcaagtcaggggccacctgtggacgctcagacacctattaccagagccccacaggagacaggatccgaagcaaagttgagctgactcgatacctgggccctgcgtgtgatctcaccctcttcgacttcaaacaaggcatcttgtgctatccagcccccaaggcccatcccgtggcggttgccagcaagaagcgaaagaagccttcaaggccagccaagactcggaaacgtcaggttggaccccagagtggtgaggtcaggaaggaggccccgagggatgagaccaaggctgacactgacacagccccagcttcattccctgctcctgggtgctgtgagaactgtggaatcagcttctcaggggatggcacccaaaggcagcggctcaaaacgttgtgcaaagactgtcgagcacagagaattgccttcaaccgggaacagagaatgtttaagcgtgtgggctgtggggagtgtgcagcctgccaggtaacagaagactgtggggcctgctccacctgcctcctgcagctgccccatgatgtggcatcggggctgttctgcaagtgtgaacggagacgctgcctccggattgtggaaaggagccgagggtgtggagtatgccggggctgtcagacccaagaggattgtggccattgccccatctgccttcgccctccccgccctggtctcaggcgccagtggaaatgtgtccagcgacgttgcctacggggtaaacatgcccgccgcaagggaggctgtgactccaagatggctgccaggcggcgccccggagcccagccactgcctccaccacccccatcacagtccccagagcccacagagccgcaccccagagccctggccccctcgccacctgccgagttcatctattactgtgtagacgaggacgagctaaagcggctgctgcccagtgtctggtcagagtctgaggatggggcaggatcgcccccaccttaccgtcgtcgaaagaggcccagctctgcccgacggcaccatcttggccctaccttgaagcccaccttggctacacgcacagcccaaccagaccatacccaggctccaacgaagcaggaagcaggtggtggctttgtgctgcccccgcctggcactgaccttgtgtttttacgggaaggcgcaagcagtcctgtgcaggtgccgggccctgttgcagcttccacagaagccctgttgcaggaggcccagtgctctggcctgagttgggttgtggccttaccccaggtgaagcaagagaaggcggatacccaggacgagtggacaccaggcacagctgtcctgacttctcccgtattggtgcctggctgccctagcaaggcagtagacccaggcctgccttctgtgaagcaagagccacctgacccagaggaggacaaggaggagaacaaggatgattctgcctccaaattggccccagaggaagaggcaggaggggctggcacacccgtgatcacggagattttcagcctgggtggaacccgcttccgagatacagcagtctggttgccaaggtccaaagaccttaaaaaacctggagctagaaagcagtagactggaggcttctacagactgtaggattcaag

SEQ ID NO: 153298 - DNA, 2178 bp, Homo sapiens
  Payload ID: 10156
  Gene Symbol: MBD1
  Gene Name: methyl-CpG binding domain protein 1
  ENST ID: ENST00000398495
  CDS Start-End: 19-1719
ctgcttcctgtggcctccatggctgaggactggctggactgcccggccctgggccctggctggaagcgccgcgaagtctttcgcaagtcaggggccacctgtggacgctcagacacctattaccagagccccacaggagacaggatccgaagcaaagttgagctgactcgatacctgggccctgcgtgtgatctcaccctcttcgacttcaaacaaggcatcttgtgctatccagcccccaaggcccatcccgtggcggttgccagcaagaagcgaaagaagccttcaaggccagccaagactcggaaacgtcaggttggaccccagagtggtgaggtcaggaaggaggccccgagggatgagaccaaggctgacactgacacagccccagcttcattccctgctcctgggtgctgtgagaactgtggaatcagcttctcaggggatggcacccaaaggcagcggctcaaaacgttgtgcaaagactgtcgagcacagagaattgccttcaaccgggaacagagaatgtttaagcgtgtgggctgtggggagtgtgcagcctgccaggtaacagaagactgtggggcctgctccacctgcctcctgcagctgccccatgatgtggcatcggggctgttctgcaagtgtgaacggagacgctgcctccggattgtggaaaggagccgagggtgtggagtatgccggggctgtcagacccaagaggattgtggccattgccccatctgccttcgccctccccgccctggtctcaggcgccagtggaaatgtgtccagcgacgttgcctacggcaccttgctcaccgcctgcgtcgccgtcatcagagatgtcagcgacgcactcccctggctgtggctcccccaactggtaaacatgcccgccgcaagggaggctgtgactccaagatggctgccaggcggcgccccggagcccagccactgcctccaccacccccatcacagtccccagagcccacagagccgcaccccagagccctggccccctcgccacctgccgagttcatctattactgtgtagacgaggacgagctaaagcggctgctgcccagtgtctggtcagagtctgaggatggggcaggatcgcccccaccttaccgtcgtcgaaagaggcccagctctgcccgacggcaccatcttggccctaccttgaagcccaccttggctacacgcacagcccaaccagaccatacccaggctccaacgaagcaggaagcaggtggtggctttgtgctgcccccgcctggcactgaccttgtgtttttacgggaaggcgcaagcagtcctgtgcaggtgccgggccctgttgcagcttccacagaagccctgttgcaggaggcccagtgctctggcctgagttgggttgtggccttaccccaggtgaagcaagagaaggcggatacccaggacgagtggacaccaggcacagctgtcctgacttctcccgtattggtgcctggctgccctagcaaggcagtagacccaggcctgccttctgtgaagcaagagccacctgacccagaggaggacaaggaggagaacaaggatgattctgcctccaaattggccccagaggaagagatcacggagattttcagcctgggtggaacccgcttccgagatacagcagtctggttgccaaggtccaaagaccttaaaaaacctggagctagaaagcagtagactggaggcttctacagactgtaggattcaaggtgatatttgcagactggctttatgagagacaacactgatctactaggggctggaccctagattggttgccagggcttgtgtgtgaatcaaccctaggaggaaaaacctactaccaaaccagaagagcaggcctaagagtactttgagcttctagaagaagtaagcgggaaaggaagagaaagagtagaaagttggtgcatcttctcctccccaagagcctgagtataagaagttggattttaagggtgggggagctgggttggagaaaggtaatataattaaagccaccacaaaacaacctaaacaagccatgttcatgagtaattgtaagtggcttctggatgagacctggcagtgtctctacatacttcctcagggagatagcaattgaaaatgtaattgaataaataaggaaaggaactgcta

SEQ ID NO: 153299 - DNA, 2473 bp, Homo sapiens
  Payload ID: 10156
  Gene Symbol: MBD1
  Gene Name: methyl-CpG binding domain protein 1
  Uniprot ID: Q9UIS9
  ENST ID: ENST00000457839
  CDS Start-End: 130-2022
aggaggaggaaggggaggagggcgaggcgggaggtgcaggagggaccctcgccatgggtccacgggcctagagtggcggaagataccggcctggtgccaaactggctactgctgcttcctgtggcctccatggctgaggactggctggactgcccggccctgggccctggctggaagcgccgcgaagtctttcgcaagtcaggggccacctgtggacgctcagacacctattaccagagccccacaggagacaggatccgaagcaaagttgagctgactcgatacctgggccctgcgtgtgatctcaccctcttcgacttcaaacaaggcatcttgtgctatccagcccccaaggcccatcccgtggcggttgccagcaagaagcgaaagaagccttcaaggccagccaagactcggaaacgtcaggttggaccccagagtggtgaggtcaggaaggaggccccgagggatgagaccaaggctgacactgacacagccccagcttcattccctgctcctgggtgctgtgagaactgtggaatcagcttctcaggggatggcacccaaaggcagcggctcaaaacgttgtgcaaagactgtcgagcacagagaattgccttcaaccgggaacagagaatgtttaagcgtgtgggctgtggggagtgtgcagcctgccaggtaacagaagactgtggggcctgctccacctgcctcctgcagctgccccatgatgtggcatcggggctgttctgcaagtgtgaacggagacgctgcctccggattgtggaaaggagccgagggtgtggagtatgccggggctgtcagacccaagaggattgtggccattgccccatctgccttcgccctccccgccctggtctcaggcgccagtggaaatgtgtccagcgacgttgcctacggcaccttgctcaccgcctgcgtcgccgtcatcagagatgtcagcgacgcactcccctggctgtggctcccccaactggtaaacatgcccgccgcaagggaggctgtgactccaagatggctgccaggcggcgccccggagcccagccactgcctccaccacccccatcacagtccccagagcccacagagccgcaccccagagccctggccccctcgccacctgccgagttcatctattactgtgtagacgaggacgagctacagccctacacgaaccgccggcagaaccgcaagtgcggggcctgtgcagcctgcctacggcggatggactgtggccgctgcgacttctgctgcgacaagcccaaattcgggggcagcaaccagaagcgccagaagtgtcgttggcgccaatgcctgcagtttgccatgaagcggctgctgcccagtgtctggtcagagtctgaggatggggcaggatcgcccccaccttaccgtcgtcgaaagaggcccagctctgcccgacggcaccatcttggccctaccttgaagcccaccttggctacacgcacagcccaaccagaccatacccaggctccaacgaagcaggaagcaggtggtggctttgtgctgcccccgcctggcactgaccttgtgtttttacgggaaggcgcaagcagtcctgtgcaggtgccgggccctgttgcagcttccacagaagccctgttgcaggaggcccagtgctctggcctgagttgggttgtggccttaccccaggtgaagcaagagaaggcggatacccaggacgagtggacaccaggcacagctgtcctgacttctcccgtattggtgcctggctgccctagcaaggcagtagacccaggcctgccttctgtgaagcaagagccacctgacccagaggaggacaaggaggagaacaaggatgattctgcctccaaattggccccagaggaagaggcaggaggggctggcacacccgtgatcacggagattttcagcctgggtggaacccgcttccgagatacagcagtctggttgccaaggtccaaagaccttaaaaaacctggagctagaaagcagtagactggaggcttctacagactgtaggattcaaggtgatatttgcagactggctttatgagagacaacactgatctactaggggctggaccctagattggttgccagggcttgtgtgtgaatcaaccctaggaggaaaaacctactaccaaaccagaagagcaggcctaagagtactttgagcttctagaagaagtaagcgggaaaggaagagaaagagtagaaagttggtgcatcttctcctccccaagagcctgagtataagaagttggattttaagggtgggggagctgggttggagaaaggtaatataattaaagccaccacaaaacaacctaaacaagccatgttcatgagtaattgtaagtggcttctggatgagacctggcagtgtctctacatacttcctcagggagatagcaattgaaaatgtaattgaataaataaggaaagg

SEQ ID NO: 153300 - DNA, 749 bp, Homo sapiens
  Payload ID: 10156
  Gene Symbol: MBD1
  Gene Name: methyl-CpG binding domain protein 1
  ENST ID: ENST00000590215
  CDS Start-End: 335-469
ctcggcaggggggcgcgcgcaccgctgcggagcgccggcccgtaggcgcgggagcctccctattaagggcacgcgacatcgaggcaatagtgcgcaggtgcttagccagaggcggagcccgagaggcaggcagcggacttccggttccgggagcaacgaacagccgcggaggcgacagctaccgcttcagaggaggcggccgcggaggaggaggaaggggaggagggcgaggcgggaggtgcaggagggaccctcgccatgggtccacgggcctagagtggcggaagataccggcctggtgccaaactggctactgctgcttcctgtggcctccatggctgaggactggctggactgcccggccctgggccctggctggaagcgccgcgaagtctttcgcaagtcaggggccacctgtggacgctcagacacctattaccagaggagacaggatccgaagcaaagttgagctgactcgatacctgggccctgcgtgtgatctcaccctcttcgacttcaaacaaggcatcttgtgctatccagcccccaaggcccatcccgtggcggttgccagcaagaagcgaaagaagccttcaaggccagccaagactcggaaacgtcaggttggaccccagagtggtgaggtcaggaaggaggccccgagggatgagaccaaggctgacactgacacagccccagcttcattccctgctcctgggtgctgtgagaactgtggaatcagcttctca

SEQ ID NO: 153301 - DNA, 1611 bp, Homo sapiens
  Payload ID: 10156
  Gene Symbol: MBD1
  Gene Name: methyl-CpG binding domain protein 1
  Uniprot ID: Q9UIS9
  ENST ID: ENST00000591535
  CDS Start-End: 1-1611
atggctgaggactggctggactgcccggccctgggccctggctggaagcgccgcgaagtctttcgcaagtcaggggccacctgtggacgctcagacacctattaccagagccccacaggagacaggatccgaagcaaagttgagctgactcgatacctgggccctgcgtgtgatctcaccctcttcgacttcaaacaaggcatcttgtgctatccagcccccaaggcccatcccgtggcggttgccagcaagaagcgaaagaagccttcaaggccagccaagactcggaaacgtcaggttggaccccagagtggtgaggtcaggaaggaggccccgagggatgagaccaaggctgacactgacacagccccagcttcattccctgctcctgggtgctgtgagaactgtggaatcagcttctcaggggatggcacccaaaggcagcggctcaaaacgttgtgcaaagactgtcgagcacagagaattgccttcaaccgggaacagagaatgtttaagcgtgtgggctgtggggagtgtgcagcctgccaggtaacagaagactgtggggcctgctccacctgcctcctgcagctgccccatgatgtggcatcggggctgttctgcaagtgtgaacggagacgctgcctccggattgtggaaaggagccgagggtgtggagtatgccggggctgtcagacccaagaggattgtggccattgccccatctgccttcgccctccccgccctggtctcaggcgccagtggaaatgtgtccagcgacgttgcctacggggtaaacatgcccgccgcaagggaggctgtgactccaagatggctgccaggcggcgccccggagcccagccactgcctccaccacccccatcacagtccccagagcccacagagccgcagccctacacgaaccgccggcagaaccgcaagtgcggggcctgtgcagcctgcctacggcggatggactgtggccgctgcgacttctgctgcgacaagcccaaattcgggggcagcaaccagaagcgccagaagtgtcgttggcgccaatgcctgcagtttgccatgaagcggctgctgcccagtgtctggtcagagtctgaggatggggcaggatcgcccccaccttaccgtcgtcgaaagaggcccagctctgcccgacggcaccatcttggccctaccttgaagcccaccttggctacacgcacagcccaaccagaccatacccaggctccaacgaagcaggaagcaggtggtggctttgtgctgcccccgcctggcactgaccttgtgtttttacgggaaggcgcaagcagtcctgtgcaggtgccgggccctgttgcagcttccacagaagccctgttgcaggcagtagacccaggcctgccttctgtgaagcaagagccacctgacccagaggaggacaaggaggagaacaaggatgattctgcctccaaattggccccagaggaagaggcaggaggggctggcacacccgtgatcacggagattttcagcctgggtggaacccgcttccgagatacagcagtctggttgccaaggtccaaagaccttaaaaaacctggagctagaaagcagtag

SEQ ID NO: 153302 - DNA, 2532 bp, Homo sapiens
  Payload ID: 10156
  Gene Symbol: MBD1
  Gene Name: methyl-CpG binding domain protein 1
  Uniprot ID: Q9UIS9
  ENST ID: ENST00000585672
  CDS Start-End: 123-1826
ggaaggggaggagggcgaggcgggaggtgcaggagggaccctcgccatgggtccacgggcctagagtggcggaagataccggcctggtgccaaactggctactgctgcttcctgtggcctccatggctgaggactggctggactgcccggccctgggccctggctggaagcgccgcgaagtctttcgcaagtcaggggccacctgtggacgctcagacacctattaccagagccccacaggagacaggatccgaagcaaagttgagctgactcgatacctgggccctgcgtgtgatctcaccctcttcgacttcaaacaaggcatcttgtgctatccagcccccaaggcccatcccgtggcggttgccagcaagaagcgaaagaagccttcaaggccagccaagactcggaaacgtcaggttggaccccagagtggtgaggtcaggaaggaggccccgagggatgagaccaaggctgacactgacacagccccagcttcattccctgctcctgggtgctgtgagaactgtggaatcagcttctcaggggatggcacccaaaggcagcggctcaaaacgttgtgcaaagactgtcgagcacagagaattgccttcaaccgggaacagagaatgtttaagagccgagggtgtggagtatgccggggctgtcagacccaagaggattgtggccattgccccatctgccttcgccctccccgccctggtctcaggcgccagtggaaatgtgtccagcgacgttgcctacggggtaaacatgcccgccgcaagggaggctgtgactccaagatggctgccaggcggcgccccggagcccagccactgcctccaccacccccatcacagtccccagagcccacagagccgcaccccagagccctggccccctcgccacctgccgagttcatctattactgtgtagacgaggacgagctaccctacacgaaccgccggcagaaccgcaagtgcggggcctgtgcagcctgcctacggcggatggactgtggccgctgcgacttctgctgcgacaagcccaaattcgggggcagcaaccagaagcgccagaagtgtcgttggcgccaatgcctgcagtttgccatgaagcggctgctgcccagtgtctggtcagagtctgaggatggggcaggatcgcccccaccttaccgtcgtcgaaagaggcccagctctgcccgacggcaccatcttggccctaccttgaagcccaccttggctacacgcacagcccaaccagaccatacccaggctccaacgaagcaggaagcaggtggtggctttgtgctgcccccgcctggcactgaccttgtgtttttacgggaaggcgcaagcagtcctgtgcaggtgccgggccctgttgcagcttccacagaagccctgttgcaggaggcccagtgctctggcctgagttgggttgtggccttaccccaggtgaagcaagagaaggcggatacccaggacgagtggacaccaggcacagctgtcctgacttctcccgtattggtgcctggctgccctagcaaggcagtagacccaggcctgccttctgtgaagcaagagccacctgacccagaggaggacaaggaggagaacaaggatgattctgcctccaaattggccccagaggaagaggcaggaggggctggcacacccgtgatcacggagattttcagcctgggtggaacccgcttccgagatacagcagtctggttgccaaggtattaccaccttgctcttgactggaaatgcaactgtggttaccacctgtgctgcaggtccgtcctggttccctgatttgtgtttcctgttctgcctggatcctgattctcagaaaccagttactggacttctgatccacatcctgaccctggtccactgtgaccctcagactcttaattatgctccaccaggtcgtgccactgccccactagtccatttgatctgcccccatcctaggatatcctgagtctaagccctggtttctgccaatggcaaataggaagattttattaacaggttttaaaaaattattattattactggttatttggtttgacaaggcacttaggctccctgagctttgccttagctggaaaataaggatagtattacttgctattctatcaaccctgtaagatatttgcggccacgcgcggtagcgcaccctgtaattccaacactttgggaggccggcgggaggggcagtggggaggatcgcttgaacccaggagcaggagttccagcctgagcaacatagcgggaccccctgtctcttcaaaatttgtttttaaattagcagggcgtggtggcgcaggctttgtagtcccagatactctggaggctgaggcccaggaggacgaggctgcagggagccatgatcacgccactgcactccaccctgggcgacagagcgagaccttgtctcagaaaaaatctgtgaggttaaaaggctgtgtgtgtgaaaatatcttggaaattgtaaagaactacacaaatataa

SEQ ID NO: 153303 - DNA, 767 bp, Homo sapiens
  Payload ID: 10156
  Gene Symbol: MBD1
  Gene Name: methyl-CpG binding domain protein 1
  ENST ID: ENST00000589733
  CDS Start-End: 1-767
tgagaactgtggaatcagcttctcaggggatggcacccaaaggcagcggctcaaaacgttgtgcaaagactgtcgagcacagagaattgccttcaaccgggaacagagaatgtttaagcgtgtgggctgtggggagtgtgcagcctgccaggtaacagaagactgtggggcctgctccacctgcctcctgcagctgccccatgatgtggcatcggggctgttctgcaagtgtgaacggagacgctgcctccggattgtggaaaggagccgagggtgtggagtatgccggggctgtcagacccaagaggattgtggccattgccccatctgccttcgccctccccgccctggtctcaggcgccagtggaaatgtgtccagcgacgttgcctacggggtaaacatgcccgccgcaagggaggctgtgactccaagatggctgccaggcggcgccccggagcccagccactgcctccaccacccccatcacagtccccagagcccacagagccgaagcggctgctgcccagtgtctggtcagagtctgaggatggggcaggatcgcccccaccttaccgtcgtcgaaagaggcccagctctgcccgacggcaccatcttggccctaccttgaagcccaccttggctacacgcacagcccaaccagaccatacccaggctccaacgaagcaggaagcaggtggtggctttgtgctgcccccgcctggcactgaccttgtgtttttacgggaaggcgcaagcagtcctgtgc

SEQ ID NO: 153304 - DNA, 836 bp, Homo sapiens
  Payload ID: 10156
  Gene Symbol: MBD1
  Gene Name: methyl-CpG binding domain protein 1
  ENST ID: ENST00000589541
  CDS Start-End: 1-723
tcacagtccccagagcccacagagccgcaccccagagccctggccccctcgccacctgccgagttcatctattactgtgtagacgaggacgagctaaagcggctgctgcccagtgtctggtcagagtctgaggatggggcaggatcgcccccaccttaccgtcgtcgaaagaggcccagctctgcccgacggcaccatcttggccctaccttgaagcccaccttggctacacgcacagcccaaccagaccatacccaggctccaacgaagcaggaagcaggtggtggctttgtgctgcccccgcctggcactgaccttgtgtttttacgggaaggcgcaagcagtcctgtgcaggtgccgggccctgttgcagcttccacagaagccctgttgcaggtgaagcaagagaaggcggatacccaggacgagtggacaccaggcacagctgtcctgacttctcccgtattggtgcctggctgccctagcaaggcagtagacccaggcctgccttctgtgaagcaagagccacctgacccagaggaggacaaggaggagaacaaggatgattctgcctccaaattggccccagaggaagaggcaggaggggctggcacacccgtgatcacggagattttcagcctgggtggaacccgcttccgagatacagcagtctggttgccaaggtccaaagaccttaaaaaacctggagctagaaagcagtagactggaggcttctacagactgtaggattcaagtctgcagggcaggcactcgggaagggaagatggatgtaaagtgtgggagaccgaggacacagtggagcccacgagcacgag

SEQ ID NO: 153305 - DNA, 4905 bp, Homo sapiens
  Payload ID: 10156
  Gene Symbol: MBD1
  Gene Name: methyl-CpG binding domain protein 1
  Uniprot ID: Q9UIS9
  ENST ID: ENST00000591416
  CDS Start-End: 433-2250
gcatgcgccagctagatgggcagcgaggagagccgcaactgccagtccctcgaaggggttagctgtcgttgaacgtcagcacgcagatgcaactggctctcggcaggggggcgcgcgcaccgctgcggagcgccggcccgtaggcgcgggagcctccctattaagggcacgcgacatcgaggcaatagtgcgcaggtgcttagccagaggcggagcccgagaggcaggcagcggacttccggttccgggagcaacgaacagccgcggaggcgacagctaccgcttcagaggaggcggccgcggaggaggaggaaggggaggagggcgaggcgggaggtgcaggagggaccctcgccatgggtccacgggcctagagtggcggaagataccggcctggtgccaaactggctactgctgcttcctgtggcctccatggctgaggactggctggactgcccggccctgggccctggctggaagcgccgcgaagtctttcgcaagtcaggggccacctgtggacgctcagacacctattaccagagccccacaggagacaggatccgaagcaaagttgagctgactcgatacctgggccctgcgtgtgatctcaccctcttcgacttcaaacaaggcatcttgtgctatccagcccccaaggcccatcccgtggcggttgccagcaagaagcgaaagaagccttcaaggccagccaagactcggaaacgtcaggttggaccccagagtggtgaggtcaggaaggaggccccgagggatgagaccaaggctgacactgacacagccccagcttcattccctgctcctgggtgctgtgagaactgtggaatcagcttctcaggggatggcacccaaaggcagcggctcaaaacgttgtgcaaagactgtcgagcacagagaattgccttcaaccgggaacagagaatgtttaagcgtgtgggctgtggggagtgtgcagcctgccaggtaacagaagactgtggggcctgctccacctgcctcctgcagctgccccatgatgtggcatcggggctgttctgcaagtgtgaacggagacgctgcctccggattgtggaaaggagccgagggtgtggagtatgccggggctgtcagacccaagaggattgtggccattgccccatctgccttcgccctccccgccctggtctcaggcgccagtggaaatgtgtccagcgacgttgcctacggggtaaacatgcccgccgcaagggaggctgtgactccaagatggctgccaggcggcgccccggagcccagccactgcctccaccacccccatcacagtccccagagcccacagagccgcaccccagagccctggccccctcgccacctgccgagttcatctattactgtgtagacgaggacgagctacagccctacacgaaccgccggcagaaccgcaagtgcggggcctgtgcagcctgcctacggcggatggactgtggccgctgcgacttctgctgcgacaagcccaaattcgggggcagcaaccagaagcgccagaagtgtcgttggcgccaatgcctgcagtttgccatgaagcggctgctgcccagtgtctggtcagagtctgaggatggggcaggatcgcccccaccttaccgtcgtcgaaagaggcccagctctgcccgacggcaccatcttggccctaccttgaagcccaccttggctacacgcacagcccaaccagaccatacccaggctccaacgaagcaggaagcaggtggtggctttgtgctgcccccgcctggcactgaccttgtgtttttacgggaaggcgcaagcagtcctgtgcaggtgccgggccctgttgcagcttccacagaagccctgttgcaggaggcccagtgctctggcctgagttgggttgtggccttaccccaggtgaagcaagagaaggcggatacccaggacgagtggacaccaggcacagctgtcctgacttctcccgtattggtgcctggctgccctagcaaggcagtagacccaggcctgccttctgtgaagcaagagccacctgacccagaggaggacaaggaggagaacaaggatgattctgcctccaaattggccccagaggaagaggcaggaggggctggcacacccgtgatcacggagattttcagcctgggtggaacccgcttccgagatacagcagtctggttgccaaggtccaaagaccttaaaaaacctggagctagaaagcagtagactggaggcttctacagactgtaggattcaaggtgatatttgcagactggctttatgagagacaacactgatctactaggggctggaccctagattggttgccagggcttgtgtgtgaatcaaccctaggaggaaaaacctactaccaaaccagaagagcaggcctaagagtactttgagcttctagaagaagtaagcgggaaaggaagagaaagagtagaaagttggtgcatcttctcctccccaagagcctgagtataagaagttggattttaagggtgggggagctgggttggagaaaggtaatataattaaagccaccacaaaacaacctaaacaagccatgttcatgagtaattgtaagtggcttctggatgagacctggcagtgtctctacatacttcctcagggagatagcaattgaaaatgtaattgaataaataaggaaaggaactgctatttggtgtgttcctctgtggacccagtttatttaatccttaaaataatatttttgggaagacattgattttgtccatttatgtggatgggaaaactgagactcattaatttgtccaatgtcgaacagctggtgttagtagagcctagactcaaacccagcttttaaagcccttgttctttactccactaaactgtaacctgtaatcctgtatgcactaacaggagttttcggtgaccttgaaaacacagattactataattactataataaatcccttacattcctgtctctagcatggtttagggagtgccaaggctcaatgtagatggggtcaccttgtcagagcatctgttcatacagaaactgggtttcctgcagaccccaggtgctgcataggattcctcaaaccctacaggatatatctccccactggctgctgtccattttgcttgttaccctgactccccctcttcagccagagcagtctttgtaactaaagctgccagcctggctcatctttcctgacaacgtgcatctcctgccctgtgatcacctttgtgcttggctcctgccctcagcctgaatgtgttctaggaggctgaattcctgcttcgagtcctgcccaagagccagtcttggctcagccctacctcactctctcccaattcttcattcataaagtgccaaaaagattagacctgtaatttgttagccagctttacagggccaggactgagtgagtgcctccttaaactttgtatcctgtgtgcctcccttgccttaccctagtcccagccctgcagctttaagtaattcagacatggattagccatttcccagttctgtctcatacagtccagcctctgccaccttccccaccccttcctttattccatcctaactagttcagccctagtcaagactggatagactgatactgctttgtttcccccaggaaccaaccacccaaccccagtattctggtaattttgacaatgatctatatgaaatttatttgattgacatttagactcatgagttaagcttctgctgaccatttatgttagggtacaatcagaggagcagaaccactaagataaagattatgtatatatgtattttaagggatttattatagggatctgaccgcatgccattgtgggagctggttaaacagtctctgtaaggctgttgtctttgcatctaatgctggagcttgaagtctgcagggcaggcactcgggaagggaagatggatgtaaagtgtgggagaccgaggacacagtggagcccacgagcacgagctggaacccacgaggatggcctggaacccatgtcagtctctcaccacctccagcttcgatgatgtgggtgtcctgcagaagaagctggtgcccttcctcacagagttaaatatgcatctggcccaggaattagagaagctgaaaggatgatcctggggaaggtggagcagctgcaggcctggctgcaggcctgactactgcccacaccaacgaggtgatctagcagatacatggcaacgtgtgaactgcaacaacgcctggtgccccagcaccaaccttccaagtgtaaaaacaatgtgctgctgcttcacttccgccctccggttatcaagcaaaatgtctcttgtggcccatcttactggaagagagttccgggaaacatagcctcaccaaggtgacacattacaaagccaccctaccatgaatccgctcccaagggtctcactgctcacctgaggataactcaatataactatgtggctgaaaatgcaaagctgaagaccatggatttcatggtgattccagcaagtacagagattctatgaagcccacccagaaaaaacttgctggtcctggctatttttgtgtcatttattcaagtattgagaacctggcctgtggtaggcactgtacttaatactaggatacagaaatgcaaaagatacggcccatgcaattttattaaatgcatcaatatgtattacaaatggtgaatggatttccaactttatcatggaatttaatgctgaatatatagaattcagaaaattgttgggaggacagcccttttgtgaaccttgtttggggcacagtaggaattggaaataatttagtttctatctctaagctgttctattttaaaattatttttaaatttttattgtcccactta

SEQ ID NO: 153306 - DNA, 1952 bp, Homo sapiens
  Payload ID: 10156
  Gene Symbol: MBD1
  Gene Name: methyl-CpG binding domain protein 1
  ENST ID: ENST00000592060
  CDS Start-End: 1-1250
cccatcccgtggcggttgccagcaagaagcgaaagaagccttcaaggccagccaagactcggaaacgtcaggttggaccccagagtggtgaggtcaggaaggaggccccgagggatgagaccaaggctgacactgacacagccccagcttcattccctgctcctgggtgctgtgagaactgtggaatcagcttctcaggggatggcacccaaaggcagcggctcaaaacgttgtgcaaagactgtcgagcacagagaattgccttcaaccgggaacagagaatgtttaagagccgagggtgtggagtatgccggggctgtcagacccaagaggattgtggccattgccccatctgccttcgccctccccgccctggtctcaggcgccagtggaaatgtgtccagcgacgttgcctacggcaccttgctcaccgcctgcgtcgccgtcatcagagatgtcagcgacgcactcccctggctgtggctcccccaactggtaaacatgcccgccgcaagggaggctgtgactccaagatggctgccaggcggcgccccggagcccagccactgcctccaccacccccatcacagtccccagagcccacagagccgcaccccagagccctggccccctcgccacctgccgagttcatctattactgtgtagacgaggacgagctaaagcggctgctgcccagtgtctggtcagagtctgaggatggggcaggatcgcccccaccttaccgtcgtcgaaagaggcccagctctgcccgacggcaccatcttggccctaccttgaagcccaccttggctacacgcacagcccaaccagaccatacccaggctccaacgaagcaggaagcaggtggtggctttgtgctgcccccgcctggcactgaccttgtgtttttacgggaaggcgcaagcagtcctgtgcaggtgccgggccctgttgcagcttccacagaagccctgttgcaggcagtagacccaggcctgccttctgtgaagcaagagccacctgacccagaggaggacaaggaggagaacaaggatgattctgcctccaaattggccccagaggaagaggcaggaggggctggcacacccgtgatcacggagattttcagcctgggtggaacccgcttccgagatacagcagtctggttgccaaggtattaccaccttgctcttgactggaaatgcaactgtggttaccacctgtgctgcaggtccgtcctggttccctgatttgtgtttcctgttctgcctggatcctgattctcagaaaccagttactggacttctgatccacatcctgaccctggtccactgtgaccctcagactcttaattatgctccaccaggtcgtgccactgccccactagtccatttgatctgcccccatcctaggatatcctgagtctaagccctggtttctgccaatggcaaataggaagattttattaacaggttttaaaaaattattattattactggttatttggtttgacaaggcacttaggctccctgagctttgccttagctggaaaataaggatagtattacttgctattctatcaaccctgtaagatatttgcggccacgcgcggtagcgcaccctgtaattccaacactttgggaggccggcgggaggggcagtggggaggatcgcttgaacccaggagcaggagttccagcctgagcaacatagcgggaccccctgtctcttcaaaatttgtttttaaattagcagggcgtggtggcgcaggctttgtagtcccagatactctggaggctgaggcccaggaggacgaggctgcagggagccatgatcacgccactgcactccaccctgggcgacagagcgagaccttgtctcagaaaaaatctgtgaggttaaaaggctgtgtgtgtgaaaatatcttggaaattgtaaagaactacacaaat

SEQ ID NO: 153307 - DNA, 1761 bp, Homo sapiens
  Payload ID: 10156
  Gene Symbol: MBD1
  Gene Name: methyl-CpG binding domain protein 1
  Uniprot ID: Q9UIS9
  ENST ID: ENST00000588937
  CDS Start-End: 1-1761
atggctgaggactggctggactgcccggccctgggccctggctggaagcgccgcgaagtctttcgcaagtcaggggccacctgtggacgctcagacacctattaccagagccccacaggagacaggatccgaagcaaagttgagctgactcgatacctgggccctgcgtgtgatctcaccctcttcgacttcaaacaaggcatcttgtgctatccagcccccaaggcccatcccgtggcggttgccagcaagaagcgaaagaagccttcaaggccagccaagactcggaaacgtcaggttggaccccagagtggtgaggtcaggaaggaggccccgagggatgagaccaaggctgacactgacacagccccagcttcattccctgctcctgggtgctgtgagaactgtggaatcagcttctcaggggatggcacccaaaggcagcggctcaaaacgttgtgcaaagactgtcgagcacagagaattgccttcaaccgggaacagagaatgtttaagcgtgtgggctgtggggagtgtgcagcctgccaggtaacagaagactgtggggcctgctccacctgcctcctgcagctgccccatgatgtggcatcggggctgttctgcaagtgtgaacggagacgctgcctccggattgtggaaaggagccgagggtgtggagtatgccggggctgtcagacccaagaggattgtggccattgccccatctgccttcgccctccccgccctggtctcaggcgccagtggaaatgtgtccagcgacgttgcctacggggtaaacatgcccgccgcaagggaggctgtgactccaagatggctgccaggcggcgccccggagcccagccactgcctccaccacccccatcacagtccccagagcccacagagccgcagccctacacgaaccgccggcagaaccgcaagtgcggggcctgtgcagcctgcctacggcggatggactgtggccgctgcgacttctgctgcgacaagcccaaattcgggggcagcaaccagaagcgccagaagtgtcgttggcgccaatgcctgcagtttgccatgaagcggctgctgcccagtgtctggtcagagtctgaggatggggcaggatcgcccccaccttaccgtcgtcgaaagaggcccagctctgcccgacggcaccatcttggccctaccttgaagcccaccttggctacacgcacagcccaaccagaccatacccaggctccaacgaagcaggaagcaggtggtggctttgtgctgcccccgcctggcactgaccttgtgtttttacgggaaggcgcaagcagtcctgtgcaggtgccgggccctgttgcagcttccacagaagccctgttgcaggcagtagacccaggcctgccttctgtgaagcaagagccacctgacccagaggaggacaaggaggagaacaaggatgattctgcctccaaattggccccagaggaagaggcaggaggggctggcacacccgtgatcacggagattttcagcctgggtggaacccgcttccgagatacagcagtctggttgccaagtctgcagggcaggcactcgggaagggaagatggatgtaaagtgtgggagaccgaggacacagtggagcccacgagcacgagctggaacccacgaggatggcctggaacccatgtcagtctctcaccacctccagcttcgatgatgtgggtgtcctgcagaagaagctggtgcccttcctcacagagttaa

SEQ ID NO: 153308 - DNA, 1945 bp, Homo sapiens
  Payload ID: 10156
  Gene Symbol: MBD1
  Gene Name: methyl-CpG binding domain protein 1
  Uniprot ID: Q9UIS9
  ENST ID: ENST00000587605
  CDS Start-End: 219-1826
atgcgccagctagatgggcagcgaggagagccgcaactgccagtccctcgaaggggttagctgtcgttgaacgtcagcacgcagatgcaactggctctcggcaggggggcgcgcgcaccgctgcggagcgccggcccgtaggcgcgggagcctccctattaagggcacgcgacatcgaggcaatagtgcgcaggctactgctgcttcctgtggcctccatggctgaggactggctggactgcccggccctgggccctggctggaagcgccgcgaagtctttcgcaagtcaggggccacctgtggacgctcagacacctattaccagagccccacaggagacaggatccgaagcaaagttgagctgactcgatacctgggccctgcgtgtgatctcaccctcttcgacttcaaacaaggcatcttgtgctatccagcccccaaggcccatcccgtggcggttgccagcaagaagcgaaagaagccttcaaggccagccaagactcggaaacgtcaggttggaccccagagtggtgaggtcaggaaggaggccccgagggatgagaccaaggctgacactgacacagccccagcttcattccctgctcctgggtgctgtgagaactgtggaatcagcttctcaggggatggcacccaaaggcagcggctcaaaacgttgtgcaaagactgtcgagcacagagaattgccttcaaccgggaacagagaatgtttaagcgtgtgggctgtggggagtgtgcagcctgccaggtaacagaagactgtggggcctgctccacctgcctcctgcagctgccccatgatgtggcatcggggctgttctgcaagtgtgaacggagacgctgcctccggattgtggaaaggagccgagggtgtggagtatgccggggctgtcagacccaagaggattgtggccattgccccatctgccttcgccctccccgccctggtctcaggcgccagtggaaatgtgtccagcgacgttgcctacggggtaaacatgcccgccgcaagggaggctgtgactccaagatggctgccaggcggcgccccggagcccagccactgcctccaccacccccatcacagtccccagagcccacagagccgcaccccagagccctggccccctcgccacctgccgagttcatctattactgtgtagacgaggacgagctaaagcggctgctgcccagtgtctggtcagagtctgaggatggggcaggatcgcccccaccttaccgtcgtcgaaagaggcccagctctgcccgacggcaccatcttggccctaccttgaagcccaccttggctacacgcacagcccaaccagaccatacccaggctccaacgaagcaggaagcaggtggtggctttgtgctgcccccgcctggcactgaccttgtgtttttacgggaaggcgcaagcagtcctgtgcaggtgccgggccctgttgcagcttccacagaagccctgttgcaggcagtagacccaggcctgccttctgtgaagcaagagccacctgacccagaggaggacaaggaggagaacaaggatgattctgcctccaaattggccccagaggaagaggcaggaggggctggcacacccgtgatcacggagattttcagcctgggtggaacccgcttccgagatacagcagtctggttgccaagggcaggcactcgggaagggaagatggatgtaaagtgtgggagaccgaggacacagtggagcccacgagcacgagctggaacccacgaggatggcctggaacccatgtcagtctctcaccacctccagcttcgatgatgtgggtgtcctgcagaagaagctggtgcccttcctcacagagttaaatatgcatctggcccaggaattagagaagctgaaaggatgatcctggggaaggtggagcagctgcaggcctg

SEQ ID NO: 153309 - DNA, 2179 bp, Homo sapiens
  Payload ID: 10156
  Gene Symbol: MBD1
  Gene Name: methyl-CpG binding domain protein 1
  Uniprot ID: Q9UIS9
  ENST ID: ENST00000585595
  CDS Start-End: 170-2062
attgtggctcagaacgctgacggggaggaatgaagggccctcaggccgataagggggaggaatggcggcgtcggaatactgacgaggagaaatggggggatttaggctgaggacgggaaggaatgcagctctgaactctgacaggctactgctgcttcctgtggcctccatggctgaggactggctggactgcccggccctgggccctggctggaagcgccgcgaagtctttcgcaagtcaggggccacctgtggacgctcagacacctattaccagagccccacaggagacaggatccgaagcaaagttgagctgactcgatacctgggccctgcgtgtgatctcaccctcttcgacttcaaacaaggcatcttgtgctatccagcccccaaggcccatcccgtggcggttgccagcaagaagcgaaagaagccttcaaggccagccaagactcggaaacgtcaggttggaccccagagtggtgaggtcaggaaggaggccccgagggatgagaccaaggctgacactgacacagccccagcttcattccctgctcctgggtgctgtgagaactgtggaatcagcttctcaggggatggcacccaaaggcagcggctcaaaacgttgtgcaaagactgtcgagcacagagaattgccttcaaccgggaacagagaatgtttaagcgtgtgggctgtggggagtgtgcagcctgccaggtaacagaagactgtggggcctgctccacctgcctcctgcagctgccccatgatgtggcatcggggctgttctgcaagtgtgaacggagacgctgcctccggattgtggaaaggagccgagggtgtggagtatgccggggctgtcagacccaagaggattgtggccattgccccatctgccttcgccctccccgccctggtctcaggcgccagtggaaatgtgtccagcgacgttgcctacggcaccttgctcaccgcctgcgtcgccgtcatcagagatgtcagcgacgcactcccctggctgtggctcccccaactggtaaacatgcccgccgcaagggaggctgtgactccaagatggctgccaggcggcgccccggagcccagccactgcctccaccacccccatcacagtccccagagcccacagagccgcaccccagagccctggccccctcgccacctgccgagttcatctattactgtgtagacgaggacgagctacagccctacacgaaccgccggcagaaccgcaagtgcggggcctgtgcagcctgcctacggcggatggactgtggccgctgcgacttctgctgcgacaagcccaaattcgggggcagcaaccagaagcgccagaagtgtcgttggcgccaatgcctgcagtttgccatgaagcggctgctgcccagtgtctggtcagagtctgaggatggggcaggatcgcccccaccttaccgtcgtcgaaagaggcccagctctgcccgacggcaccatcttggccctaccttgaagcccaccttggctacacgcacagcccaaccagaccatacccaggctccaacgaagcaggaagcaggtggtggctttgtgctgcccccgcctggcactgaccttgtgtttttacgggaaggcgcaagcagtcctgtgcaggtgccgggccctgttgcagcttccacagaagccctgttgcaggaggcccagtgctctggcctgagttgggttgtggccttaccccaggtgaagcaagagaaggcggatacccaggacgagtggacaccaggcacagctgtcctgacttctcccgtattggtgcctggctgccctagcaaggcagtagacccaggcctgccttctgtgaagcaagagccacctgacccagaggaggacaaggaggagaacaaggatgattctgcctccaaattggccccagaggaagaggcaggaggggctggcacacccgtgatcacggagattttcagcctgggtggaacccgcttccgagatacagcagtctggttgccaaggtccaaagaccttaaaaaacctggagctagaaagcagtagactggaggcttctacagactgtaggattcaagtctgcagggcaggcactcgggaagggaagatggatgtaaagtgtgggagaccgaggacacagtggagcccacgagcacgagctgg

SEQ ID NO: 153310 - DNA, 2913 bp, Homo sapiens
  Payload ID: 10156
  Gene Symbol: MBD1
  Gene Name: methyl-CpG binding domain protein 1
  Uniprot ID: Q9UIS9
  ENST ID: ENST00000590208
  CDS Start-End: 348-2315
gatgcaactggctctcggcaggggggcgcgcgcaccgctgcggagcgccggcccgtaggcgcgggagcctccctattaagggcacgcgacatcgaggcaatagtgcgcaggtgcttagccagaggcggagcccgagaggcaggcagcggacttccggttccgggagcaacgaacagccgcggaggcgacagctaccgcttcagaggaggcggccgcggaggaggaggaaggggaggagggcgaggcgggaggtgcaggagggaccctcgccatgggtccacgggcctagagtggcggaagataccggcctggtgccaaactggctactgctgcttcctgtggcctccatggctgaggactggctggactgcccggccctgggccctggctggaagcgccgcgaagtctttcgcaagtcaggggccacctgtggacgctcagacacctattaccagagccccacaggagacaggatccgaagcaaagttgagctgactcgatacctgggccctgcgtgtgatctcaccctcttcgacttcaaacaaggcatcttgtgctatccagcccccaaggcccatcccgtggcggttgccagcaagaagcgaaagaagccttcaaggccagccaagactcggaaacgtcaggttggaccccagagtggtgaggtcaggaaggaggccccgagggatgagaccaaggctgacactgacacagccccagcttcattccctgctcctgggtgctgtgagaactgtggaatcagcttctcaggggatggcacccaaaggcagcggctcaaaacgttgtgcaaagactgtcgagcacagagaattgccttcaaccgggaacagagaatgtttaagcgtgtgggctgtggggagtgtgcagcctgccaggtaacagaagactgtggggcctgctccacctgcctcctgcagctgccccatgatgtggcatcggggctgttctgcaagtgtgaacggagacgctgcctccggattgtggaaaggagccgagggtgtggagtatgccggggctgtcagacccaagaggattgtggccattgccccatctgccttcgccctccccgccctggtctcaggcgccagtggaaatgtgtccagcgacgttgcctacggggtaaacatgcccgccgcaagggaggctgtgactccaagatggctgccaggcggcgccccggagcccagccactgcctccaccacccccatcacagtccccagagcccacagagccgcaccccagagccctggccccctcgccacctgccgagttcatctattactgtgtagacgaggacgagctacagccctacacgaaccgccggcagaaccgcaagtgcggggcctgtgcagcctgcctacggcggatggactgtggccgctgcgacttctgctgcgacaagcccaaattcgggggcagcaaccagaagcgccagaagtgtcgttggcgccaatgcctgcagtttgccatgaagcggctgctgcccagtgtctggtcagagtctgaggatggggcaggatcgcccccaccttaccgtcgtcgaaagaggcccagctctgcccgacggcaccatcttggccctaccttgaagcccaccttggctacacgcacagcccaaccagaccatacccaggctccaacgaagcaggaagcaggtggtggctttgtgctgcccccgcctggcactgaccttgtgtttttacgggaaggcgcaagcagtcctgtgcaggtgccgggccctgttgcagcttccacagaagccctgttgcaggaggcccagtgctctggcctgagttgggttgtggccttaccccaggtgaagcaagagaaggcggatacccaggacgagtggacaccaggcacagctgtcctgacttctcccgtattggtgcctggctgccctagcaaggcagtagacccaggcctgccttctgtgaagcaagagccacctgacccagaggaggacaaggaggagaacaaggatgattctgcctccaaattggccccagaggaagaggcaggaggggctggcacacccgtgatcacggagattttcagcctgggtggaacccgcttccgagatacagcagtctggttgccaagtctgcagggcaggcactcgggaagggaagatggatgtaaagtgtgggagaccgaggacacagtggagcccacgagcacgagctggaacccacgaggatggcctggaacccatgtcagtctctcaccacctccagcttcgatgatgtgggtgtcctgcagaagaagctggtgcccttcctcacagagttaaatatgcatctggcccaggaattagagaagctgaaaggatgatcctggggaaggtggagcagctgcaggcctggctgcaggcctgactactgcccacaccaacgaggtgatctagcagatacatggcaacgtgtgaactgcaacaacgcctggtgccccagcaccaaccttccaagtgtaaaaacaatgtgctgctgcttcacttccgccctccggttatcaagcaaaatgtctcttgtggcccatcttactggaagagagttccgggaaacatagcctcaccaaggtgacacattacaaagccaccctaccatgaatccgctcccaagggtctcactgctcacctgaggataactcaatataactatgtggctgaaaatgcaaagctgaagaccatggatttcatggtgattccagcaagtacagagattctatgaagcccacccagaaaaaacttgctggtcctggctatttttgtgtcatttattcaagtattgagaacctggcctgtggtaggcactgtacttaatactaggatacagaaatgcaaaagatacggcccatgcaattttattaaatgcatcaatatgtattacaaa

SEQ ID NO: 153311 - DNA, 5188 bp, Homo sapiens
  Payload ID: 10157
  Gene Symbol: MBD2
  Gene Name: methyl-CpG binding domain protein 2
  Uniprot ID: Q9UBB5
  ENST ID: ENST00000256429
  CDS Start-End: 230-1465
gggggcgtggccccgagaaggcggagacaagatggccgcccatagcgcttggaggacctaagaggcggtggccggggccacgccccgggcaggagggccgctctgtgcgcgcccgctctatgatgcttgcgcgcgtcccccgcgcgccgcgctgcgggcggggcgggtctccgggattccaagggctcggttacggaagaagcgcagcgccggctggggagggggctggatgcgcgcgcacccggggggaggccgctgctgcccggagcaggaggagggggagagtgcggcgggcggcagcggcgctggcggcgactccgccatagagcaggggggccagggcagcgcgctcgccccgtccccggtgagcggcgtgcgcagggaaggcgctcggggcggcggccgtggccgggggcggtggaagcaggcgggccggggcggcggcgtctgtggccgtggccggggccggggccgtggccggggacggggacggggccggggccggggccgcggccgtcccccgagtggcggcagcggccttggcggcgacggcggcggctgcggcggcggcggcagcggtggcggcggcgccccccggcgggagccggtccctttcccgtcggggagcgcggggccggggcccaggggaccccgggccacggagagcgggaagaggatggattgcccggccctcccccccggatggaagaaggaggaagtgatccgaaaatctgggctaagtgctggcaagagcgatgtctactacttcagtccaagtggtaagaagttcagaagcaagcctcagttggcaaggtacctgggaaatactgttgatctcagcagttttgacttcagaactggaaagatgatgcctagtaaattacagaagaacaaacagagactgcgaaacgatcctctcaatcaaaataagggtaaaccagacttgaatacaacattgccaattagacaaacagcatcaattttcaaacaaccggtaaccaaagtcacaaatcatcctagtaataaagtgaaatcagacccacaacgaatgaatgaacagccacgtcagcttttctgggagaagaggctacaaggacttagtgcatcagatgtaacagaacaaattataaaaaccatggaactacccaaaggtcttcaaggagttggtccaggtagcaatgatgagacccttttatctgctgttgccagtgctttgcacacaagctctgcgccaatcacagggcaagtctccgctgctgtggaaaagaaccctgctgtttggcttaacacatctcaacccctctgcaaagcttttattgtcacagatgaagacatcaggaaacaggaagagcgagtacagcaagtacgcaagaaattggaagaagcactgatggcagacatcttgtcgcgagctgctgatacagaagagatggatattgaaatggacagtggagatgaagcctaagaatatgatcaggtaactttcgaccgactttccccaagagaaaattcctagaaattgaacaaaaatgtttccactggcttttgcctgtaagaaaaaaaatgtacccgagcacatagagctttttaatagcactaaccaatgcctttttagatgtatttttgatgtatatatctattattcaaaaaatcatgtttattttgagtcctaggacttaaaattagtcttttgtaatatcaagcaggaccctaagatgaagctgagcttttgatgccaggtgcaatctactggaaatgtagcacttacgtaaaacatttgtttcccccacagttttaataagaacagatcaggaattctaaataaatttcccagttaaagattattgtgacttcactgtatataaacatatttttatactttattgaaaggggacacctgtacattcttccatcatcactgtaaagacaaataaatgattatattcacagactgattggaattctttctgttgaaaagcacacacaataaagaacccctcgttagccttcctctgatttacattcaactctgatccctgggccttaggtttgacatggaggtggaggaagatagcgcatatatttgcagtatgaactattgcctctggacgttgtgagaattgtgctttcaccagaatttctaagaatttctgctaaatatcacctagcatgtgtaattttttttccttgcctgtgacttggacttttgatagttctataagaataaggctttttcttcccttgggcatgagtcagatacacaaggacccttcaggtgttactagaaggcgtccatgtttattgttttttaaagaatgtttggcactctctaacgtccactagcttactgagttatcaggtgcaggtcagactcttggctacagtgagaggcagcttctagacagagttgcttaatgaaagggtttgtaatactttacaaaccattacctgtacctggcctggcctccaaaatattaacattctttttctgttgaaactcgcgagtgtaactttcataccacttgaatttattgatatttaattatgaaaactagcattacattattaaacgatttctaaaatcaaaacatacttaatctgataccaaggaagggagggagtggttataagcaaatgaaaacaaattttgagagacagagcaaaagtaaaatcattctatagaaaaggtgtgtttatttcttaactcttgagttcttttaaaattagaacctaaatgatgcagtcaggggtatgaccaattccacatgagtgtcacctgtacattttattaccactacctccagtttccaaggcagggaagaagaggggaatagtcaaagcaatatgactagctaggtttgggctgctgtttgggctgctgtttttcctggacttttatgccaaactacataaatacttcttggaattcctgatttacgctcaactttgatccctggaccctagggccattagtttccttgaagcagtcctgctggtggatgagcagggaaacttgtagaccctgggaagccaattggtagagggtgcctgcccgccccatcagactgtcccaactggggtgggggtgaggatcatagtgatttctttttaaaagctagtatgactagtgagaatggatgtccaagggcttttctcttcctcccccgagtccacgattcttcatttgtgatcagggttggggtaacttcaccttggtgatcatatattctttttacaaaccaatccagccaagatatatgtgcttttctaaacagcttgtaaaagcaaaaacacaatgtatacacatataaaactgatttttttttttttgcttatatactttgctcaggtggagaacaaggtatgaaagccattatatggtgtcccttggggaccatcccataagtccagggtgttcccaatatacccacaagacaacatgttcaaaacttcatcacctggtccccacaaacctaccaccctcttccattccctcactctggtaaaagcaagccatcttctccagttacgcaaggcagaagcccaggagtgagcacaatgctgccctttcccttgcttctgacttctcatcaatcctattagaactactgactgcaccccacctctcctccatccccacgatcactgccttcatatgaactgcctttcctgtcctctggactttcagtggcttccttttttgctcacctgtccactttcttccccttccctctctccatccctccacatagtcatcagaaagatcatcaaaacaggcaaatgtgactgtattatttccctcacttatctttgtatgcagtttagagtgatttttaagagcacacactttgaaattaggagaacctgtgtctgaatcctgatttttgccatttgtgtgacttgtcaggttatttaatctctttgagcctgtccctcctcagtgaaataggaataataatacctacctcatagagttgttgtgaggattcagtgagatagactgtttctaaagtgtgtagcacagtgcctggcacatagtgggtgctcacattggagcacactattgtcgctatccctgcaggtgtgagttttacatcctttccaagaggcatttgctaataaccctaactaccgcctatccctgtgacactattttctgcctcagcaccctatttcttttgtagacattttctaagtctgtattttatttatttgttggctttttgtctatttctctactagaatgtaagctccatgagagcaaggatgtgtttgtctgatttcccgttacagccccagcacttagctgagtgactggcacctagtaagcactcagtaactgtttgctgaataaatggaagaatggtcaaaaggctcttcttgatctgatccctgcttgtctgtctggcctcatgctgccactattcctcactgcaccttcagctcaagaaaaacctctttacttgcttctttgaagtgccccttgggcctctgtgtctttgtacctgttgttccctttgcctgaaacaccctttgcctgcccgtctacatggtgaattcctaatcattgatgaagtctcagctcaatggctacctcctctgtgaagctgtccctgatttcttcaggcagatgttctttcccgccttccctgttcccaccgcactttgtaaatacctccatggaagcactttattgtattgtattgtaatttttttttgcatgtctgtttctactattagactgtaagcaccgtaaaagcagagattgtgctttttcatcctcatgttccccgagcctagcccagtgcctggcacgtaatagcttgtcattaaatatttgttgaatgaatctgtgaatgaacaagagtcatgcagttggaaaagtgttagaagctgtatgtattataaaggaaagaaatgcccttggtggcttccagggtgtttttttttttttttttggtctaaagaggagatctagagagtgttatacaatctctttgaatataagattactcgtttggatttttaaaataatatagatcttcataaataattgcaaagatataaacaagctttgtgatttctcaaatgctatgaagtccaaaataaatatttgcactattagtatttccatagtaaatgctatgagaaaatgtacagcaataaattttgaagctttaaaactgtt

SEQ ID NO: 153312 - DNA, 1237 bp, Homo sapiens
  Payload ID: 10157
  Gene Symbol: MBD2
  Gene Name: methyl-CpG binding domain protein 2
  ENST ID: ENST00000398398
  CDS Start-End: 89-814
gcgcgccgcgctgcgggcggggcgggtctccgggattccaagggctcggttacggaagaagcgcagcgccggctggggagggggctggatgcgcgcgcacccggggggaggccgctgctgcccggagcaggaggagggggagagtgcggcgggcggcagcggcgctggcggcgactccgccatagagcaggggggccagggcagcgcgctcgccccgtccccggtgagcggcgtgcgcagggaaggcgctcggggcggcggccgtggccgggggcggtggaagcaggcgggccggggcggcggcgtctgtggccgtggccggggccggggccgtggccggggacggggacggggccggggccggggccgcggccgtcccccgagtggcggcagcggccttggcggcgacggcggcggctgcggcggcggcggcagcggtggcggcggcgccccccggcgggagccggtccctttcccgtcggggagcgcggggccggggcccaggggaccccgggccacggagagcgggaagaggatggattgcccggccctcccccccggatggaagaaggaggaagtgatccgaaaatctgggctaagtgctggcaagagcgatgtctactacttcagtccaagtggtaagaagttcagaagcaagcctcagttggcaaggtacctgggaaatactgttgatctcagcagttttgacttcagaactggaaagatgatgcctagtaaattacagaagaacaaacagagactgcgaaacgatcctctcaatcaaaataagtttgtgtgcacttttctgctctagctgcgctggaacactcatcgtcctgcaccatggcatgcgctttcaagactctgcttgctcatacgctgtttgctctgcttggaatgtgcttacccccttccccttcatctggtgaactcctactcatccaagacccagcttcattgtctccatctctgggaagcctgccctgcatactccaggcagaaccaatcctttcctccataatgcttccctggtgctttgccattgtatttgtgacttgtttgtctgcttcagctagactgtgagctccatgagggcagggaccatgtctttttttgcttttgcacacggtaggtacttaatattgctttatgtttatttgatttaccatccacctcattctagaagtgtatagtggtaataaatgtttattaaataaataaattataccgtacatta

SEQ ID NO: 153313 - DNA, 701 bp, Homo sapiens
  Payload ID: 10157
  Gene Symbol: MBD2
  Gene Name: methyl-CpG binding domain protein 2
  ENST ID: ENST00000578272
  CDS Start-End: 1-219
aacgatcctctcaatcaaaataagggtaaaccagacttgaatacaacattgccaattagacaaacagcatcaattttcaaacaaccggtaaccaaagtcacaaatcatcctagtaataaagtgaaatcagacccacaacgaatgaatgaacagccacgtcaggtgagccaggaaaacagaagatatttggagccacattggatcagcatcttgctatagatgtctcaagatttgaagttctaaacttgctttactgttggtccccaagagattcaacaggggccatcttttctgggagaagaggctacaaggacttagtgcatcagatgtaacagaacaaattataaaaaccatggaactacccaaaggtcttcaaggagttggtccaggtagcaatgatgagacccttttatctgctgttgccagtgctttgcacacaagctctgcgccaatcacagggcaagtctccgctgctgtggaaaagaaccctgctgtttggcttaacacatctcaacccctctgcaaagcttttattgtcacagatgaagacatcaggaaacaggaagagcgagtacagcaagtacgcaagaaattggaagaagcactgatggcagacatcttgtcgcgagctgctgatacagaagagatggatattgaaatggacagtggagatgaagcctaagaatatgatcaggtaaact

SEQ ID NO: 153314 - DNA, 1182 bp, Homo sapiens
  Payload ID: 10157
  Gene Symbol: MBD2
  Gene Name: methyl-CpG binding domain protein 2
  Uniprot ID: Q9UBB5
  ENST ID: ENST00000583046
  CDS Start-End: 59-967
cgggattccaagggctcggttacggaagaagcgcagcgccggctggggagggggctggatgcgcgcgcacccggggggaggccgctgctgcccggagcaggaggagggggagagtgcggcgggcggcagcggcgctggcggcgactccgccatagagcaggggggccagggcagcgcgctcgccccgtccccggtgagcggcgtgcgcagggaaggcgctcggggcggcggccgtggccgggggcggtggaagcaggcgggccggggcggcggcgtctgtggccgtggccggggccggggccgtggccggggacggggacggggccggggccggggccgcggccgtcccccgagtggcggcagcggccttggcggcgacggcggcggctgcggcggcggcggcagcggtggcggcggcgccccccggcgggagccggtccctttcccgtcggggagcgcggggccggggcccaggggaccccgggccacggagagcgggaagaggatggattgcccggccctcccccccggatggaagaaggaggaagtgatccgaaaatctgggctaagtgctggcaagagcgatgtctactacttcagtccaagtggtaagaagttcagaagcaagcctcagttggcaaggtacctgggaaatactgttgatctcagcagttttgacttcagaactggaaagatgatgcctagtaaattacagaagaacaaacagagactgcgaaacgatcctctcaatcaaaataagctgcgctggaacactcatcgtcctgcaccatggcatgcgctttcaagactctgcttgctcatacgctgtttgctctgcttggaatgtgcttacccccttccccttcatctggtgaactcctactcatccaagacccagcttcattgtctccatctctgggaagcctgccctgcatactccaggcagaaccaatcctttcctccataatgcttccctggtgctttgccattgtatttgtgacttgtttgtctgcttcagctagactgtgagctccatgagggcagggaccatgtctttttttgcttttgcacacggtaggtacttaatattgctttatgtttatttgatttaccatccacctcattctagaagtgtatagtggtaataaatgtttattaaataaataaattataccgtacatt

SEQ ID NO: 153315 - DNA, 5518 bp, Homo sapiens
  Payload ID: 10158
  Gene Symbol: MBD3
  Gene Name: methyl-CpG binding domain protein 3
  Uniprot ID: O95983
  ENST ID: ENST00000156825
  CDS Start-End: 171-950
caaagccggcgcgcgcccggctgggggcggagggcgggggcccgcgggccggaacagccgcggcaagtggcggcggcggcagcggcagcggaggcagctgaggcggcggcggcgagtgggggtccgggcggcggcggcgggcccggcggcgggccgaggagccgggcgcaatggagcggaagagcccgagcgggaagaagttccgcagcaagccgcagctggcgcgctacctgggcggctccatggacctgagcaccttcgacttccgcacgggcaagatgctgatgagcaagatgaacaagagccgccagcgcgtgcgctacgactcctccaaccaggtcaagggcaagcccgacctgaacacggcgctgcccgtgcgccagacggcgtccatcttcaagcagccggtgaccaagattaccaaccaccccagcaacaaggtcaagagcgacccgcagaaggcggtggaccagccgcgccagctcttctgggagaagaagctgagcggcctgaacgccttcgacattgctgaggagctggtcaagaccatggacctccccaagggcctgcagggggtgggacctggctgcacggatgagacgctgctgtcggccatcgccagcgccctgcacactagcaccatgcccatcacgggacagctctcggccgccgtggagaagaaccccggcgtatggctcaacaccacgcagcccctgtgcaaagccttcatggtgaccgacgaggacatcaggaagcaggaagagctggtgcagcaggtgcggaagcggctggaggaggcgctgatggccgacatgctggcgcacgtggaggagctggcccgtgacggggaggcgccgctggacaaggcctgcgctgaggacgacgacgaggaagacgaggaggaggaggaggaggagcccgacccggacccggagatggagcacgtctagggcagaggccctgccgagagcccgtgctgcctgctggagccgcctgcagacgcggtcctcggccccacgtgaaccaggctcggcggcgaagcccagccttggagacacccaggaggaaggccgtgctcctggctccctcctcggcccgtccccacttcccggggcctcggggcacacagctggggctgcccccacccgaaagaccctccacgctcgtcctctacagagtccggcttcgggaagtgccgggtgctcctgggccctgcctggctccctacgacctttgggctcgaggccagctcctccccatgcccgctgtcccagctccttgagactggagagcagccagcaggtgcccggcagctcggcgccacggcttgctgacagctgggagggtttctcggtctggaggcgtagttttgaaactcacatcacccactgtgcagcgtgaggacgggactctggtctgctgtggggggcatgcaggacggcgccactctctgccctgccatgcggctggtggtgccacagagcctcaccgtgcctgagtggcatgcccaggaggccgctctccttcagtaaatgtaacacagtcgaggcacgtcatcgggcagccttccctgtgtgccaacgccagccttcgcttctgaaaaccaaactccagccgctgccagtcgggacttggtcgcccggcgctgccagaatgctccactgccagccggcccccctgcctcggtttcccttctgtttagtggcgacacaggcacccagctttggggtggtgctgacgctcccaggggtgccaggagccactgggacagggtgaggctcccagacgctcctcgaggtgcccagctctccagggagcttctggcccaaggccgtctgagggatctgctccttaaccccccagtgccttggcgagggcaggttccaagccacagacgcctgccccgagtggactctgcggccagtccctggtgccctcctggccctgctgcccagtgagggctcctacgggtgggttcattggcctgggcccagcgagcccccacctgcattgaccttaggcccatagagagggcctgtcccggtgctgccccagccaggatctggtcgctgccccagggggactgatgggcagagtcgcccctgtggctggactgtgaccatccctgatggggcctgaccgcgggagctgaggaagcgccgctccaccgtctgccctccaaggacccgcatggaggcagtgggctggcagcttcctgctgctccctgtcagagtcaaagcacaaatcctcaggacgggctcaagggccagggcagccgagggaagctccaggtggggaccacgtcttcctgaggttggtgcccactggctgggaccctttgcagtggggtggcctcccctctgtctgcctggtggagggagccgtgggcgtggggacgtgactgaataaagccaccatgggtggatgtgcttggagcctggagttcggtgcgtccgctagactttggtgcccacgtttgagcttctgtctttggttgggtgatgaaaggctgaaagcggtgtggggacagggccagcaggtcccccaacctcgcggacattcacaacccaagagtcaggcttaggggtattcagagaagaccaggccggcctgggcatctgtgggcaagggccgtgccccctgaggtgccgctggctcagcctagggatcgtgggtcttggccctgctgccccggtgaggaagatgggctggggctcagacccagcaccgctccttccaaaggaagggaagcaggaggggctgcctggcagggagggccccccaggtcctcaggtcctgcacagccgctgcagggaggggagctgtgccccgggaccctggacttcagctcactagccatggccactggaagctgctttctggacctgaaggctgggaggccaccctcccctcatctgcccggcactcagagacactctgtttccctcttcccatctcccactgtgtccctgtctcccttggtctctctctgtctctgtctatccctgtctctatctctccctcttgtctctctcttgcgccgtctccctctctgtccctctttgtttcttgctctctctcctgtctctctccctcggtctctgtctctgtctcttgctgtctctccctctctgtcgcagcccagcttcctgtcactgacagaccccgatcagtccctctgatcccggggttctggccatgtcctggccttggtctgagatgtgatgatccctacccctgccacagggccctccccactggaagcccatccaggccctgggctgtcgctgttgacgaagcttgagggtcctttcctctctccctgaaaccttggggacccccacaggccaaggcaatactggcctttgctagaggtcgtgcccggtgagaagtgagttgtaggcgtgggcacctgaggggccagcccagtgctcaggccctcgtcaaattccctgccctggaaaagtctcagaccctcaggctgaaccccctgggcgcaccgaggctccacactccagccccagaacccagacctggcatggggcggggaagcctgagctcccaatgctgggatctttcgtgggggcctcatgaccagcctgccctgtgcggtgcctggccccatcctcaaaggccacttggctgcccccagccccgcccatgtctcagccccaagaccttctgggactttttttttttttagacaagagtttcgctcttctttcgctcttgttgcacaggctggagtgcagtggcgtgatctgggctcactgcaacctccaccttctgggttcaagcctcagcctcccgagtagccaccacgcccagctaatttttgtatttttaatagagacagggtttcaccatgttggccagtctggtctggaactcctaacctcaggtgatccgcccgccccagcttcccaaattgccgggattacaggtgtgaaccaccatggcagcccttctggcacttgccagcagcagcaagagcctcacgtgtcccccgcctcccctcagaccaagctccccaccgctgccgccacagagggtaccagggaggagaggctcaggacccccgtggcgaggatgcacctcccagccctcggcccagccacacggaccacagggctcccgagtctcagcaacaccagctaaggggcatcatgcctctcctgccacacccagggcccgtgccttgctgtccctgcagcccccagacccaggcagacagggacagcccttctgaccaccgcacacactcgccaccgcaaagatccccggggatgcccctcgcctgtgtgtgtccctcatggctgtcacagcaaatctccaggagcccggaggtgcccatggaaaacacccccagcttccggaacgttctttcggacagggccataccggagcaagactcagctttctggtagcgggtggctgggcactgcctgtgagattctgtcacactcgctccagattcaaggggtccaaaaagtgtaaacaagtcaagtgcccatccagggatgaacgaacacagcccggcccggccacaccatggagcaggactcggccatgaacaggaaccaggctctgacaccggccacggcgcagatgcccctggaggagtccaccctcagcaagagacacacagacaccgacacggcgtgcaatcccatttgtgtgaatgtccaggacaggccgattcagagacaggaaggggacacgtgggtgccagtgactggggattatggggactgggggaaatggctaaagggcacccacaaaagttaatgataatgttccacagttttttttttgagatggagtctcactcttgtcacccaggctggagtgcaatggtgtgatctctgctcactgcaagctctgcctcctgggttcacgccattctccctcctcagcctcccaagtagctgagattacaggcatatgccaccacccccagtagagacggggtttcaccatgttagccaggctggtcacgaactcctgacctcaagtgatcccccacctcggcctcccaaagtgctgggattacaggcatgagccaccgtgcctcaccagaattgtgtacttttttttcttcttcttcttcggcatggagtttcgctcttgttgcccaggctggagtgcaatggtgcaaacttggctcaccgcaacctcctcctcccgggttcaatagattctccagcctcagcctgctgagtagctgagattacgggcgcccgccaccacacccagctaatctttgtacttttagtagagacagggtttcaccatgttggccacgggcaaaagaattttgttgagggcaaataatatgagaccacaaaactgccttccctgctcagttttaattttcacagttttaatttttagccttctctggttaccaaaataaccacgctcacggccgttcatttgaagatatttccagttaacgtgtgtgaagtgggttttttgagatgtaatttacaagcaataaaatgctcctgtctctgc

SEQ ID NO: 153316 - DNA, 2439 bp, Homo sapiens
  Payload ID: 10158
  Gene Symbol: MBD3
  Gene Name: methyl-CpG binding domain protein 3
  Uniprot ID: O95983
  ENST ID: ENST00000434436
  CDS Start-End: 78-953
gcagctgaggcggcggcggcgagtgggggtccgggcggcggcggcgggcccggcggcgggccgaggagccgggcgcaatggagcggaagaggtgggagtgcccggcgctcccgcagggctgggagagggaagaagtgcccagaaggtcggggctgtcggccggccacagggatgtcttttactatagcccgagcgggaagaagttccgcagcaagccgcagctggcgcgctacctgggcggctccatggacctgagcaccttcgacttccgcacgggcaagatgctgatgagcaagatgaacaagagccgccagcgcgtgcgctacgactcctccaaccaggtcaagggcaagcccgacctgaacacggcgctgcccgtgcgccagacggcgtccatcttcaagcagccggtgaccaagattaccaaccaccccagcaacaaggtcaagagcgacccgcagaaggcggtggaccagccgcgccagctcttctgggagaagaagctgagcggcctgaacgccttcgacattgctgaggagctggtcaagaccatggacctccccaagggcctgcagggggtgggacctggctgcacggatgagacgctgctgtcggccatcgccagcgccctgcacactagcaccatgcccatcacgggacagctctcggccgccgtggagaagaaccccggcgtatggctcaacaccacgcagcccctgtgcaaagccttcatggtgaccgacgaggacatcaggaagcaggaagagctggtgcagcaggtgcggaagcggctggaggaggcgctgatggccgacatgctggcgcacgtggaggagctggcccgtgacggggaggcgccgctggacaaggcctgcgctgaggacgacgacgaggaagacgaggaggaggaggaggaggagcccgacccggacccggagatggagcacgtctagggcagaggccctgccgagagcccgtgctgcctgctggagccgcctgcagacgcggtcctcggccccacgtgaaccaggctcggcggcgaagcccagccttggagacacccaggaggaaggccgtgctcctggctccctcctcggcccgtccccacttcccggggcctcggggcacacagctggggctgcccccacccgaaagaccctccacgctcgtcctctacagagtccggcttcgggaagtgccgggtgctcctgggccctgcctggctccctacgacctttgggctcgaggccagctcctccccatgcccgctgtcccagctccttgagactggagagcagccagcaggtgcccggcagctcggcgccacggcttgctgacagctgggagggtttctcggtctggaggcgtagttttgaaactcacatcacccactgtgcagcgtgaggacgggactctggtctgctgtggggggcatgcaggacggcgccactctctgccctgccatgcggctggtggtgccacagagcctcaccgtgcctgagtggcatgcccaggaggccgctctccttcagtaaatgtaacacagtcgaggcacgtcatcgggcagccttccctgtgtgccaacgccagccttcgcttctgaaaaccaaactccagccgctgccagtcgggacttggtcgcccggcgctgccagaatgctccactgccagccggcccccctgcctcggtttcccttctgtttagtggcgacacaggcacccagctttggggtggtgctgacgctcccaggggtgccaggagccactgggacagggtgaggctcccagacgctcctcgaggtgcccagctctccagggagcttctggcccaaggccgtctgagggatctgctccttaaccccccagtgccttggcgagggcaggttccaagccacagacgcctgccccgagtggactctgcggccagtccctggtgccctcctggccctgctgcccagtgagggctcctacgggtgggttcattggcctgggcccagcgagcccccacctgcattgaccttaggcccatagagagggcctgtcccggtgctgccccagccaggatctggtcgctgccccagggggactgatgggcagagtcgcccctgtggctggactgtgaccatccctgatggggcctgaccgcgggagctgaggaagcgccgctccaccgtctgccctccaaggacccgcatggaggcagtgggctggcagcttcctgctgctccctgtcagagtcaaagcacaaatcctcaggacgggctcaagggccagggcagccgagggaagctccaggtggggaccacgtcttcctgaggttggtgcccactggctgggaccctttgcagtggggtggcctcccctctgtctgcctggtggagggagccgtgggcgtggggacgtgactgaataaagccaccatgggtggatgtgcttgga

SEQ ID NO: 153317 - DNA, 2782 bp, Homo sapiens
  Payload ID: 10158
  Gene Symbol: MBD3
  Gene Name: methyl-CpG binding domain protein 3
  ENST ID: ENST00000590550
  CDS Start-End: 375-1082
aaggatccgatgtggaggctggggctagggccagggtgtgaggatcggggccagtgctctgggtctggctggcgcccagatctaggggccagttgtggggtgctggggtctgggatgaaggtctggggtcacgccagggttggggtctggggctggggccagggcctgcctgggtttggggtcagggccgtgttggggtctggggctggggtcgcgacctgaagctggggctgggactgggtttgggtctgcggccgaggcctgggtttggggtctggggtccgcccggggcgccgaccgtcccgcctccccgcagcccgagcgggaagaagttccgcagcaagccgcagctggcgcgctacctgggcggctccatggacctgagcaccttcgacttccgcacgggcaagatgctgatgagcaagatgaacaagagccgccagcgcgtgcgctacgactcctccaaccaggtcaagggcaagcccgacctgaacacggcgctgcccgtgcgccagacggcgtccatcttcaagcagccggtgaccaagattaccaaccaccccagcaacaaggtcaagagcgacccgcagaaggcggtggaccagccgcgccagctcttctgggagaagaagctgagcggcctgaacgccttcgacattgctgaggagctggtcaagaccatggacctccccaagggcctgcagggggtgggacctggctgcacggatgagacgctgctgtcggccatcgccagcgccctgcacactagcaccatgcccatcacgggacagctctcggccgccgtggagaagaaccccggcgtatggctcaacaccacgcagcccctgtgcaaagccttcatggtgaccgacgaggacatcaggaagcaggaagagctggtgcagcaggtgcggaagcggctggaggaggcgctgatggccgacatgctggcgcacgtggaggagctggcccgtgacggggaggcgccgctggacaaggcctgcgctgaggacgacgacgaggaagacgaggaggaggaggaggaggagcccgacccggacccggagatggagcacgtctagggcaggtgctgcggggccacgggggctccctggagtcgggtcctggcagtggggactgcctggtgaacacagatgtgcttgggatgacgggtgcctcccaagagcttcccatctccctagaagagcccaagcgtccccgtcccgtggagtcgctaaagccagccctccctgtcctttccagaggccctgccgagagcccgtgctgcctgctggagccgcctgcagacgcggtcctcggccccacgtgaaccaggctcggcggcgaagcccagccttggagacacccaggaggaaggccgtgctcctggctccctcctcggcccgtccccacttcccggggcctcggggcacacagctggggctgcccccacccgaaagaccctccacgctcgtcctctacagagtccggcttcgggaagtgccgggtgctcctgggccctgcctggctccctacgacctttgggctcgaggccagctcctccccatgcccgctgtcccagctccttgagactggagagcagccagcaggtgcccggcagctcggcgccacggcttgctgacagctgggagggtttctcggtctggaggcgtagttttgaaactcacatcacccactgtgcagcgtgaggacgggactctggtctgctgtggggggcatgcaggacggcgccactctctgccctgccatgcggctggtggtgccacagagcctcaccgtgcctgagtggcatgcccaggaggccgctctccttcagtaaatgtaacacagtcgaggcacgtcatcgggcagccttccctgtgtgccaacgccagccttcgcttctgaaaaccaaactccagccgctgccagtcgggacttggtcgcccggcgctgccagaatgctccactgccagccggcccccctgcctcggtttcccttctgtttagtggcgacacaggcacccagctttggggtggtgctgacgctcccaggggtgccaggagccactgggacagggtgaggctcccagacgctcctcgaggtgcccagctctccagggagcttctggcccaaggccgtctgagggatctgctccttaaccccccagtgccttggcgagggcaggttccaagccacagacgcctgccccgagtggactctgcggccagtccctggtgccctcctggccctgctgcccagtgagggctcctacgggtgggttcattggcctgggcccagcgagcccccacctgcattgaccttaggcccatagagagggcctgtcccggtgctgccccagccaggatctggtcgctgccccagggggactgatgggcagagtcgcccctgtggctggactgtgaccatccctgatggggcctgaccgcgggagctgaggaagcgccgctccaccgtctgccctccaaggacccgcatggaggcagtgggctggcagcttcctgctgctccctgtcagagtcaaagcacaaatcctcaggacgggctcaagggccagggcagccgagggaagctccaggtggggaccacgtcttcctgaggttggtgcccactggctgggaccctttgcagtggggtggcctcccctctgtctgcctggtggagggagccgtgggcgtggggacgtgactgaataaagccaccatgggtggatgtgcttggagcctggagttcggtgcgtccgctagactttggtgccca

SEQ ID NO: 153318 - DNA, 2379 bp, Homo sapiens
  Payload ID: 10158
  Gene Symbol: MBD3
  Gene Name: methyl-CpG binding domain protein 3
  ENST ID: ENST00000592012
  CDS Start-End: 152-709
gctggggctgggactgggtttgggtctgcggccgaggcctgggtttggggtctggggtccgcccggggcgccgaccgtcccgcctccccgcagcccgagcgggaagaagttccgcagcaagccgcagctggcgcgctacctgggcggctccatggacctgagcaccttcgacttccgcacgggcaagatgctgatgagcaagatgaacaagagccgccagcgcgtgcgctacgactcctccaaccaggtcaagggcaagcccgacctgaacacggcgctgcccgtgcgccagacggcgtccatcttcaagcagccggtgaccaagattaccaaccaccccagcaacaaggtcaagagcgacccgcagaaggcggtggaccagccgcgccagctcttctgggagaagaagctgagcggcctgaacgccttcgacattgctgaggagctggtcaagaccatggacctccccaagggcctgcagggggtgggacctggctgcacggatgagacgctgctgtcggccatcgccagcgccctgcacactagcaccatgcccatcacgggacagctctcggccgccgtggagaagaaccccggcgtatggctcaacaccacgcagcccctgtgcaaagccttcatggtgaccgacgaggacatcagcaggaagagctggtgcagcaggtgcggaagcggctggaggaggcgctgatggccgacatgctggcgcacgtggaggagctggcccgtgacggggaggcgccgctggacaaggcctgcgctgaggacgacgacgaggaagacgaggaggaggaggaggaggagcccgacccggacccggagatggagcacgtctagggcagaggccctgccgagagcccgtgctgcctgctggagccgcctgcagacgcggtcctcggccccacgtgaaccaggctcggcggcgaagcccagccttggagacacccaggaggaaggccgtgctcctggctccctcctcggcccgtccccacttcccggggcctcggggcacacagctggggctgcccccacccgaaagaccctccacgctcgtcctctacagagtccggcttcgggaagtgccgggtgctcctgggccctgcctggctccctacgacctttgggctcgaggccagctcctccccatgcccgctgtcccagctccttgagactggagagcagccagcaggtgcccggcagctcggcgccacggcttgctgacagctgggagggtttctcggtctggaggcgtagttttgaaactcacatcacccactgtgcagcgtgaggacgggactctggtctgctgtggggggcatgcaggacggcgccactctctgccctgccatgcggctggtggtgccacagagcctcaccgtgcctgagtggcatgcccaggaggccgctctccttcagtaaatgtaacacagtcgaggcacgtcatcgggcagccttccctgtgtgccaacgccagccttcgcttctgaaaaccaaactccagccgctgccagtcgggacttggtcgcccggcgctgccagaatgctccactgccagccggcccccctgcctcggtttcccttctgtttagtggcgacacaggcacccagctttggggtggtgctgacgctcccaggggtgccaggagccactgggacagggtgaggctcccagacgctcctcgaggtgcccagctctccagggagcttctggcccaaggccgtctgagggatctgctccttaaccccccagtgccttggcgagggcaggttccaagccacagacgcctgccccgagtggactctgcggccagtccctggtgccctcctggccctgctgcccagtgagggctcctacgggtgggttcattggcctgggcccagcgagcccccacctgcattgaccttaggcccatagagagggcctgtcccggtgctgccccagccaggatctggtcgctgccccagggggactgatgggcagagtcgcccctgtggctggactgtgaccatccctgatggggcctgaccgcgggagctgaggaagcgccgctccaccgtctgccctccaaggacccgcatggaggcagtgggctggcagcttcctgctgctccctgtcagagtcaaagcacaaatcctcaggacgggctcaagggccagggcagccgagggaagctccaggtggggaccacgtcttcctgaggttggtgcccactggctgggaccctttgcagtggggtggcctcccctctgtctgcctggtggagggagccgtgggcgtggggacgtgactgaataaagccaccatgggtggatgtgcttggagcctggagttcggtgcgtccgctagactttggtgccca

SEQ ID NO: 153319 - DNA, 907 bp, Homo sapiens
  Payload ID: 10158
  Gene Symbol: MBD3
  Gene Name: methyl-CpG binding domain protein 3
  ENST ID: ENST00000592361
  CDS Start-End: 517-907
ctcactgaatgtggcgtcctcaaggtgcatccacgctgtggcctgtgtcagagcctcgctccttttcatggctgagtatgtcccatcgtgtggatgggcgtttgtccgttcatccattgaaggcgtctgggctgcttccaccttctggctcctggggacatccgtgtagaagtgatggtgtggatgcgtgctcatttttcgggcagatacctaagagtggcgtggccgggtcatctggaaactcagtgaagagctgtcaggcttttccaacatggctgttccatcttacatcccaaccatgatgacggtgtgttgggttgggtgcttgtcatcctgtagtgtgacctcatgtgacacacagggcaacccattggtgggtgtccttatgtcctggagaggatgagttgccggcgcttgtccatggcaggctgagagcagagccccgtgtctgagagcagcccgagcgggaagaagttccgcagcaagccgcagctggcgcgctacctgggcggctccatggacctgagcaccttcgacttccgcacgggcaagatgctgatgagcaagatgaacaagagccgccagcgcgtgcgctacgactcctccaaccaggtcaagggcaagcccgacctgaacacggcgctgcccgtgcgccagacggcgtccatcttcaagcagccggtgaccaagattaccaaccaccccagcaacaaggtcaagagcgacccgcagaaggcggtggaccagccgcgccagctcttctgggagaagaagctgagcggcctgaacgccttcgacattgctgaggagctggtcaagaccatggacctccccaagggcctgcagggggtgggacctggctgcacggatgagacgctgctgtcggccatcgccagcgccctgcaca

SEQ ID NO: 153320 - DNA, 415 bp, Homo sapiens
  Payload ID: 10158
  Gene Symbol: MBD3
  Gene Name: methyl-CpG binding domain protein 3
  ENST ID: ENST00000585903
  CDS Start-End: 1-124
cgacccgcagaaggcggtggaccagccgcgccagagtctcgctctgtcacccaggctggagtgcagtggcaggatcttaactcactacaacctctgcctcctggtttcaactgggttcaagtgatccttccacctcagcctcacaagtagctgggatttcagctcttctgggagaagaagctgagcggcctgaacgccttcgacattgctgaggagctggtcaagaccatggacctccccaagggcctgcagggggtgggacctggctgcacggatgagacgctgctgtcggccatcgccagcgccctgcacactagcaccatgcccatcacgggacagctctcggccgccgtggagaagaaccccggcgtatggctcaacaccacgcagcccctgtgcaaagccttcatggtga

SEQ ID NO: 153321 - DNA, 568 bp, Homo sapiens
  Payload ID: 10158
  Gene Symbol: MBD3
  Gene Name: methyl-CpG binding domain protein 3
  ENST ID: ENST00000592965
  CDS Start-End: 467-568
ttgcgtgcgtgtgcgcccggcgcgcggaggcccagtgcgcgtgcgccgcttgttgggccgcatggctttcggccggccgttcagggactggctgccggacggcgactgcggcctttgttcgtgcgcgctgggccaggggcgcctggcggcggccagatgctaccggggggcaggggtggagggtgggctgtccctttggttcccgtgagacgcagggggtgccttcttggggcgctcctggggtggcgcggagcccgagggggtggccagccgggatttcggggagcagggctcatgggcggatcggggagggcgtgcgtgaaaatacgggttcttgggctcgccccagtcctgggaataagcgcctcagggtgactggtctcccacgcagcgttgctttttttaaagcccgagcgggaagaagttccgcagcaagccgcagctggcgcgctacctgggcggctccatggacctgagcaccttcgacttccgcacgggcaagatgctgatgagcaagatgaacaagagccgccagcgcgtgcgctacgactcctccaaccaggtcaag

SEQ ID NO: 153322 - DNA, 583 bp, Homo sapiens
  Payload ID: 10158
  Gene Symbol: MBD3
  Gene Name: methyl-CpG binding domain protein 3
  ENST ID: ENST00000585967
  CDS Start-End: 142-583
agtgcgcgtgcgccgcttgttgggccgcatggctttcggccggccgttcagggactggctgccggacggcgactgcggcctttcccgagcgggaagaagttccgcagcaagccgcagctggcgcgctacctgggcggctccatggacctgagcaccttcgacttccgcacgggcaagatgctgatgagcaagatgaacaagagccgccagcgcgtgcgctacgactcctccaaccaggtcaagggcaagcccgacctgaacacggcgctgcccgtgcgccagacggcgtccatcttcaagcagccggtgaccaagattaccaaccaccccagcaacaaggtcaagagcgacccgcagaaggcggtggaccagccgcgccagctcttctgggagaagaagctgagcggcctgaacgccttcgacattgctgaggagctggtcaagaccatggacctccccaagggcctgcagggggtgggacctggctgcacggatgagacgctgctgtcggccatcgccagcgccctgcacactagcaccatgcccatcacgggacagctctcggccgccgtggagaagaacc

SEQ ID NO: 153323 - DNA, 748 bp, Homo sapiens
  Payload ID: 10159
  Gene Symbol: MBD3L1
  Gene Name: methyl-CpG binding domain protein 3-like 1
  Uniprot ID: Q8WWY6
  ENST ID: ENST00000305625
  CDS Start-End: 87-671
tccttgtcctgagaaggcaggcttcattgatcaatttgaccccatttcatgatttattttaatagtgtaagaggaaaagaagtgtgatggccaagagttcacagaggaagcaacgtgactgtgtaaaccaatgcaaatcaaagcctggcttgagcacctcaatccctttgagaatgtccagttacacattcaagaggccagtaacgagaattacaccccatcctggcaatgaggtcagataccatcaatgggaggagagcttggagaagcctcagcaggtctgctggcagaggagactgcagggactccaggcttacagcagtgcaggagaactttcaagcactttggatcttgccaataccttgcaaaaacttgtccctagttacacaggtggatctctgctggaggatcttgccagtggtctggagcactcctgccccatgccccaccttgcctgctcttcagatgcggtggagataattcctgcagagggagtgggtatctcgcagctcctctgcaaacaatttctggttactgaggaagatatcaggaaacaggaagggaaagtgaagacagtcagagagagactcgcaatagcactgattgcggatggactcgctaatgaggcagagaaagtgagagaccaagaaggccgtcctgaaaaacgctaagaaaaaaagggaagatagtgcagatgaaataaagtgtaatcctttattaacatctctttgcagtgtccccaatgagg

SEQ ID NO: 153324 - DNA, 872 bp, Homo sapiens
  Payload ID: 10159
  Gene Symbol: MBD3L1
  Gene Name: methyl-CpG binding domain protein 3-like 1
  Uniprot ID: Q8WWY6
  ENST ID: ENST00000595891
  CDS Start-End: 232-816
gttcggcgcttaggcgacaggcgcggcgggcgggagcggcggccgcgaaccccagccttgggcagaggtgttctagtttgcttagtgggcacaaagttgggccctggcctggggcagtagcggggtgatcatatgacggtggtagccatggcgtcacagagaacagggaccttccaagtttgaagttttacaaggcaggtgtgataagtgtgtaagaggaaaagaagtgtgatggccaagagttcacagaggaagcaacgtgactgtgtaaaccaatgcaaatcaaagcctggcttgagcacctcaatccctttgagaatgtccagttacacattcaagaggccagtaacgagaattacaccccatcctggcaatgaggtcagataccatcaatgggaggagagcttggagaagcctcagcaggtctgctggcagaggagactgcagggactccaggcttacagcagtgcaggagaactttcaagcactttggatcttgccaataccttgcaaaaacttgtccctagttacacaggtggatctctgctggaggatcttgccagtggtctggagcactcctgccccatgccccaccttgcctgctcttcagatgcggtggagataattcctgcagagggagtgggtatctcgcagctcctctgcaaacaatttctggttactgaggaagatatcaggaaacaggaagggaaagtgaagacagtcagagagagactcgcaatagcactgattgcggatggactcgctaatgaggcagagaaagtgagagaccaagaaggccgtcctgaaaaacgctaagaaaaaaagggaagatagtgcagatgaaataaagtgtaatcctttattaacatctc

SEQ ID NO: 153325 - DNA, 793 bp, Homo sapiens
  Payload ID: 10160
  Gene Symbol: MBD3L2
  Gene Name: methyl-CpG binding domain protein 3-like 2
  Uniprot ID: Q8NHZ7
  ENST ID: ENST00000381393
  CDS Start-End: 54-680
ccaagggctgtctgtgcctcaggagtggggtcagcaggaggaactctacagctatgggagaacctgcgttcacctcttttccaagcctgcctgttctggggaagctcaaaaggaacatgatgccctgggctttacagaagaaacgagaaatccacatggccaaggcccatcggagacgagctgcgaggtctgctctccccatgagactcaccagctgcatcttccggaggccggtgacaaggatcaggtctcatcctgacaaccaggtcagacgcagaaaaggggacgagcacctggagaagccgcagcaactctgcgcctaccggagactgcaggccctgcagccctgcagcagccaaggagaaggttcaagtccactgcatttggagagcgtcttaagtatccttgcaccggggacggccggtgaatctctggacagagctggtgctgagcgtgtgcgcagcccgcttgagcccacccctgggcggtttccagctgtggcaggggggccaaccccaggaatgggttgtcagctcccaccgcccctctctggccaattggtgactcctgcagatatccggagacaggccaggagggtgaagaaagccagggagagactggccaaggccttgcaggcagacaggctggccaggcgggcagaaatgctgacaggtggatgaagctcagtcttgggctttcggtccctttcttttaatgcccatcctcattcctactctgaattgtcacacttttcccttccccaccagttctttaataaaagtatttgaaaggc

SEQ ID NO: 153326 - DNA, 774 bp, Homo sapiens
  Payload ID: 10160
  Gene Symbol: MBD3L2
  Gene Name: methyl-CpG binding domain protein 3-like 2
  ENST ID: ENST00000616171
  CDS Start-End: 36-650
tcaggagtggggtcagcaggaggaactctacagctatgggagaacctgcgttcacctcttttccaagcctgcctgttctggggaagctcaaaaggaacatgatgccctgggctttacagaagaaacgagaaatccacatggccaaggcccatcggagacgagctgcgaggtctgctctccccatgagactcaccagctgcatcttccggaggccggtgacaaggatcaggtctcatcctgacaaccaggtcagacgcagaaaaggggacgagcacctggagaagccgcagcaactctgcgcctaccggagactgcaggccctgcagccctgcagcagccaaggagaaggttcaagtccactgcatttggagagcgtcttaagtatccttgcaccggggacggccggtgaatctctggacagagctggtgctgagcgtgtgcgcagcccgcttgagcccacccctgggcggtttccagctgtggcaggggggccaaccccaggaatgggttgtcagctcccaccgcccctctctggccaattggtgactcctgcagatatccggagacaggccaggagggtgaagaaagccagggagagactggccaaggccttgcaggcagacaggctggccaggcgggcagaaatgtgacaggtggatgaagctcagtcttgggctttcggtccctttcttttaatgcccatcctcattcctactctgaattgtcacacttttcccttccccaccagttctttaataaaagtatttgaaaggc

SEQ ID NO: 153327 - DNA, 775 bp, Homo sapiens
  Payload ID: 10161
  Gene Symbol: MBD3L3
  Gene Name: methyl-CpG binding domain protein 3-like 3
  Uniprot ID: A6NE82
  ENST ID: ENST00000333843
  CDS Start-End: 36-662
tcaagagtggggtcagcaagagaaactctacggctatgggagagcctgcgttcacctcttttccgagcccacctgttctggggaagctcaaaagaaacatgatgccctgggctttacagaagaaacgagaaatccacatggccaaggcccatcggagacgagctgcgaggtctgctctccccatgagactcaccagctgcatcttccggaggccggtgacaaggatcaggtctcatcctgacaaccaggtcagacgcagaaaaggggacgagcacctggagaagccgcagcaactctgcgcctaccggagactgcaggccctgcagccctgcagcagccaaggagaaggttcaagtccactgcatttggagagcgtcttaagtatccttgcaccggggacggccggtgaatctctggacagggctggtgctgagcgtgtgcgcagcccgcttgagcccacccctgggcggtttccagctgtggcaggggggccaaccccaggaatgggttgtcagctcccaccgcccctctctggccaattggtgactcctgcagatatccggagacaggccaggagggtgaagaaagccagggagagactggccaaggccttgcaggcagacaggctggccaggcaggcagaaatgctgacatgtagatgaagcgcagtcctgggctttcggtccctttcttttaatgcccatcctcattcctactctgaattgtcacacttttcccttccccaccagttctttaataaaagtatttgaaaggc

SEQ ID NO: 153328 - DNA, 774 bp, Homo sapiens
  Payload ID: 10161
  Gene Symbol: MBD3L3
  Gene Name: methyl-CpG binding domain protein 3-like 3
  ENST ID: ENST00000611585
  CDS Start-End: 36-650
tcaagagtggggtcagcaagagaaactctacggctatgggagagcctgcgttcacctcttttccgagcccacctgttctggggaagctcaaaagaaacatgatgccctgggctttacagaagaaacgagaaatccacatggccaaggcccatcggagacgagctgcgaggtctgctctccccatgagactcaccagctgcatcttccggaggccggtgacaaggatcaggtctcatcctgacaaccaggtcagacgcagaaaaggggacgagcacctggagaagccgcagcaactctgcgcctaccggagactgcaggccctgcagccctgcagcagccaaggagaaggttcaagtccactgcatttggagagcgtcttaagtatccttgcaccggggacggccggtgaatctctggacagggctggtgctgagcgtgtgcgcagcccgcttgagcccacccctgggcggtttccagctgtggcaggggggccaaccccaggaatgggttgtcagctcccaccgcccctctctggccaattggtgactcctgcagatatccggagacaggccaggagggtgaagaaagccagggagagactggccaaggccttgcaggcagacaggctggccaggcaggcagaaatgtgacatgtagatgaagcgcagtcctgggctttcggtccctttcttttaatgcccatcctcattcctactctgaattgtcacacttttcccttccccaccagttctttaataaaagtatttgaaaggc

SEQ ID NO: 153329 - DNA, 775 bp, Homo sapiens
  Payload ID: 10162
  Gene Symbol: MBD3L4
  Gene Name: methyl-CpG binding domain protein 3-like 4
  Uniprot ID: A6NDZ8
  ENST ID: ENST00000381394
  CDS Start-End: 36-662
tcaagagtggggtcagcaagagaaactctacggctatgggagagcctgcgttcacctcttttccgagcccacctgttctggggaagctcaaaagaaacatgatgccctgggctttacagaagaaacgagaaatccacatggccaaggcccatcggagacgagctgcgaggtctgctctccccatgagactcaccagctgcatcttccggaggccggtgacaaggatcaggtctcatcctgacaaccaggtcagacgcagaaaaggggacgagcacctggagaagccgcagcaactctgcgcctaccggagactgcaggccctgcagccctgcagcagccaaggagaaggttcaagtccactgcatttggagagcgtcttaagtatccttgcaccggggacggccggtgaatctctggacagagctggtgctgagcgtgtgcgcatcccgcttgagcccacccctgggcggtttccagctgtggcaggggggccaaccccaggaatgggttgtcagctcccaccgcccctctctggccaattggtgactcctgcagatatccggagacaggccaggagggtgaagaaagccagggagagactggccaaggccttgcaggcagacaggctggccaggcaggcagaaatgctgacatgtagatgaagcgcagtcctgggctttcggtccctttcttttaatgcccatcctcattcctactctgaattgtcacacttttcccttccccaccagttctttaataaaagtatttgaaaggc

SEQ ID NO: 153330 - DNA, 774 bp, Homo sapiens
  Payload ID: 10162
  Gene Symbol: MBD3L4
  Gene Name: methyl-CpG binding domain protein 3-like 4
  ENST ID: ENST00000619943
  CDS Start-End: 36-650
tcaagagtggggtcagcaagagaaactctacggctatgggagagcctgcgttcacctcttttccgagcccacctgttctggggaagctcaaaagaaacatgatgccctgggctttacagaagaaacgagaaatccacatggccaaggcccatcggagacgagctgcgaggtctgctctccccatgagactcaccagctgcatcttccggaggccggtgacaaggatcaggtctcatcctgacaaccaggtcagacgcagaaaaggggacgagcacctggagaagccgcagcaactctgcgcctaccggagactgcaggccctgcagccctgcagcagccaaggagaaggttcaagtccactgcatttggagagcgtcttaagtatccttgcaccggggacggccggtgaatctctggacagagctggtgctgagcgtgtgcgcatcccgcttgagcccacccctgggcggtttccagctgtggcaggggggccaaccccaggaatgggttgtcagctcccaccgcccctctctggccaattggtgactcctgcagatatccggagacaggccaggagggtgaagaaagccagggagagactggccaaggccttgcaggcagacaggctggccaggcaggcagaaatgtgacatgtagatgaagcgcagtcctgggctttcggtccctttcttttaatgcccatcctcattcctactctgaattgtcacacttttcccttccccaccagttctttaataaaagtatttgaaaggc

SEQ ID NO: 153331 - DNA, 778 bp, Homo sapiens
  Payload ID: 10163
  Gene Symbol: MBD3L5
  Gene Name: methyl-CpG binding domain protein 3-like 5
  Uniprot ID: A6NJ08
  ENST ID: ENST00000329753
  CDS Start-End: 35-661
caagagtggggtcagcaagagaaactctacggctatgggagagcctgcgttcacctcttttccgagcccacctgttctggggaagctcaaaagaaacatgatgccctgggctttacagaagaaacgagaaatccacatggccaaggcccatcggagacgagctgcgaggtctgctctccccatgagactcaccagctgcatcttccggaggccggtgacaaggatcaggtctcatcctgacaaccaggtcagacgcagaaaaggggacgagcacctggagaagccgcagcaactctgcgcctaccggagactgcaggccctgcagccctgcagcagccaaggagaaggttcaagtccactgcatttggagagcgtcttaagtatccttgcaccggggacggccggtgaatctctggacagagctggtgctgagcgtgtgcgcatcccgcttgagcccacccctgggcggtttccagctgtggcaggggggccaaccccaggaatgggttgtcagctcccaccgcccctctctggccaattggtgactcctgcagatatccggagacaggccaggagggtgaagaaagccagggagagactggccaaggccttgcaggcagacaggctggccaggcaggcagaaatgctgacaggtgggtgaagctcagtcctgggctttcggtccctttcttttaatgcccatcctcattcctactctgaattgtcacacttttcccttccccaccagttctttaataaaagtatttgaaaggcaaca

SEQ ID NO: 153332 - DNA, 774 bp, Homo sapiens
  Payload ID: 10163
  Gene Symbol: MBD3L5
  Gene Name: methyl-CpG binding domain protein 3-like 5
  ENST ID: ENST00000618571
  CDS Start-End: 36-650
tcaagagtggggtcagcaagagaaactctacggctatgggagagcctgcgttcacctcttttccgagcccacctgttctggggaagctcaaaagaaacatgatgccctgggctttacagaagaaacgagaaatccacatggccaaggcccatcggagacgagctgcgaggtctgctctccccatgagactcaccagctgcatcttccggaggccggtgacaaggatcaggtctcatcctgacaaccaggtcagacgcagaaaaggggacgagcacctggagaagccgcagcaactctgcgcctaccggagactgcaggccctgcagccctgcagcagccaaggagaaggttcaagtccactgcatttggagagcgtcttaagtatccttgcaccggggacggccggtgaatctctggacagagctggtgctgagcgtgtgcgcatcccgcttgagcccacccctgggcggtttccagctgtggcaggggggccaaccccaggaatgggttgtcagctcccaccgcccctctctggccaattggtgactcctgcagatatccggagacaggccaggagggtgaagaaagccagggagagactggccaaggccttgcaggcagacaggctggccaggcaggcagaaatgtgacaggtgggtgaagctcagtcctgggctttcggtccctttcttttaatgcccatcctcattcctactctgaattgtcacacttttcccttccccaccagttctttaataaaagtatttgaaaggc

SEQ ID NO: 153333 - DNA, 5920 bp, Homo sapiens
  Payload ID: 10164
  Gene Symbol: MBD5
  Gene Name: methyl-CpG binding domain protein 5
  ENST ID: ENST00000404807
  CDS Start-End: 130-5313
caatgcgttttgtacagtctgggaaaaactgtgctgcactggcccacttttgaaggccatcatgctctgtaatataaggatatcatcttattgctgatatctttggagagtccctagcagacacagaaaatgaatggaggcaaagagtgtgacggaggggacaaggaaggaggtcttccagctatacaagttcctgtgggttggcagcgtcgtgtggatcaaaatggagtgctttatgtcagtcccagtgggtctttgttatcttgcttggagcaggttaaaacatacctgcttactgatggaacatgcaagtgtggcttggaatgtcctcttattcttcccaaggtatttaattttgatcctggagctgctgtgaaacagagaaccgcagaagatgttaaggcagatgaagatgtcacaaagctatgcatacataaaagaaaaattattgcagtggccacacttcataaaagcatggaagccccacatccttctctggtgctcaccagtcccggaggaggaacaaatgcaactccagtagtaccttctcgggcagcaactccaagatcagtaagaaataagtctcatgaaggaattacaaattctgtaatgcctgaatgtaagaatcctttcaagttaatgattggatcatcaaatgccatgggaaggctatatgtacaagaactgcctggaagccaacaacaagaactccaccctgtctacccccgacagagattgggcagcagtgaacatggacagaaatctccattccgtggcagccatggaggcctgcccagcccagcgtcatcaggttcccagatatatggagatggttcaatctctccaaggactgacccacttggaagtcctgatgttttcacaagaagtaatcctggttttcatggagctcccaattctagtcctattcacctgaataggactcctctttctccaccttcagtaatgctacatggttctcctgtacagtcatcctgtgcaatggctggaaggactaatatacctctttccccaaccttgactacaaagagtccagtaatgaaaaaaccaatgtgtaatttttcaactaatatggaaataccacgagcaatgttccaccacaaaccaccccaaggcccacctccccctcctccaccttcttgtgctcttcagaaaaagccattaacatctgagaaagatccacttggcattcttgaccctattcctagtaaaccagtgaatcagaaccctgttatcattaatccaaccagtttccattcaaatgtccactctcaggtacctatgatgaatgtaagcatgcctcctgctgttgttcctttgccaagtaatctcccattgccaactgtaaaacctggtcacatgaatcatgggagtcatgtacaaagagttcagcattcagcttcaacctccctgtccccttctccagtgacatcccccgtgcacatgatggggactggaattggaaggattgaggcatcgccccaaagatcacgctcatcttccacatcatcagatcatggaaatttcatgatgccacctgtaggaccccaggccacttctagtggtattaaggttccacccaggtcaccaaggtcaacaatagggtccccaaggccatcaatgccatcaagcccttctaccaagtccgatggacatcatcagtacaaggatatccctaacccattaattgctggaataagtaatgtactaaataccccaagcagtgcagcttttcctactgcatctgccggaagtagttctgtaaagagtcagcctggtttgctgggaatgcctttaaatcagatcttgaaccagcacaatgctgcctcctttccagcaagtagtttactctcagcagcagccaaagcacagctagcaaatcaaaacaaacttgctggtaacaacagtagcagcagtagcaattctggagctgttgccggcagtggcaacactgaaggacatagcactttaaacaccatgttccctcctactgccaacatgcttctcccaacaggtgaagggcaaagtggtcgagcagcactaagagataagctgatgtctcagcaaaaagacgcattgcggaaaagaaaacaaccacctacgacagtgttgagtttgctcagacagtctcaaatggatagttctgcagttcctaaacctggacctgacttgctaaggaagcagggtcagggttcatttcccatcagttcaatgtctcagttactacagtctatgagttgtcaaagctctcacttgagtagcaatagtaccccgggttgtggggcctcaaatactgctttgccttgctctgctaaccagctgcattttacagatcccagtatgaactctagtgttcttcagaacatacctttaagaggggaagccgtgcactgccacaatgcaaacactaactttgttcacagtaacagtccagtccccaaccaccatcttgcaggtttaataaatcagattcaggctagcgggaactgtgggatgctcagtcagtcgggcatggctttaggaaattccttacatcccaatccacctcagtcaagaatttcaacgtcctccactccagtgataccaaacagcattgttagcagctataatcaaacaagttctgaagcaggcggttcaggaccatcatcctccatagccatagcgggcaccaaccaccctgccatcacaaagacaacatctgttcttcaagatggcgtcatagtcaccactgcagctggaaacccactgcagagtcagctacccattgggagtgattttccttttgttggccaggagcacgcacttcattttccatccaacagcacttcaaacaaccatcttccacaccccttgaaccccagcctcctcagttctctacctatctctttgccagtgaatcaacagcatctcctaaaccagaatctattaaatatcctccagccttcagcaggagaaggcaagtctgagatcaacctccaccctttaggttttctcaacccgaatgtaaacgctgctttagcttttctctccagtgacatggatgggcaggtattgcagcctgttcactttcagctcttagcagccttgcttcagaaccaagcccaagcagctgccatgcttcccctgccatctttcaatctgaccatctcagatcttttgcaacagcaaaatacccctttaccctcattaacacagatgacagccccaccagaccatttgccaagcaatcagtcagacaacagccgagctgagacccttttaaccagccccctggggaaccctttaccaagctttgcaggcagtgacactacttttaaccccctgttcctcccagctgtcaatggggcctcaggattaatgaccttgaatccccagctgttgggaggtgtcctgaactcggcatcggccaacaccgctaatcatccagaggtttccatagcaacctcctcccaggcaaccactaccacaaccactacatcatcagcagtggcagcactgactgtctcaacacttggtgggacagcagtggtgtcaatggcagaaacattgctgaatatatctaataatgctgggaatacacctggtccagctaaactcaacagtaactctgtggtgccacagctacttaaccctctactggggacaggtctacttggtgatatgtcatcaataaacaatactttgagtaaccatcaactgactcatctacagtcgctgttaaacaacaatcagatgtttcctccaaatcagcaacagcagcaacttctccaggggtaccagaatctccaggcgttccaaggacagtccacaattccttgcccagctaacaataaccccatggcttgtctgtttcagaactttcaggtgagaatgcaggaagatgcagctctcctaaacaaaagaataagcactcagcctgggctcacagcacttcctgagaatccaaacactacacttccaccttttcaagatacaccttgtgagttgcaaccgaggattgacccatctcttggtcaacaggtgaaggatggcctcgttgtgggtggcccaggtgatgcttccgtagatgccatttacaaagcagttgtcgatgcagccagcaaaggaatgcaggttgtcatcaccactgcagtcaacagtacaactcagatcagccccattccagctctgagtgccatgagtgccttcactgcctcaattggtgacccattaaatctctccagtgctgtcagtgcggtcattcatggacggaacatgggaggtgttgatcatgatggtaggctgaggaattcaagaggggctcggctgcccaagaatctagaccatgggaaaaatgtgaacgaaggagatgggtttgaatatttcaagtcagcaagttgccacacatccaaaaaacagtgggacggggagcaaagccccagaggggagcgaaacaggtggaagtacgaggaatttttagatcatccaggccatatccacagtagtccttgtcatgaaaggcccaacaatgtctctacactgccatttctgcctggggaacagcacccaatactgttaccaccaagaaactgtccaggggataaaattctagaggaaaatttcaggtataataactacaaaagaactatgatgagttttaaggagagactagagaacactgtggaaagatgtgcacacataaatgggaatagacctcgacagagtcggggatttggagagctgctaagcactgcaaagcaagacctggtcctagaggagcagtctccaagttcctcaaatagtttggaaaattctctggtcaaagactacatccattacaatggagactttaatgccaaaagcgttaatgggtgtgtgcctagcccttcagatgctaaaagcattagtagtgaagatgacctaaggaacccagactccccctcttcaaatgaattgatacattatagaccaaggacgttcaatgttggcgacttggtctggggccaaatcaaaggactgacttcctggcctggaaaattagtaagagaagacgacgttcacaattcatgtcaacaaagccccgaggaagggaaggtggagcccgagaagttgaagacactaacagaaggtttggaagcctacagccgtgtccggaaaaggaacagaaaaagtggaaagctaaataaccatttagaagctgctattcatgaggccatgagtgaactggacaaaatgtctgggactgtacaccaaatcccacagggtgacagacaaatgagaccccccaaacccaagaggaggaagatctccagataacagagactactccactaatgcgcagtgtttattaaaggaacatgcacagatgtatctgtatataggtattgatatagccacagttatatcaatatttagactatggcagatagctaccaccaccacagggtgctaaaagaaacagtgatacaaaatttttttgatcaggaaggataatgaatgctggaaaagccaatcaaagtctctgtgtgatgagagtgatcaatggtcaagagattactgagaaactctttttctataatactaaattgtgattataagaaatagtccaaatgtttctgaagaattttcaatgttgtatatagaaaatacagaatttcatggtgatatcagaaatgtaaatattgtacagtattgtcatgtacaagcgtacctaatgcacactttatcttttattgtacaaagaaatagtgtacaaaattctttggtttctatggagtacacctaccagagactaccagtgtaaagtgataaataaaaatacaacctaaatgcttttctatgataatgtaaaagatgctgtttttgtatttaacagcagagaaaaggcatgatgatgtaatatctgaattatgacatacactgc

SEQ ID NO: 153334 - DNA, 9512 bp, Homo sapiens
  Payload ID: 10164
  Gene Symbol: MBD5
  Gene Name: methyl-CpG binding domain protein 5
  Uniprot ID: Q9P267
  ENST ID: ENST00000407073
  CDS Start-End: 998-5482
aaccaaccagccacccgtcagagagggacatgcgcactccagggaaggcactcaaaagtggggggcaggaaagatgtacattgaagatgtcagtttctacatgtgggaagtagacattgaaggctttatggtttacagacaagatctttagaagataagcactaaaggaccaaggaaataaataccagaaatcaagaagagcacacactattttccttcatcaatccatagaaccctaatgcttctttagttccatcaaacacagaggaatgaccaccatggcagatggcaacagaggatgtcaacaattttttggagagagaagaggtactcccttatagggactcgtaaagacatagagcatctggaaattaactgcctccattacactgctgagtcacacacaacgcttgttatgttttcatcacttctctccagaaggctacattattggaattttgaagtcatgaaaacatcagatgaaccaacctgcaacaccttggattcagattggaagataaagagaaagtttaaagaatgtggcctataaaggcgggtacctggaaatattaaccgactcacactgtaaaaatgagaccagtttctaaacaatagagattgtcttagtacaacatcaaggttcaagacaaatgttgaactaaaaactttacactccccacccccacttcagacaggtaccagcattggtgaattatgattttccttagtcagaagcactcatttttacccatgtagaccatccttaggaattaaatattggttatttaatgtagattataatgggaagctgatttttttcacaatggcatatttcaaggacttggttccaaactgagctgaagcttcccaatgcgttttgtacagtctgggaaaaactgtgctgcactggcccacttttgaaggccatcatgctctgtaatataaggatatcatcttattgctgatatctttggagagtccctagcagacacagaaaatgaatggaggcaaagagtgtgacggaggggacaaggaaggaggtcttccagctatacaagttcctgtgggttggcagcgtcgtgtggatcaaaatggagtgctttatgtcagtcccagtgggtctttgttatcttgcttggagcaggttaaaacatacctgcttactgatggaacatgcaagtgtggcttggaatgtcctcttattcttcccaaggtatttaattttgatcctggagctgctgtgaaacagagaaccgcagaagatgttaaggcagatgaagatgtcacaaagctatgcatacataaaagaaaaattattgcagtggccacacttcataaaagcatggaagccccacatccttctctggtgctcaccagtcccggaggaggaacaaatgcaactccagtagtaccttctcgggcagcaactccaagatcagtaagaaataagtctcatgaaggaattacaaattctgtaatgcctgaatgtaagaatcctttcaagttaatgattggatcatcaaatgccatgggaaggctatatgtacaagaactgcctggaagccaacaacaagaactccaccctgtctacccccgacagagattgggcagcagtgaacatggacagaaatctccattccgtggcagccatggaggcctgcccagcccagcgtcatcaggttcccagatatatggagatggttcaatctctccaaggactgacccacttggaagtcctgatgttttcacaagaagtaatcctggttttcatggagctcccaattctagtcctattcacctgaataggactcctctttctccaccttcagtaatgctacatggttctcctgtacagtcatcctgtgcaatggctggaaggactaatatacctctttccccaaccttgactacaaagagtccagtaatgaaaaaaccaatgtgtaatttttcaactaatatggaaataccacgagcaatgttccaccacaaaccaccccaaggcccacctccccctcctccaccttcttgtgctcttcagaaaaagccattaacatctgagaaagatccacttggcattcttgaccctattcctagtaaaccagtgaatcagaaccctgttatcattaatccaaccagtttccattcaaatgtccactctcaggtacctatgatgaatgtaagcatgcctcctgctgttgttcctttgccaagtaatctcccattgccaactgtaaaacctggtcacatgaatcatgggagtcatgtacaaagagttcagcattcagcttcaacctccctgtccccttctccagtgacatcccccgtgcacatgatggggactggaattggaaggattgaggcatcgccccaaagatcacgctcatcttccacatcatcagatcatggaaatttcatgatgccacctgtaggaccccaggccacttctagtggtattaaggttccacccaggtcaccaaggtcaacaatagggtccccaaggccatcaatgccatcaagcccttctaccaagtccgatggacatcatcagtacaaggatatccctaacccattaattgctggaataagtaatgtactaaataccccaagcagtgcagcttttcctactgcatctgccggaagtagttctgtaaagagtcagcctggtttgctgggaatgcctttaaatcagatcttgaaccagcacaatgctgcctcctttccagcaagtagtttactctcagcagcagccaaagcacagctagcaaatcaaaacaaacttgctggtaacaacagtagcagcagtagcaattctggagctgttgccggcagtggcaacactgaaggacatagcactttaaacaccatgttccctcctactgccaacatgcttctcccaacaggtgaagggcaaagtggtcgagcagcactaagagataagctgatgtctcagcaaaaagacgcattgcggaaaagaaaacaaccacctacgacagtgttgagtttgctcagacagtctcaaatggatagttctgcagttcctaaacctggacctgacttgctaaggaagcagggtcagggttcatttcccatcagttcaatgtctcagttactacagtctatgagttgtcaaagctctcacttgagtagcaatagtaccccgggttgtggggcctcaaatactgctttgccttgctctgctaaccagctgcattttacagatcccagtatgaactctagtgttcttcagaacatacctttaagaggggaagccgtgcactgccacaatgcaaacactaactttgttcacagtaacagtccagtccccaaccaccatcttgcaggtttaataaatcagattcaggctagcgggaactgtgggatgctcagtcagtcgggcatggctttaggaaattccttacatcccaatccacctcagtcaagaatttcaacgtcctccactccagtgataccaaacagcattgttagcagctataatcaaacaagttctgaagcaggcggttcaggaccatcatcctccatagccatagcgggcaccaaccaccctgccatcacaaagacaacatctgttcttcaagatggcgtcatagtcaccactgcagctggaaacccactgcagagtcagctacccattgggagtgattttccttttgttggccaggagcacgcacttcattttccatccaacagcacttcaaacaaccatcttccacaccccttgaaccccagcctcctcagttctctacctatctctttgccagtgaatcaacagcatctcctaaaccagaatctattaaatatcctccagccttcagcaggagaaggtgatatgtcatcaataaacaatactttgagtaaccatcaactgactcatctacagtcgctgttaaacaacaatcagatgtttcctccaaatcagcaacagcagcaacttctccaggggtaccagaatctccaggcgttccaaggacagtccacaattccttgcccagctaacaataaccccatggcttgtctgtttcagaactttcaggtgagaatgcaggaagatgcagctctcctaaacaaaagaataagcactcagcctgggctcacagcacttcctgagaatccaaacactacacttccaccttttcaagatacaccttgtgagttgcaaccgaggattgacccatctcttggtcaacaggtgaaggatggcctcgttgtgggtggcccaggtgatgcttccgtagatgccatttacaaagcagttgtcgatgcagccagcaaaggaatgcaggttgtcatcaccactgcagtcaacagtacaactcagatcagccccattccagctctgagtgccatgagtgccttcactgcctcaattggtgacccattaaatctctccagtgctgtcagtgcggtcattcatggacggaacatgggaggtgttgatcatgatggtaggctgaggaattcaagaggggctcggctgcccaagaatctagaccatgggaaaaatgtgaacgaaggagatgggtttgaatatttcaagtcagcaagttgccacacatccaaaaaacagtgggacggggagcaaagccccagaggggagcgaaacaggtggaagtacgaggaatttttagatcatccaggccatatccacagtagtccttgtcatgaaaggcccaacaatgtctctacactgccatttctgcctggggaacagcacccaatactgttaccaccaagaaactgtccaggggataaaattctagaggaaaatttcaggtataataactacaaaagaactatgatgagttttaaggagagactagagaacactgtggaaagatgtgcacacataaatgggaatagacctcgacagagtcggggatttggagagctgctaagcactgcaaagcaagacctggtcctagaggagcagtctccaagttcctcaaatagtttggaaaattctctggtcaaagactacatccattacaatggagactttaatgccaaaagcgttaatgggtgtgtgcctagcccttcagatgctaaaagcattagtagtgaagatgacctaaggaacccagactccccctcttcaaatgaattgatacattatagaccaaggacgttcaatgttggcgacttggtctggggccaaatcaaaggactgacttcctggcctggaaaattagtaagagaagacgacgttcacaattcatgtcaacaaagccccgaggaagggaaggtggagcccgagaagttgaagacactaacagaaggtttggaagcctacagccgtgtccggaaaaggaacagaaaaagtggaaagctaaataaccatttagaagctgctattcatgaggccatgagtgaactggacaaaatgtctgggactgtacaccaaatcccacagggtgacagacaaatgagaccccccaaacccaagaggaggaagatctccagataacagagactactccactaatgcgcagtgtttattaaaggaacatgcacagatgtatctgtatataggtattgatatagccacagttatatcaatatttagactatggcagatagctaccaccaccacagggtgctaaaagaaacagtgatacaaaatttttttgatcaggaaggataatgaatgctggaaaagccaatcaaagtctctgtgtgatgagagtgatcaatggtcaagagattactgagaaactctttttctataatactaaattgtgattataagaaatagtccaaatgtttctgaagaattttcaatgttgtatatagaaaatacagaatttcatggtgatatcagaaatgtaaatattgtacagtattgtcatgtacaagcgtacctaatgcacactttatcttttattgtacaaagaaatagtgtacaaaattctttggtttctatggagtacacctaccagagactaccagtgtaaagtgataaataaaaatacaacctaaatgcttttctatgataatgtaaaagatgctgtttttgtatttaacagcagagaaaaggcatgatgatgtaatatctgaattatgacatacactgcacaccactgagtgtccatttatattgtctgtttggaatgaaccttgcctggaagcactggactcaatttcgggtgtctaggaaattgcaactttgcagatttctaaagggatgagggctcacaggtctaaattaagaattcagaaactgcaaccatttgttgcatattttttttacctaagttttaaaatagaataggttttataaaaaaaaatcttagatggaatattttactcagccatttctgtagttaacatttgatagccacctgttgaagcagatagcttatactgactgcaccaccgctggtgctcagaattgagggtttttttgcaaatgatatctgacaaggtaaaactttctatttccgtacatggaggcaaaaaccccactttgcaaccattatcagaggtaagattgataataattcatttttttgtagtggcaaatataaatatgaatcatcaaagcaagtttcatatccattcatcagtattacttaacccagaagttaaggtggcttacggaattattagcaatggtaatttttttatcagtattgtgtaacatatcagatttattttatttaaagaattatttataccattaacagattcttatatatattaatgtggcaaaaatgtgcaggttaaatctattaaccaaattatttatattatattaagtaagaaaaaatgtgaaacaaatgtagagagaaaatactacattacaagtatacaaacctaaaactgtgagccattgtaaagtacaaggtaattaataagaaatgtagcacaacataattttccgtcttcttctcacaatttttgtggtggtggtattaccctatcttccaggcagttaagcaaagtttaggcttccagcctgacttcagttgatggattgtcaaaagaagggatctattatccctttattcttggaaccaccagtccctgccccaaacccttaaacccctagagagcactgcctcgtcctctagcctggggctcacacaacagtctgccactcaggctgctaggagattctccaatagcaggctcagcacctcaaactgcccaccacctctcctactgctcctctcccacccaccacccaaactcctcagtcctgtcatgtagcagagttccagtaactcaggaaaatggagaccaaggtcattccttaagttggtttcttggggccacagcacagagcatgccacctgggctcacttttgatagcaacagctcttagttattcccctaggtctcctgtgtctctctgtccctctgttcctactttcaacctacccccaagcctgatggaatgcaactggctaccctgggcttcatgacctcaaagtaggaacccttcgttctgggggtaggttcattttgtctctcttgtaatggtgggattgcctgcccagttccttcatgcagtcacatgaagtaatcttttgtgtagtttagttgacacatgtttataagttaaaagttgatgtggctagtatgtttaaaccattaatgtccattttttttgcaccaacctgtttttctactgttttttcctacacatttttgtttattcacagacagacagacatgtgtgtttgtatgctgggtgtgtctgtatgtgtgtatgtgttgatatgtaaattttttagcctttgcttttctgtcttcaggctgagtttgtgttgaccaagccttctttttggtattttgagctaattcagtttgtgcttccctcccattgtatactttacataagtagaccatgtaaagtatgtttgtgcccatgatttcactggttgctatggctttgatatgggtgctaggtgtagtagtttcagtccacgtgggtttttttcatctctcttagagttatatggttttgtgtaagcagttaatgtaaatattgttagcattacaggtcatacagtgctgtaacatttttttaaatgttgcacctactttacaattaaaaaattggtcactcgcacttcaattttgcccatagagccatttctttgtctttgtattgaagccaattcatttttttaaatgaaggctaggccttctatgttaccaaaatttttattccctaaaataaactttttaagaaacaaatccaagaatggaaacagatgaaaaattttttcttctttaaagaacataatagttcctgctggaaaaggaaatctaattttattttgtgtcccttaacagtcctaggaagcacaaggagaataaactaaacctctaagaaggttttaaaaattatttcaaatgagtgaaaattaactgagcagcttttgtgtgatttgtcttgtttgtagcattaaaagcaaaccagggtttttatttatttaaaggaacatttttggcttgtacttttcagtgccattatgaatgaaaatgttttaagaacattcatcccttgtgatatcatgggccacttttagtcttttatttggaccctgactttgagtttttgctatgcctgttttttaagtaaacacagccttcttatttgaacgtaacactgcagaattgcaggaagagaaaagggcagttagttatttcactttctgtaagttttaggaagattcttatatcctacgaggtgactcatgtttcattttagaccatgatagcacattgttgttaactttggtaatcttccatgcagtttgcagtgttcccttgcaagtcacaagcatatatgcattaagattttaaaatctaagatgcttaagatgttggtggcattgctctttctgaaaagaaagacaaaatactagaccttgctgaaaattggatatcttatttactttgcccatttatgcccgaatggtgtaatgcaagactcaagacttttcaatgtagtatatcaaatgagttgtgcattgattcatttgggggacatgaacaaaaattatcaaccagccagaactgtaatatttaattagttcatctttttctttcattcactctatcacatttgcattagccaaagagataagaacattagtaattcatatgtgtaaacaacccagaagtgaatattaaatcagtgagccaaaaagcaataaacaactcgagcatgggaaatcctgctaacagtggggagtctgatatagaaaaaatatataaaaagcattatcttcaaatatgaaagattaatttgtatctactgtaaatatgtattaccagccttatctgcatttatacacactgtgtgtgtacctcagtgaccttttataaaccggaaaaatggttgatttaataatttgttatgtaaatacaaagttgtctataaattggaaaatttgatgccagatggcttcataatatacaaatgtgttttgtaacatcatgcctttatggattaagtataaatacactggattgtctatgta

SEQ ID NO: 153335 - DNA, 4343 bp, Homo sapiens
  Payload ID: 10164
  Gene Symbol: MBD5
  Gene Name: methyl-CpG binding domain protein 5
  ENST ID: ENST00000416015
  CDS Start-End: 1-3194
ccaattctagtcctattcacctgaataggactcctctttctccaccttcagtaatgctacatggttctcctgtacagtcatcctgtgcaatggctggaaggactaatatacctctttccccaaccttgactacaaagagtccagtaatgaaaaaaccaatgtgtaatttttcaactaatatggaaataccacgagcaatgttccaccacaaaccaccccaaggcccacctccccctcctccaccttcttgtgctcttcagaaaaagccattaacatctgagaaagatccacttggcattcttgaccctattcctagtaaaccagtgaatcagaaccctgttatcattaatccaaccagtttccattcaaatgtccactctcaggtacctatgatgaatgtaagcatgcctcctgctgttgttcctttgccaagtaatctcccattgccaactgtaaaacctggtcacatgaatcatgggagtcatgtacaaagagttcagcattcagcttcaacctccctgtccccttctccagtgacatcccccgtgcacatgatggggactggaattggaaggattgaggcatcgccccaaagatcacgctcatcttccacatcatcagatcatggaaatttcatgatgccacctgtaggaccccaggccacttctagtggtattaaggttccacccaggtcaccaaggtcaacaatagggtccccaaggccatcaatgccatcaagcccttctaccaagtccgatggacatcatcagtacaaggatatccctaacccattaattgctggaataagtaatgtactaaataccccaagcagtgcagcttttcctactgcatctgccggaagtagttctgtaaagagtcagcctggtttgctgggaatgcctttaaatcagatcttgaaccagcacaatgctgcctcctttccagcaagtagtttactctcagcagcagccaaagcacagctagcaaatcaaaacaaacttgctggtaacaacagtagcagcagtagcaattctggagctgttgccggcagtggcaacactgaaggacatagcactttaaacaccatgttccctcctactgccaacatgcttctcccaacaggtgaagggcaaagtggtcgagcagcactaagagataagctgatgtctcagcaaaaagacgcattgcggaaaagaaaacaaccacctacgacagtgttgagtttgctcagacagtctcaaatggatagttctgcagttcctaaacctggacctgacttgctaaggaagcagggtcagggttcatttcccatcagttcaatgtctcagttactacagtctatgagttgtcaaagctctcacttgagtagcaatagtaccccgggttgtggggcctcaaatactgctttgccttgctctgctaaccagctgcattttacagatcccagtatgaactctagtgttcttcagaacatacctttaagaggggaagccgtgcactgccacaatgcaaacactaactttgttcacagtaacagtccagtccccaaccaccatcttgcaggtttaataaatcagattcaggctagcgggaactgtgggatgctcagtcagtcgggcatggctttaggaaattccttacatcccaatccacctcagtcaagaatttcaacgtcctccactccagtgataccaaacagcattgttagcagctataatcaaacaagttctgaagcaggcggttcaggaccatcatcctccatagccatagcgggcaccaaccaccctgccatcacaaagacaacatctgttcttcaagatggcgtcatagtcaccactgcagctggaaacccactgcagagtcagctacccattgggagtgattttccttttgttggccaggagcacgcacttcattttccatccaacagcacttcaaacaaccatcttccacaccccttgaaccccagcctcctcagttctctacctatctctttgccagtgaatcaacagcatctcctaaaccagaatctattaaatatcctccagccttcagcaggagaaggcaagtctgagatcaacctccaccctttaggttttctcaacccgaatgtaaacgctgctttagcttttctctccagtgacatggatgggcaggtattgcagcctgttcactttcagctcttagcagccttgcttcagaaccaagcccaagcagctgccatgcttcccctgccatctttcaatctgaccatctcagatcttttgcaacagcaaaatacccctttaccctcattaacacagatgacagccccaccagaccatttgccaagcaatcagtcagacaacagccgagctgagacccttttaaccagccccctggggaaccctttaccaagctttgcaggcagtgacactacttttaaccccctgttcctcccagctgtcaatggggcctcaggattaatgaccttgaatccccagctgttgggaggtgtcctgaactcggcatcggccaacaccgctaatcatccagaggtttccatagcaacctcctcccaggcaaccactaccacaaccactacatcatcagcagtggcagcactgactgtctcaacacttggtgggacagcagtggtgtcaatggcagaaacattgctgaatatatctaataatgctgggaatacacctggtccagctaaactcaacagtaactctgtggtgccacagctacttaaccctctactggggacaggtctacttggtgatatgtcatcaataaacaatactttgagtaaccatcaactgactcatctacagtcgctgttaaacaacaatcagatgtttcctccaaatcagcaacagcagcaacttctccaggggtaccagaatctccaggcgttccaaggacagtccacaattccttgcccagctaacaataaccccatggcttgtctgtttcagaactttcaggtggagcccgagaagttgaagacactaacagaaggtttggaagcctacagccgtgtccggaaaaggaacagaaaaagtggaaagctaaataaccatttagaagctgctattcatgaggccatgagtgaactggacaaaatgtctgggactgtacaccaaatcccacagggtgacagacaaatgagaccccccaaacccaagaggaggaagatctccagataacagagactactccactaatgcgcagtgtttattaaaggaacatgcacagatgtatctgtatataggtattgatatagccacagttatatcaatatttagactatggcagatagctaccaccaccacagggtgctaaaagaaacagtgatacaaaatttttttgatcaggaaggataatgaatgctggaaaagccaatcaaagtctctgtgtgatgagagtgatcaatggtcaagagattactgagaaactctttttctataatactaaattgtgattataagaaatagtccaaatgtttctgaagaattttcaatgttgtatatagaaaatacagaatttcatggtgatatcagaaatgtaaatattgtacagtattgtcatgtacaagcgtacctaatgcacactttatcttttattgtacaaagaaatagtgtacaaaattctttggtttctatggagtacacctaccagagactaccagtgtaaagtgataaataaaaatacaacctaaatgcttttctatgataatgtaaaagatgctgtttttgtatttaacagcagagaaaaggcatgatgatgtaatatctgaattatgacatacactgcacaccactgagtgtccatttatattgtctgtttggaatgaaccttgcctggaagcactggactcaatttcgggtgtctaggaaattgcaactttgcagatttctaaagggatgagggctcacaggtctaaattaagaattcagaaactgcaaccatttgttgcatattttttttacctaagttttaaaatagaataggttttataaaaaaaaatcttagatggaatattttactcagccatttctgtagttaacatttgatagccacctgttgaagcagatagcttatactgactgcaccaccgctggtgctcagaattgagggtttttttgcaaatgatatctgacaaggtaaaactttctatttccgtacatggaggcaaaaaccccactttgcaaccattatcagaggtaagattgataataattcatttttttgtagtggcaaatataaatatgaatcatcaaagcaagtttcatatccattcatcagtattacttaacccagaagttaaggtggcttacggaattattagcaatggt

SEQ ID NO: 153336 - DNA, 663 bp, Homo sapiens
  Payload ID: 10164
  Gene Symbol: MBD5
  Gene Name: methyl-CpG binding domain protein 5
  ENST ID: ENST00000630352
  CDS Start-End: 1-233
actccccctcttcaaatgaattgatacattatagaccaaggacgttcaatgttggcgacttggtctggggccaaatcaaaggactgacttcctggcctggaaaattagtaagagaagacgacgttcacaattcatgtcaacaaagccccgaggaagggaaggtacaccaaatcccacagggtgacagacaaatgagaccccccaaacccaagaggaggaagatctccagataacagagactactccactaatgcgcagtgtttattaaaggaacatgcacagatgtatctgtatataggtattgatatagccacagttatatcaatatttagactatggcagatagctaccaccaccacagggtgctaaaagaaacagtgatacaaaatttttttgatcaggaaggataatgaatgctggaaaagccaatcaaagtctctgtgtgatgagagtgatcaatggtcaagagattactgagaaactctttttctataatactaaattgtgattataagaaatagtccaaatgtttctgaagaattttcaatgttgtatatagaaaatacagaatttcatggtgatatcagaaatgtaaatattgtacagtattgtcatgtacaagcgtacctaatgcacactttatcttttattgtacaaagaaat

SEQ ID NO: 153337 - DNA, 914 bp, Homo sapiens
  Payload ID: 10164
  Gene Symbol: MBD5
  Gene Name: methyl-CpG binding domain protein 5
  ENST ID: ENST00000628572
  CDS Start-End: 1-342
ccaagttcctcaaatagtttggaaaattctctggtcaaagactacatccattacaatggagactttaatgccaaaagcgttaatgggtgtgtgcctagcccttcagatgctaaaagcattagtagtgaagatgacctaaggaacccagactccccctcttcaaatgaattgatacattatagaccaaggacgttcaatgttggcgacttggtctggggccaaatcaaaggactgacttcctggcctggaaaattagtaagagaagacgacgttcacaattcatgtcaacaaagccccgaggaagggaaggtataccaatctttatccattgtcaaatactaacctttgttcagatatcaattattgctttttgttatcatcactttggattctttggatttgaaattaggattcttcatgactcattgaggtctcacaagcttctggagcataaaatgaagaggggatggttatagtcaacaaaatgtcgtatcaacaaggggtggagcccgagaagttgaagacactaacagaaggtttggaagcctacagccgtgtccggaaaaggaacagaaaaagtggaaagctaaataaccatttagaagctgctattcatgaggccatgagtgaactggacaaaatgtctgggactgtacaccaaatcccacagggtgacagacaaatgagaccccccaaacccaagaggaggaagatctccagataacagagactactccactaatgcgcagtgtttattaaaggaacatgcacagatgtatctgtatataggtattgatatagccacagttatatcaatatttagactatggcagatagctaccaccaccacagggtgctaaaagaaacagtgatacaaaatttttttgatcaggaaggataatgaatgctggaaa

SEQ ID NO: 153338 - DNA, 5610 bp, Homo sapiens
  Payload ID: 10164
  Gene Symbol: MBD5
  Gene Name: methyl-CpG binding domain protein 5
  Uniprot ID: Q9P267
  ENST ID: ENST00000627651
  CDS Start-End: 1099-3654
atgtacattgaagatgtcagtttctacatgtgggaagtagacattgaaggctttatggtttacagacaagatctttagaagataagcactaaaggaccaaggaaataaataccagaaatcaagaagagcacacactattttccttcatcaatccatagaaccctaatgcttctttagttccatcaaacacagaggaatgaccaccatggcagatggcaacagaggatgtcaacaattttttggagagagaagaggtactcccttatagggactcgtaaagacatagagcatctggaaattaactgcctccattacactgctgagtcacacacaacgcttgttatgttttcatcacttctctccagaagaagttggaaacccacatgcctatagaggccaggctgatgggaatgaagcaggaagctattgcagtgaactggagcgccaaatcctttctggaggagcagccactgctccattccagataattgttgcaaggcaggaatgttggcctagtgttaccatattgtccagtttctcaggctacattattggaattttgaagtcatgaaaacatcagatgaaccaacctgcaacaccttggattcagattggaagataaagagaaagtttaaagaatgtggcctataaaggcgggtacctggaaatattaaccgactcacactgtaaaaatgagaccagtttctaaacaatagagattgtcttagtacaacatcaaggttcaagacaaatgttgaactaaaaactttacactccccacccccacttcagacaggtaccagcattggtgaattatgattttccttagtcagaagcactcatttttacccatgtagaccatccttaggaattaaatattggttatttaatgtagattataatgggaagctgatttttttcacaatggcatatttcaaggacttggttccaaactgagctgaagcttcccaatgcgttttgtacagtctgggaaaaactgtgctgcactggcccacttttgaaggccatcatgctctgtaatataaggatatcatcttattgctgatatctttggagagtccctagcagacacagaaaatgaatggaggcaaagagtgtgacggaggggacaaggaaggaggtcttccagctatacaagttcctgtgggttggcagcgtcgtgtggatcaaaatggagtgctttatgtcagtcccagtgggtctttgttatcttgcttggagcaggttaaaacatacctgcttactgatggaacatgcaagtgtggcttggaatgtcctcttattcttcccaaggtatttaattttgatcctggagctgctgtgaaacagagaaccgcagaagatgttaaggcagatgaagatgtcacaaagctatgcatacataaaagaaaaattattgcagtggccacacttcataaaagcatggaagccccacatccttctctggtgctcaccagtcccggaggaggaacaaatgcaactccagtagtaccttctcgggcagcaactccaagatcagtaagaaataagtctcatgaaggaattacaaattctgtaatgcctgaatgtaagaatcctttcaagttaatgattggatcatcaaatgccatgggaaggctatatgtacaagaactgcctggaagccaacaacaagaactccaccctgtctacccccgacagagattgggcagcagtgaacatggacagaaatctccattccgtggcagccatggaggcctgcccagcccagcgtcatcaggttcccagatatatggagatggttcaatctctccaaggactgacccacttggaagtcctgatgttttcacaagaagtaatcctggttttcatggagctcccaattctagtcctattcacctgaataggactcctctttctccaccttcagtaatgctacatggttctcctgtacagtcatcctgtgcaatggctggaaggactaatatacctctttccccaaccttgactacaaagagtccagtaatgaaaaaaccaatgtgtaatttttcaactaatatggaaataccacgagcaatgttccaccacaaaccaccccaaggcccacctccccctcctccaccttcttgtgctcttcagaaaaagccattaacatctgagaaagatccacttggcattcttgaccctattcctagtaaaccagtgaatcagaaccctgttatcattaatccaaccagtttccattcaaatgtccactctcaggtacctatgatgaatgtaagcatgcctcctgctgttgttcctttgccaagtaatctcccattgccaactgtaaaacctggtcacatgaatcatgggagtcatgtacaaagagttcagcattcagcttcaacctccctgtccccttctccagtgacatcccccgtgcacatgatggggactggaattggaaggattgaggcatcgccccaaagatcacgctcatcttccacatcatcagatcatggaaatttcatgatgccacctgtaggaccccaggccacttctagtggtattaaggttccacccaggtcaccaaggtcaacaatagggtccccaaggccatcaatgccatcaagcccttctaccaagtccgatggacatcatcagtacaaggatatccctaacccattaattgctggaataagtaatgtactaaataccccaagcagtgcagcttttcctactgcatctgccggaagtagttctgtaaagagtcagcctggtttgctgggaatgcctttaaatcagatcttgaaccagcacaatgctgcctcctttccagcaagtagtttactctcagcagcagccaaagcacagctagcaaatcaaaacaaacttgctggtaacaacagtagcagcagtagcaattctggagctgttgccggcagtggcaacactgaaggacatagcactttaaacaccatgttccctcctactgccaacatgcttctcccaacaggtgaagggcaaagtggtcgagcagcactaagagataagctgatgtctcagcaaaaagacgcattgcggaaaagaaaacaaccacctacgacagtgttgagtttgctcagacagtctcaaatggatagttctgcagttcctaaacctggacctgacttgctaaggaagcagggtcagggttcatttcccatcagttcaatgtctcagttactacagtctatgagttgtcaaagctctcacttgagtagcaatagtaccccgggttgtggggcctcaaatactgctttgccttgctctgctaaccagctgcattttacagatcccagtatgaactctagtgttcttcagaacatacctttaagaggggaagccgtgcactgccacaatgcaaacactaactttgttcacagtaacagtccagtccccaaccaccatcttgcaggtttaataaatcagattcaggctagcgggaactgtgggatgctcagtcagtcgggcatggctttaggaaattccttacatcccaatccacctcagtcaagaatttcaacgtcctccactccagtgataccaaacagcattgttagcagctataatcaaacaagttctgaagcaggtatggttttattagaaaaaagtacccaaaggtactaaacttttctacttttttaaaaaatttgtaccaaaatatttattatgataagaaatgatcctttccccattgtgaaattctcttcatttctttagtatttataattttatttacagaatgctagggatttgtctattgggaagattaacagctaagaggatttcatgtgtttccattatttgttgtcaatctgtgtcattttgaatattgttcgactttcacttggttttataaccattggactccaaactgcaaaataagccatacgaggcagggtttcctggtttgtgagacatgtccttggtctatgccaatataaaagccatctccctagcttttgtttgtattcaggtaaatgaagtttatcttggaaaaatccaaaaaggcaaaaataaatggattttttttcttgctgctgaacagaagtaggtgaatggataggaaaaggtaactagaagttgtacgaagtagaaggctgtcttctaatgtgttttcttatcctagtttgctatccttattatttgtttgagaaaactcaaaaatggatattggctactcccttttaaaaaaaaagctaataatttaagctttctaataaaaaaaaggcttgaaaacctgatttccagaatttttaatcttgaaattgttttttgagtttcttgtagaactaaaccatttttatcattgacattaaggttttgaacccaaatctattgtatctcttcagccaccattaaggaaacaaatttatttaaaagtaggcatattagaaaaagacctgtattttgtgcaatagagtcctcagaaattgttataaaaactgtacagaagcacctaagaggtaaatgtgttgaggcatcagaaaatttgactatgaaaacattattcaacactaatgatttatgagaaatgacaaggaggaaataaaagatggttgtaaagacattattgttcactatgaaaacagtgtgctatgaaaaccagattgctactgggaatgagaaaactgctgaggtttttaataataagctagtgtgtaggtataataccgtcatgctggagaagcattctaacccacatgtctttgttgctgatagtaaaagcgttttccttcctagtgttgccatttacacctgccatccttcacatcttgtgttatgtgttatgttttgatgtcactatttaatgaagaactattcaatgatctcttatgttaaatatatatatggtttagaagatatttgaaattattagtgccttcttgatattcttagtttaaagaatctcataaaactttatgttttatgtgtctaacagtatacttatcccatagggggcttccagcttttcactcactcatcatatttctttttagataactcgacacaaatgaaaattttattttatctatttagcagaaaagtcacacaaagttcataactatttaaaagtacaccatatttattgagcataccttaaataattttgatgggacatttttagtctcattgcattatacagttttgatatcccctacctcagtttacttcatttcaggtctgagttcatgtgcaaagtgtatgtatttcattgatgtatttcaattcatctataatggaaaagaccaacatttacttatattcttgtttcttctgatggtcaagtttagacttatttaatactgttttggtcatttattttttttgtttcatgtatctttgtaatacatctgacctgtactgttactgctgggggtgtcaaagcatataggttaaaaatttattagtgtcagaaaagtgtgagcatataaatagctaaaaaggataaggatacatgtctagaaatgatatgaatatgaccaactagtgtaaactaacaggaagtatgtgcttaataaaaatctaagtagaatttttaaagtattaaacctaataaaattaaatactaattaacgtgca

SEQ ID NO: 153339 - DNA, 4130 bp, Homo sapiens
  Payload ID: 10164
  Gene Symbol: MBD5
  Gene Name: methyl-CpG binding domain protein 5
  ENST ID: ENST00000629878
  CDS Start-End: 313-3573
cttcagacaggtaccagcattggtgaattatgattttccttagtcagaagcactcatttttacccatgtagaccatccttaggaattaaatattggttatttaatgtagattataatgggaagctgatttttttcacaatggcatatttcaaggacttggttccaaactgagctgaagcttcccaatgcgttttgtacagtctgggaaaaactgtgctgcactggcccacttttgaaggccatcatgctctgtaatataaggatatcatcttattgctgatatctttggagagtccctagcagacacagaaaatgaatggaggcaaagagtgtgacggaggggacaaggaaggaggtcttccagctatacaagttcctgtgggttggcagcgtcgtgtggatcaaaatggagtgctttatgtcagtcccagtgggtctttgttatcttgcttggagcaggttaaaacatacctgcttactgatggaacatgcaagtgtggcttggaatgtcctcttattcttcccaaggtatttaattttgatcctggagctgctgtgaaacagagaaccgcagaagatgttaaggcagatgaagatgtcacaaagctatgcatacataaaagaaaaattattgcagtggccacacttcataaaagcatggaagccccacatccttctctggtgctcaccagtcccggaggaggaacaaatgcaactccagtagtaccttctcgggcagcaactccaagatcagtaagaaataagtctcatgaaggaattacaaattctgtaatgcctgaatgtaagaatcctttcaagttaatgattggatcatcaaatgccatgggaaggctatatgtacaagaactgcctggaagccaacaacaagaactccaccctgtctacccccgacagagattgggcagcagtgaacatggacagaaatctccattccgtggcagccatggaggcctgcccagcccagcgtcatcaggttcccagatatatggagatggttcaatctctccaaggactgacccacttggaagtcctgatgttttcacaagaagtaatcctggttttcatggagctcccaattctagtcctattcacctgaataggactcctctttctccaccttcagtaatgctacatggttctcctgtacagtcatcctgtgcaatggctggaaggactaatatacctctttccccaaccttgactacaaagagtccagtaatgaaaaaaccaatgtgtaatttttcaactaatatggaaataccacgagcaatgttccaccacaaaccaccccaaggcccacctccccctcctccaccttcttgtgctcttcagaaaaagccattaacatctgagaaagatccacttggcattcttgaccctattcctagtaaaccagtgaatcagaaccctgttatcattaatccaaccagtttccattcaaatgtccactctcaggtacctatgatgaatgtaagcatgcctcctgctgttgttcctttgccaagtaatctcccattgccaactgtaaaacctggtcacatgaatcatgggagtcatgtacaaagagttcagcattcagcttcaacctccctgtccccttctccagtgacatcccccgtgcacatgatggggactggaattggaaggattgaggcatcgccccaaagatcacgctcatcttccacatcatcagatcatggaaatttcatgatgccacctgtaggaccccaggccacttctagtggtattaaggttccacccaggtcaccaaggtcaacaatagggtccccaaggccatcaatgccatcaagcccttctaccaagtccgatggacatcatcagtacaaggatatccctaacccattaattgctggaataagtaatgtactaaataccccaagcagtgcagcttttcctactgcatctgccggaagtagttctgtaaagagtcagcctggtttgctgggaatgcctttaaatcagatcttgaaccagcacaatgctgcctcctttccagcaagtagtttactctcagcagcagccaaagcacagctagcaaatcaaaacaaacttgctggtaacaacagtagcagcagtagcaattctggagctgttgccggcagtggcaacactgaaggacatagcactttaaacaccatgttccctcctactgccaacatgcttctcccaacaggtgaagggcaaagtggtcgagcagcactaagagataagctgatgtctcagcaaaaagacgcattgcggaaaagaaaacaaccacctacgacagtgttgagtttgctcagacagtctcaaatggatagttctgcagttcctaaacctggacctgacttgctaaggaagcagggtcagggttcatttcccatcagttcaatgtctcagttactacagtctatgagttgtcaaagctctcacttgagtagcaatagtaccccgggttgtggggcctcaaatactgctttgccttgctctgctaaccagctgcattttacagatcccagtatgaactctagtgttcttcagaacatacctttaagaggggaagccgtgcactgccacaatgcaaacactaactttgttcacagtaacagtccagtccccaaccaccatcttgcaggtttaataaatcagattcaggctagcgggaactgtgggatgctcagtcagtcgggcatggctttaggaaattccttacatcccaatccacctcagtcaagaatttcaacgtcctccactccagtgataccaaacagcattgttagcagctataatcaaacaagttctgaagcaggcggttcaggaccatcatcctccatagccatagcgggcaccaaccaccctgccatcacaaagacaacatctgttcttcaagatggcgtcatagtcaccactgcagctggaaacccactgcagagtcagctacccattgggagtgattttccttttgttggccaggagcacgcacttcattttccatccaacagcacttcaaacaaccatcttccacaccccttgaaccccagcctcctcagttctctacctatctctttgccagtgaatcaacagcatctcctaaaccagaatctattaaatatcctccagccttcagcaggagaaggtgatatgtcatcaataaacaatactttgagtaaccatcaactgactcatctacagtcgctgttaaacaacaatcagatgtttcctccaaatcagcaacagcagcaacttctccaggggtaccagaatctccaggcgttccaaggacagtccacaattccttgcccagctaacaataaccccatggcttgtctgtttcagaactttcaggtgagaatgcaggaagatgcagctctcctaaacaaaagaataagcactcagcctgggctcacagcacttcctgagaatccaaacactacacttccaccttttcaagatacaccttgtggagcccgagaagttgaagacactaacagaaggtttggaagcctacagccgtgtccggaaaaggaacagaaaaagtggaaagctaaataaccatttagaagctgctattcatgaggccatgagtgaactggacaaaatgtctgggactgtacaccaaatcccacagggtgacagacaaatgagaccccccaaacccaagaggaggaagatctccagataacagagactactccactaatgcgcagtgtttattaaaggaacatgcacagatgtatctgtatataggtattgatatagccacagttatatcaatatttagactatggcagatagctaccaccaccacagggtgctaaaagaaacagtgatacaaaatttttttgatcaggaaggataatgaatgctggaaaagccaatcaaagtctctgtgtgatgagagtgatcaatggtcaagagattactgagaaactctttttctataatactaaattgtgattataagaaatagtccaaatgtttctgaagaattttcaatgttgtatatagaaaatacagaatttcatggtgatatcagaaatgtaaatattgtacagtattgtcatgtacaagcgtacctaatgcacactttatcttttattgtacaaaga

SEQ ID NO: 153340 - DNA, 4282 bp, Homo sapiens
  Payload ID: 10165
  Gene Symbol: MBD6
  Gene Name: methyl-CpG binding domain protein 6
  Uniprot ID: Q96DN6
  ENST ID: ENST00000355673
  CDS Start-End: 357-3368
gcggctgcggcagcgacggcggcggcggcagcggcagcagcctgcgcagtgccttctgggaacggaatccccagggctgcccctggcccccatggcgcatgcgcgggaggccgctcggtgatccgcggcggcggcagcggcgcttcctgctaggaccggccggggccgtaccggaggctcgggctccaccgaccctcctcccaccccctcccactcaccctctgggccgcgactgcgcagggcggggccggccgaaccatgggccgcggtgtgggctaagctggtggccccggctttagactggaccccacaatgtttgcagagatgttcaggcacgcgggagctgattacacacaatgaatgggggcaatgagagcagtggagcagacagagctgggggccctgtggccacatctgtccccatcggctggcagcgctgtgtgcgagagggtgctgtgctctacatcagtccaagtggcacagagctgtcttccttggagcaaacccggagctacctcctcagcgatgggacctgcaagtgcggtctggagtgtccacttaatgtccccaaggttttcaactttgaccctttggccccggtgaccccgggtggggctggggtggggccagcatcagaggaggacatgaccaagctgtgcaaccaccggcggaaagctgttgctatggcaactctgtaccgcagcatggagaccacctgctcacactcttctcctggagagggagcgagcccccaaatgttccacactgtgtccccagggcccccctctgcccgccctccctgtcgagttcctcctacaactccacttaatgggggtcctggctcccttcccccagaaccaccctcagtttcccaggcctttcccactctagcaggccctggggggcttttccccccaaggcttgctgacccagtcccttctgggggcagtagcagcccccgtttcctcccaaggggcaatgccccctctccagccccacctcctccacctgctatcagcctcaatgctccctcatacaactggggagctgccctcagatccagcctggtgccctctgacctgggctctcctccggcccctcatgcctcctcctcaccaccttcagaccctcctctcttccactgtagtgatgccttaacaccccctcccctgcccccgagcaataatctccccgcccaccctggtcctgcctctcagccaccagtgtcttcagccactatgcacctgcccctggtcctggggcccctgggaggggcccccacggtggaggggcctggggcaccccccttccttgctagcagcctactctctgcagcggccaaggcacagcatcccccactaccccctcccagcactttacagggccgaaggccccgtgcccaggcaccctcagcttcccactcctcatcacttcgtccctctcagcgtcgtccccgcagaccccctactgtatttcgattgctagaagggagaggccctcaaacccctagacggagccgtcctcgggcccctgctcctgtcccccaacccttttctctcccggagccatcccaaccaattctcccttctgtgctgtccctgctgggactccccacccctggcccttcccactctgatggaagctttaaccttttggggtcagatgcacaccttcctcctcccccaaccctctcctcagggagccctccccagcccaggcaccccatccagccctccctgcctgggaccaccagtggcagcctcagcagtgtgccaggtgcccctgccccaccagctgcctccaaagccccagtagtccccagccctgtgcttcaaagcccatccgaaggactggggatgggggcaggcccggcctgccctctgcctcccctggctggtggagaggctttccctttccccagccctgagcagggcctggcactgagtggagctggcttccctgggatgcttggggccttgcctctccctctgagtctggggcagcctccaccttctccattgctcaaccacagtttatttggtgtgctgactgggggaggaggacaacctccccctgagcccctgctacccccaccaggaggacctggtcctcccctagccccaggagagcctgaagggccttcgcttttggtggcttccttgcttcctccaccaccctcagaccttcttccacctccttcagcacctcccagcaacctccttgcctctttcctgcccctgttggctctgggccccacagctggggatggggagggatctgcagagggagccgggggtccaagtggggagccattttcaggcttgggagacctgtcccccctacttttccccccactttcagccccccctaccctcatagctttaaattctgcgctgctggctgccaccctggatcccccctcggggacacccccccagccctgtgtcctgagtgccccccaacctggaccacctacctccagtgtcaccacggcaactactgacccgggggcctcctctctgggcaaggccccctccaactcagggagacccccccaactccttagccctctgctgggtgccagcctgctgggtgacctgtcttcactgaccagcagccctggagccctccccagcctgttgcagcctcctggccctcttctctctggccagttggggctgcagctcctccctggggggggagctcctccacccctctcagaggcttctagtcccctagcctgcctgctacagagtctccagatccctccagagcagccagaagccccctgtctaccccccgagagccctgcctcagccctcgaaccagagcctgccaggcctcccctcagtgccttagccccaccccatggttctcccgaccccccagtccctgagctgctcactgggagggggtcagggaaacggggccggaggggaggagggggacttaggggcattaatggtgaggccaggccagcccggggccgaaagcctggcagccggcgggagcctggccgactggccctcaaatgggggacacgtggtggcttcaatggacaaatggaaaggtccccaagaagaacccaccattggcagcataatggggagctggctgaagggggtgctgagcccaaggatccaccccctcccgggccccattctgaggaccttaaggtgcccccgggagtagtcagaaagtctcgtcgtggccgtaggagaaaatacaaccctacccggaacagcaatagctcccgccaggacattaccttggaacccagccctacagcccgagcagctgtccctctgcctccccgggcccgccctggccgtcctgccaaaaacaagaggaggaaactggccccatagcagccatacctggagctggatctgaccctgattggggagagctgagtgctgagccttgggagcccctgccagccacctgcacctgtggacagtgggtgggggcactactccccactcagagcacaaatgcaactccttcccctacaatcccatcctgagccattgcagggggcagggaagttcacccccccccaccacccccccgcccccccgaagccatgtcactgaaaaggcctgggggggatggtatatggccctttccccaccaggcgctaaggggaacacccccttccccaggtcttttatttgtttaagttatttttgcacaaatgactcttttatatttaattcgatttcattgcctcccttcttaaagccaacaggctcagtttacaaacctgtgagctactgttggctgctgccctccttcccagtgaaaggtacaaagcaataagcatcatgcatcctccccttacccctccaacacccctctgcctctggctcaggttgctcaaagcacagatcctctcttaccccgtccccaggtttgaaacacatagcctcatttcaaggtgtagccaggttcccccgactttcctctgggatataaaaaagggggtaagggggcaaagagagccctctgggcctctcctcccatacacactacactgccccttctccccccatcaaaacgctcagagacgttgtgatgatgcgactgaggattatgcaacgtggtccaaccggagcggccagcatgaccagctgtccaggggctgcctcctgccttttcttttgtaaagacaagacccttgggagttttaattctgttttgtacttgccctgtggggcctccactgcttttctatgggagacactcttaatttaacagatgagaatattttgaaactctg

SEQ ID NO: 153341 - DNA, 544 bp, Homo sapiens
  Payload ID: 10165
  Gene Symbol: MBD6
  Gene Name: methyl-CpG binding domain protein 6
  ENST ID: ENST00000549623
  CDS Start-End: 346-544
atgcgcgggaggccgctcggtgatccgcggcggcggcagcggcgcttcctgctaggaccggccggggccgtaccggaggctcgggctccaccgaccctcctcccaccccctcccactcaccctctgggccgcgactgcgcagggcggggccggccgaaccatgggccgcgtccaagtggcacagagctgtcttccttggagcaaacccggagctacctcctcagcgatgggacctgcaagtgcggtctggagtgtccacttaatgtccccaaggttttcaactttgaccctttggccccggtgaccccgggtggggctggggtggggccagcatcagaggaggacatgaccaagctgtgcaaccaccggcggaaagctgttgctatggcaactctgtaccgcagcatggagaccacctgctcacactcttctcctggagagggagcgagcccccaaatgttccacactgtgtccccagggcccccctctgcccgccctccctgtcgagttcctcctacaactccacttaatgggggtcctggct

SEQ ID NO: 153342 - DNA, 530 bp, Homo sapiens
  Payload ID: 10165
  Gene Symbol: MBD6
  Gene Name: methyl-CpG binding domain protein 6
  ENST ID: ENST00000552659
  CDS Start-End: 1-530
gagagcagtggagcagacagagctgggggccctgtggccacatctgtccccatcggctggcagcgctgtgtgcgagagggtgctgtgctctacatcagtccaagtggcacagagctgtcttccttggagcaaacccggagctacctcctcagcgatgggacctgcaagtgcggtctggagtgtccacttaatgtccccaaggttttcaactttgaccctttggccccggtgaccccgggtggggctggggtggggccagcatcagaggaggacatgaccaagctgtgcaaccaccggcggaaagctgttgctatggcaactctgtaccgcagcatggagaccacctgctcacactcttctcctgggagccctccccagcccaggcaccccatccagccctccctgcctgggaccaccagtggcagcctcagcagtgtgccaggtgcccctgccccaccagctgcctccaaagccccagtagtccccagccctgtgcttcaaagcccatccgaaggactggggatgggggc

SEQ ID NO: 153343 - DNA, 509 bp, Homo sapiens
  Payload ID: 10165
  Gene Symbol: MBD6
  Gene Name: methyl-CpG binding domain protein 6
  ENST ID: ENST00000552255
  CDS Start-End: 374-509
accctctgccccctccgcgtcctctcggcccctttccccggccccatccccactcccccgccctcacctgcccccgccgcttctccctctcactgccagacttctgccttcctcaccgccctcccctcagtgcttcgcccaccctccgcccgccctctccccaagttccttcctacttcgtgcgccttcccctcctcctcaagctgagggaagcagtctgggtgacagggcgccttgttgtgagagggaaagtttggaagccgccagtgtggggtgggagcaatggtgtgggctaagctggtggccccggctttagactggaccccacaatgtttgcagagatgttcaggcacgcgggagctgattacacacaatgaatgggggcaatgagagcagtggagcagacagagctgggggccctgtggccacatctgtccccatcggctggcagcgctgtgtgcgagagggtgctgtgctctacatcagtccaagtggcacagagctgtctt

SEQ ID NO: 153344 - DNA, 387 bp, Homo sapiens
  Payload ID: 10165
  Gene Symbol: MBD6
  Gene Name: methyl-CpG binding domain protein 6
  ENST ID: ENST00000547844
  CDS Start-End: 1-83
cagcccgagcagctgtccctctgcctccccgggcccgccctggccgtcctgccaaaaacaagaggaggaaactggccccatagcagccatacctggagctggatctgaccctgattggggagagctgagtgctgagccttgggagcccctgccagccacctgcacctgtggacaagacgttgtgatgatgcgactgaggattatgcaacgtggtccaaccggagcggccagcatgaccagctgtccaggggctgcctcctgccttttcttttgtaaagacaagacccttgggagttttaattctgttttgtacttgccctgtggggcctccactgcttttctatgggagacactcttaatttaacagatgagaatattttgaaactc

SEQ ID NO: 153345 - DNA, 568 bp, Homo sapiens
  Payload ID: 10165
  Gene Symbol: MBD6
  Gene Name: methyl-CpG binding domain protein 6
  ENST ID: ENST00000548887
  CDS Start-End: 123-568
aagtggctttgggtcacgaggcttcacggaggaggtgtgggctaagctggtggccccggctttagactggaccccacaatgtttgcagagatgttcaggcacgcgggagctgattacacacaatgaatgggggcaatgagagcagtggagcagacagagctgggggccctgtggccacatctgtccccatcggctggcagcgctgtgtgcgagagggtgctgtgctctacatcagtccaagtggcacagagctgtcttccttggagcaaacccggagctacctcctcagcgatgggacctgcaagtgcggtctggagtgtccacttaatgtccccaaggttttcaactttgaccctttggccccggtgaccccgggtggggctggggtggggccagcatcagaggaggacatgaccaagctgtgcaaccaccggcggaaagctgttgctatggcaactctgtaccgcagcatggagaccacctgctcacactcttctcctggagagggagcgagcccccaaatgttccacactgtgtccccagggcccccctctgcccgccctccctg

SEQ ID NO: 153346 - DNA, 607 bp, Homo sapiens
  Payload ID: 10165
  Gene Symbol: MBD6
  Gene Name: methyl-CpG binding domain protein 6
  ENST ID: ENST00000546632
  CDS Start-End: 448-607
gcatgcgcgggaggccgctcggtgatccgcggcggcggcagcggcgcttcctgctaggaccggccggggccgtaccggaggctcgggctccaccgaccctcctcccaccccctcccactcaccctctgggccgcgactgcgcagggcggggccggccgaaccatgggccgcggtgtgggctaagctggtggccccggctttagactggaccccacaatgtttgcagagatgttcaggtagctgtggtgatacggcagaggactcctcagtctccctcccagctgaggggttccccttgctcctctggggcttcccctgagttttcttgggtctccccacaacctttgccttcctggagtcctctctcaggtacttcgctcagtttaatcctcctagtgcctacatggatgtctgtgttatcaggcacgcgggagctgattacacacaatgaatgggggcaatgagagcagtggagcagacagagctgggggccctgtggccacatctgtccccatcggctggcagcgctgtgtgcgagagggtgctgtgctctacatcagtccaagtggcacagagctgtcttccttggagcaaacccggagctacc

SEQ ID NO: 153347 - DNA, 533 bp, Homo sapiens
  Payload ID: 10165
  Gene Symbol: MBD6
  Gene Name: methyl-CpG binding domain protein 6
  ENST ID: ENST00000549042
  CDS Start-End: 89-232
gtgtgggctaagctggtggccccggctttagactggaccccacaatgtttgcagagatgttcaggcacgcgggagctgattacacacaatgaatgggggcaatgagagcagtggagcagacagagctgggggccctgtggccacatctgtccccatcggctggcagcgctgtgtgcgagagggtgctgtgctctacatcaggaggatctgtaacttaagcactgtgctttaggagtattgcctgattcgctgccagctaaccccatgtcctctgaccctgtcctctcgcagtccaagtggcacagagctgtcttccttggagcaaacccggagctacctcctcagcgatgggacctgcaagtgcggtctggagtgtccacttaatgtccccaaggttttcaactttgaccctttggccccggtgaccccgggtggggctggggtggggccagcatcagaggaggacatgaccaagctgtgcaaccaccggcggaaagctgttgctatggcaactctgtaccgcagcatggaga

SEQ ID NO: 153348 - DNA, 596 bp, Homo sapiens
  Payload ID: 10165
  Gene Symbol: MBD6
  Gene Name: methyl-CpG binding domain protein 6
  ENST ID: ENST00000546805
  CDS Start-End: 377-596
acctattttcccccacggtactcctatggctttctccaagaccctctcttgctgtaccagacagcaagtcctgtgactccctgtgtgaggagcgcggcacaggcctgcctcctaggtgttcgggtcgagatttacagcggagtctcatcccgggacgtgtgagtgcacttcagcgcaggactgccctggactggggagaccggagccgcgattttagactcaactccccatcacttgccaagggatcttaccgtccttgtttgtaaattaaagataaaagttgtgaaggtgtgggctaagctggtggccccggctttagactggaccccacaatgtttgcagagatgttcaggcacgcgggagctgattacacacaatgaatgggggcaatgagagcagtggagcagacagagctgggggccctgtggccacatctgtccccatcggctggcagcgctgtgtgcgagagggtgctgtgctctacatcagtccaagtggcacagagctgtcttccttggagcaaacccggagctacctcctcagcgatgggacctgcaagtgcggtctggagtgtccacttaatgtccccaaggttt

SEQ ID NO: 153349 - DNA, 1884 bp, Homo sapiens
  Payload ID: 10165
  Gene Symbol: MBD6
  Gene Name: methyl-CpG binding domain protein 6
  ENST ID: ENST00000547545
  CDS Start-End: 1-1515
gggatgggggcaggcccggcctgccctctgcctcccctggctggtggagaggctttccctttccccagccctgagcagggcctggcactgagtggagctggcttccctgggatgcttggggccttgcctctccctctgagtctggggcagcctccaccttctccattgctcaaccacagtttatttggtgtgctgactgggggaggaggacaacctccccctgagcccctgctacccccaccaggaggacctggtcctcccctagccccaggagagcctgaagggccttcgcttttggtggcttccttgcttcctccaccaccctcagaccttcttccacctccttcagcacctcccagcaacctccttgcctctttcctgcccctgttggctctgggccccacagctggggatggggagggatctgcagagggagccgggggtccaagtggggagccattttcaggcttgggagacctgtcccccctacttttccccccactttcagccccccctaccctcatagctttaaattctgcgctgctggctgccaccctggatcccccctcggggacacccccccagccctgtgtcctgagtgccccccaacctggaccacctacctccagtgtcaccacggcaactactgacccgggggcctcctctctgggcaaggccccctccaactcagggagacccccccaactccttagccctctgctgggtgccagcctgctgggtgacctgtcttcactgaccagcagccctggagccctccccagcctgttgcagcctcctggccctcttctctctggccagttggggctgcagctcctccctggggggggagctcctccacccctctcagaggcttctagtcccctagcctgcctgctacagagtctccagatccctccagagcagccagaagccccctgtctaccccccgagagccctgcctcagccctcgaaccagagcctgccaggcctcccctcagtgccttagccccaccccatggttctcccgaccccccagtccctgagctgctcactgggagggggtcagggaaacggggccggaggggaggagggggacttaggggcattaatggtgaggccaggccagcccggggccgaaagcctggcagccggcgggagcctggccgactggccctcaaatgggggacacgtggtggcttcaatggacaaatggaaaggtccccaagaagaacccaccattggcagcataatggggagctggctgaagggggtgctgagcccaaggatccaccccctcccgggccccattctgaggaccttaaggtgcccccgggagtagtcagaaagtctcgtcgtggccgtaggagaaaatacaaccctacccggaacagcaatagctcccgccaggacattaccttggaacccagccctacagcccgagcagctgtccctctgcctccccgggcccgccctggccgtcctgccaaaaacaagaggaggaaactggccccatagcagccatacctggagctggatctgaccctgattggggagagctgagtgctgagccttgggagcccctgccagccacctgcacctgtggacagtggccaacaggctcagtttacaaacctgtgagctactgttggctgctgccctccttcccagtgaaagagacgttgtgatgatgcgactgaggattatgcaacgtggtccaaccggagcggccagcatgaccagctgtccaggggctgcctcctgccttttcttttgtaaagacaagacccttgggagttttaattctgttttgtacttgccctgtggggcctccactgcttttctatgggagacactcttaatttaacagatgagaatattttgaaa

SEQ ID NO: 153350 - DNA, 570 bp, Homo sapiens
  Payload ID: 10165
  Gene Symbol: MBD6
  Gene Name: methyl-CpG binding domain protein 6
  ENST ID: ENST00000552163
  CDS Start-End: 1-570
tcttctctctggccagttggggctgcagctcctccctggggggggagctcctccacccctctcagaggcttctagtcccctagcctgcctgctacagagtctccagcagatccctccagagcagccagaagccccctgtctaccccccgagagccctgcctcagccctcgaaccagagcctgccaggcctcccctcagtgccttagccccaccccatggttctcccgaccccccagtccctgagctgctcactgggagggggtcagggaaacggggccggaggggaggagggggacttaggggcattaatggtgaggccaggccagcccggggccgaaagcctggcagccggcgggagcctggccgactggccctcaaatgggggacacgtggtggcttcaatggacaaatggaaaggtccccaagaagaacccaccattggcagcataatggggagctggctgaagggggtgctgagcccaaggatccaccccctcccgggccccattctgaggaccttaaggtgcccccgggagtagtcagaaagtctcgtcgtggccgtaggagaaa

SEQ ID NO: 153351 - DNA, 532 bp, Homo sapiens
  Payload ID: 10165
  Gene Symbol: MBD6
  Gene Name: methyl-CpG binding domain protein 6
  ENST ID: ENST00000551351
  CDS Start-End: 374-532
agtcggtcgtgagcctctttgccgcttgtctcccccagaagctgctgttccgcccacctagctttacccgccgttttacccccactataagggactcccatatttcttggcccctcccagctaatgggcacataggccttttgaacttttctttttaaagttggtatccatccactgggattgtcgacatctcgagtcttcttaaagaggtctcctggccgggctcagtggcttacgcctgtaatcccagcactttgggaggctgaggagagcggatcacttgaggtgtgggctaagctggtggccccggctttagactggaccccacaatgtttgcagagatgttcaggcacgcgggagctgattacacacaatgaatgggggcaatgagagcagtggagcagacagagctgggggccctgtggccacatctgtccccatcggctggcagcgctgtgtgcgagagggtgctgtgctctacatcagtccaagtggcacagagctgtcttccttggagcaaacccggagctac

SEQ ID NO: 153352 - DNA, 2545 bp, Homo sapiens
  Payload ID: 10166
  Gene Symbol: MCCC1
  Gene Name: methylcrotonoyl-CoA carboxylase 1 (alpha)
  Uniprot ID: Q96RQ3
  ENST ID: ENST00000265594
  CDS Start-End: 148-2325
acattcttggatcagcccaaaggtaggctcaggctccgacggtggccggcgggggtcacgaggcttcgtagtggaggaacgggtttggcgtgtgggacgcagctgcctctgtactggggagtcacggagtggccgggctccagggacatggcggcggcctctgcggtgtcggtgctgctggtggcggcggagaggaaccggtggcatcgtctcccgagcctgctcctgccgccgaggacatgggtgtggaggcaaagaaccatgaagtacacaacagccacaggaagaaacattaccaaggtcctcattgcaaacagaggagaaattgcctgcagggtgatgcgcacagccaaaaaactgggtgtacagactgtggcggtttatagtgaggctgacagaaattccatgcatgtagatatggcagatgaagcatattccatcggccccgctccctcccagcagagctacctatctatggagaaaatcattcaagtggccaagacctctgctgcacaggctatccatccaggatgcggttttctctcagaaaacatggaatttgctgaactttgtaagcaagaaggaattatttttataggccctcctccatctgcaattagagacatgggtataaagagcacatccaaatccataatggctgctgctggagtacctgttgtggagggttatcatggtgaggaccaatcagaccagtgcctgaaggaacacgccaggagaattggctatcctgtcatgattaaagccgtccggggtggaggaggaaaaggaatgaggattgttagatcagaacaagaatttcaagaacagttagagtcagcacggagagaagctaagaagtctttcaatgatgatgctatgctgatcgagaagtttgtagacacaccgaggcatgtagaagtccaggtgtttggtgatcaccatggcaatgctgtgtacttgtttgaaagagactgtagtgtgcagaggcgacatcagaagatcattgaggaggccccagcgcctggtattaaatctgaagtaagaaaaaagctgggagaagctgcagtcagagctgctaaagctgtaaattatgttggagcagggactgtggagtttattatggactcaaaacataatttctgtttcatggagatgaatacaaggctgcaagtggaacatcctgttactgagatgatcacaggaactgacttggtggagtggcagcttagaattgcagcaggagagaagattcctttgagccaggaagaaataactctgcagggccatgccttcgaagctagaatatatgcagaagatcctagcaataacttcatgcctgtggcaggcccattagtgcacctctctactcctcgagcagacccttccaccaggattgaaactggagtacggcaaggagacgaagtttccgtgcattatgaccccatgattgcgaagctggtcgtgtgggcagcagatcgccaggcggcattgacaaaactgaggtacagccttcgtcagtacaatattgttggactgcacaccaacattgacttcttactcaacctgtctggccacccagagtttgaagctgggaacgtgcacactgatttcatccctcaacaccacaaacagttgttgctcagtcggaaggctgcagccaaagagtctttatgccaggcagccctgggtctcatcctcaaggagaaagccatgaccgacactttcactcttcaggcacatgatcaattctctccattttcgtctagcagtggaagaagactgaatatctcgtataccagaaacatgactcttaaagatggtaaaaacaatgtagccatagctgtaacgtataaccatgatgggtcttatagcatgcagattgaagataaaactttccaagtccttggtaatctttacagcgagggagactgcacttacctgaaatgttctgttaatggagttgctagtaaagcgaagctgattatcctggaaaacactatttacctattttccaaggaaggaagtattgagattgacattccagtccccaaatacttatcttctgtgagctcacaagaaactcagggcggccccttagctcctatgactggaaccattgaaaaggtgtttgtcaaagctggagacaaagtgaaagcgggagattccctcatggttatgatcgccatgaagatggagcataccataaagtctccaaaggatggcacagtaaagaaagtgttctacagagaaggtgctcaggccaacagacacactcctttagtcgagtttgaggaggaagaatcagacaaaagggaatcggaataaactccagcaaggaaatggccagttaagtagtgtcttctctctccaccaaaaagaggaagtgcctccagcttttctgggggtctcataaagagcagttttactaaatgattgtatgcttatgctgaacacctttcatattggagaatcatgcatttgggtcactaattatctcaaaatatttcatactaataaagttgaattattttttattggaagccaa

SEQ ID NO: 153353 - DNA, 567 bp, Homo sapiens
  Payload ID: 10166
  Gene Symbol: MCCC1
  Gene Name: methylcrotonoyl-CoA carboxylase 1 (alpha)
  ENST ID: ENST00000466650
  CDS Start-End: 91-234
acgaggcttcgtagtggaggaacgggtttggcgtgtgggacgcagctgcctctgtactggggagtcacggagtggccgggctccagggacatggcggcggcctctgcggtgtcggtgctgctggtggcggcggagaggaaccggtggcatcgtctcccgagcctgctcctgccgccgaggacatgggtgtggaggcaaagaaccatgaagtacacaacagccacaggcagatgaagcatattccatcggccccgctccctcccagcagagctacctatctatggagaaaatcattcaagtggccaagacctctgctgcacagcacatccaaatccataatggctgctgctggagtacctgttgtggagggttatcatggtgaggaccaatcagaccagtgcctgaaggaacacgccaggagaattggctatcctgtcatgattaaagccgtccggggtggaggaggaaaatcataatcatcttttctctcttagggaatgaggattgttagatcagaacaagaatttcaagaacagttagagtcagcacggagagaagctaagaagt

SEQ ID NO: 153354 - DNA, 557 bp, Homo sapiens
  Payload ID: 10166
  Gene Symbol: MCCC1
  Gene Name: methylcrotonoyl-CoA carboxylase 1 (alpha)
  ENST ID: ENST00000490284
  CDS Start-End: 84-254
ttcgtagtggaggaacgggtttggcgtgtgggacgcagctgcctctgtactggggagtcacggagtggccgggctccagggacatggcggcggcctctgcggtgtcggtgctgctggtggcggcggagaggaaccggtggcatcgtctcccgagcctgctcctgccgccgaggctatccatccaggatgcggttttctctcagaaaacatggaatttgctgaactttgtaagcaagaaggaattatttttataggccctcctccatctgcaattagagacatgggtataaagagcacatccaaatccataatggctgctgctggagtacctgttgtggagggttatcatggtgaggaccaatcagaccagtgcctgaaggaacacgccaggagaattggctatcctgtcatgattaaagccgtccggggtggaggaggaaaaggaatgaggattgttagatcagaacaagaatttcaagaacagttagagtcagcacggagagaagctaagaagtctttcaatgatgatgctatgctgatcgagaagtttgtagaca

SEQ ID NO: 153355 - DNA, 1860 bp, Homo sapiens
  Payload ID: 10166
  Gene Symbol: MCCC1
  Gene Name: methylcrotonoyl-CoA carboxylase 1 (alpha)
  ENST ID: ENST00000495767
  CDS Start-End: 79-264
agtggaggaacgggtttggcgtgtgggacgcagctgcctctgtactggggagtcacggagtggccgggctccagggacatggcggcggcctctgcggtgtcggtgctgctggtggcggcggagaggaaccggtggcatcgtctcccgagcctgctcctgccgccgaggacatgggtgtggaggcaaagaaccatgaagtacacaacagccacaggctatccatccaggatgcggttttctctcagaaaacatggaatttgctgaactttgtaagcaagaaggaattatttttataggccctcctccatctgcaattagagacatgggtataaagagcacatccaaatccataatggctgctgctggagtacctgttgtggagggttatcatggtgaggaccaatcagaccagtgcctgaaggaacacgccaggagaattggctatcctgtcatgattaaagccgtccggggtggaggaggaaaaggaatgaggattgttagatcagaacaagaatttcaagaacagttagagtcagcacggagagaagctaagaagtctttcaatgatgatgctatgctgatcgagaagtttgtagacacaccgaggcatgtagaagtccaggtgtttggtgatcaccatggcaatgctgtgtacttgtttgaaagagactgtagtgtgcagaggcgacatcagaagatcattgaggaggccccagcgcctggtattaaatctgaagtaagaaaaaagctgggagaagctgcagtcagagctgctaaagctgtaaattatgttggagcagggactgtggagtttattatggactcaaaacataatttctgtttcatggagatgaatacaaggctgcaagtggaacatcctgttactgagatgatcacaggaactgacttggtggagtggcagcttagaattgcagcaggagagaagattcctttgagccaggaagaaataactctgcagggccatgccttcgaagctagaatatatgcagaagatcctagcaataacttcatgcctgtggcaggcccattagtgcacctctctactcctcgagcagacccttccaccaggattgaaactggagtacggcaaggagacgaagtttccgtgcattatgaccccatgattgcgaagctggtcgtgtgggcagcagatcgccaggcggcattgacaaaactgaggtacagccttcgtcagtacaatattgttggactgcacaccaacattgacttcttactcaacctgtctggccacccagagtttgaagctgggaacgtgcacactgatttcatccctcaacaccacaaacagttgttgctcagtcggaaggctgcagccaaagagtctttatgccaggcagccctgggtctcatcctcaaggagaaagccatgaccgacactttcactcttcaggcacatgatcaattctctccattttcgtctagcagtggaagaagactgaatatctcgtataccagaaacatgactcttaaagatggtaaaaacaattgaagataaaactttccaagtccttggtaatctttacagcgagggagactgcacttacctgaaatgttctgttaatggagttgctagtaaagcgaagctgattatcctggaaaacactatttacctattttccaaggaaggaagtattgagattgacattccagtccccaaatacttatcttctgtgagctcacaagaaactcagggcggccccttagctcctatgactggaaccattgaaaaggtgtttgtcaaagctggagacaaagtgaaagcgggagattccctcatggttatgatcgccatgaagatggagcataccataaagtctc

SEQ ID NO: 153356 - DNA, 2774 bp, Homo sapiens
  Payload ID: 10166
  Gene Symbol: MCCC1
  Gene Name: methylcrotonoyl-CoA carboxylase 1 (alpha)
  ENST ID: ENST00000492597
  CDS Start-End: 704-2554
ggaggcttctgagggtttcctaggggttttgctgggttctttctagcttaatttaaaaaaaaccctacttgagggggctcttcagcaactgcttgctcgagcccactcccactctgtgaccgtcttcaataaatctgtgcccactccgtggtgttgtgttcaactatttgtccaatacgccaagaacctggacatcacatttaggactttttttttttaatttgagatggagttttgctcttgtcactcaggctggagtgcagtggcgtgatctcggctcactgcaacttccgcctcccgggttcaagcgattcttccacctcagcctcccgagtagctgggattacaggcgcccaacaccatgcccagctaatttttgtatttttagtagagatggagtttcaccatgttggccaggctggtctccaactcctgacctcagatgatccacccacctcagcctcccaaagtgctgggattacgggcgtgggccaccgcacctggcagcatttaggaccttctctctggtaacataagtaggggaagagacaacacacacccaaaatggcaagaatccgctggcacggacaggctggacccaggacatgggtgtggaggcaaagaaccatgaagtacacaacagccacaggcagatgaagcatattccatcggccccgctccctcccagcagagctacctatctatggagaaaatcattcaagtggccaagacctctgctgcacaggctatccatccaggatgcggttttctctcagaaaacatggaatttgctgaactttgtaagcaagaaggaattatttttataggccctcctccatctgcaattagagacatgggtataaagagcacatccaaatccataatggctgctgctggagtacctgttgtggagggttatcatggtgaggaccaatcagaccagtgcctgaaggaacacgccaggagaattggctatcctgtcatgattaaagccgtccggggtggaggaggaaaaggaatgaggattgttagatcagaacaagaatttcaagaacagttagagtcagcacggagagaagctaagaagtctttcaatgatgatgctatgctgatcgagaagtttgtagacacaccgaggcatgtagaagtccaggtgtttggtgatcaccatggcaatgctgtgtacttgtttgaaagagactgtagtgtgcagaggcgacatcagaagatcattgaggaggccccagcgcctggtattaaatctgaagtaagaaaaaagctgggagaagctgcagtcagagctgctaaagctgtaaattatgttggagcagggactgtggagtttattatggactcaaaacataatttctgtttcatggagatgaatacaaggctgcaagtggaacatcctgttactgagatgatcacaggaactgacttggtggagtggcagcttagaattgcagcaggagagaagattcctttgagccaggaagaaataactctgcagggccatgccttcgaagctagaatatatgcagaagatcctagcaataacttcatgcctgtggcaggcccattagtgcacctctctactcctcgagcagacccttccaccaggattgaaactggagtacggcaaggagacgaagtttccgtgcattatgaccccatgattgcgaagctggtcgtgtgggcagcagatcgccaggcggcattgacaaaactgaggtacagccttcgtcagtacaatattgttggactgcacaccaacattgacttcttactcaacctgtctggccacccagagtttgaagctgggaacgtgcacactgatttcatccctcaacaccacaaacagttgttgctcagtcggaaggctgcagccaaagagtctttatgccaggcagccctgggtctcatcctcaaggagaaagccatgaccgacactttcactcttcaggcacatgatcaattctctccattttcgtctagcagtggaagaagactgaatatctcgtataccagaaacatgactcttaaagatggtaaaaacaatgtagccatagctgtaacgtataaccatgatgggtcttatagcatgcagattgaagataaaactttccaagtccttggtaatctttacagcgagggagactgcacttacctgaaatgttctgttaatggagttgctagtaaagcgaagctgattatcctggaaaacactatttacctattttccaaggaaggaagtattgagattgacattccagtccccaaatacttatcttctgtgagctcacaagaaactcagggcggccccttagctcctatgactggaaccattgaaaaggtgtttgtcaaagctggagacaaagtgaaagcgggagattccctcatggttatgatcgccatgaagatggagcataccataaagtctccaaaggatggcacagtaaagaaagtgttctacagagaaggtgctcaggccaacagacacactcctttagtcgagtttgaggaggaagaatcagacaaaagggaatcggaataaactccagcaaggaaatggccagttaagtagtgtcttctctctccaccaaaaagaggaagtgcctccagcttttctgggggtctcataaagagcagttttactaaatgattgtatgcttatgctgaacacctttcatattggagaatcatgcatttgggtcactaattatctcaaaatatttcatactaataaagttgaattattttttattggaagccaa

SEQ ID NO: 153357 - DNA, 2227 bp, Homo sapiens
  Payload ID: 10166
  Gene Symbol: MCCC1
  Gene Name: methylcrotonoyl-CoA carboxylase 1 (alpha)
  ENST ID: ENST00000497830
  CDS Start-End: 91-234
acgaggcttcgtagtggaggaacgggtttggcgtgtgggacgcagctgcctctgtactggggagtcacggagtggccgggctccagggacatggcggcggcctctgcggtgtcggtgctgctggtggcggcggagaggaaccggtggcatcgtctcccgagcctgctcctgccgccgaggacatgggtgtggaggcaaagaaccatgaagtacacaacagccacaggcagatgaagcatattccatcggccccgctccctcccagcagagctacctatctatggagaaaatcattcaagtggccaagacctctgctgcacagcacatccaaatccataatggctgctgctggagtacctgttgtggagggttatcatggtgaggaccaatcagaccagtgcctgaaggaacacgccaggagaattggctatcctgtcatgattaaagccgtccggggtggaggaggaaaaggaatgaggattgttagatcagaacaagaatttcaagaacagttagagtcagcacggagagaagctaagaagtctttcaatgatgatgctatgctgatcgagaagtttgtagacacaccgaggcatgtagaagtccaggtgtttggtgatcaccatggcaatgctgtgtacttgtttgaaagagactgtagtgtgcagaggcgacatcagaagatcattgaggaggccccagcgcctggtattaaatctgaagtaagaaaaaagctgggagaagctgcagtcagagctgctaaagctgtaaattatgttggagcagggactgtggagtttattatggactcaaaacataatttctgtttcatggagatgaatacaaggctgcaagtggaacatcctgttactgagatgatcacaggaactgacttggtggagtggcagcttagaattgcagcaggagagaagattcctttgagccaggaagaaataactctgcagggccatgccttcgaagctagaatatatgcagaagatcctagcaataacttcatgcctgtggcaggcccattagtgcacctctctactcctcgagcagacccttccaccaggattgaaactggagtacggcaaggagacgaagtttccgtgcattatgaccccatgattgcgaagctggtcgtgtgggcagcagatcgccaggcggcattgacaaaactgaggtacagccttcgtcagtacaatattgttggactgcacaccaacattgacttcttactcaacctgtctggccacccagagtttgaagctgggaacgtgcacactgatttcatccctcaacaccacaaacagttgttgctcagtcggaaggctgcagccaaagagtctttatgccaggcagccctgggtctcatcctcaaggagaaagccatgaccgacactttcactcttcaggcacatgatcaattctctccattttcgtctagcagtggaagaagactgaatatctcgtataccagaaacatgactcttaaagatggtaaaaacaatgtagccatagctgtaacgtataaccatgatgggtcttatagcatgcagattgaagataaaactttccaagtccttggtaatctttacagcgagggagactgcacttacctgaaatgttctgttaatggagttgctagtaaagcgaagctgattatcctggaaaacactatttacctattttccaaggaaggaagtattgagattgacattccagtccccaaatacttatcttctgtgagctcacaagaaactcagggcggccccttagctcctatgactggaaccattgaaaaggtgtttgtcaaagctggagacaaagtgaaagcgggagattccctcatggttatgatcgccatgaagatggagcataccataaagtctccaaaggatggcacagtaaagaaagtgttctacagagaaggtgctcaggccaacagacacactcctttagtcgagtttgaggaggaagaatcagacaaaagggaatcggaataaactccagcaaggaaatggccagttaagtagtgtcttctctctccaccaaaaagaggaagtgcctccagcttttctgggggtctcataaagagcagttttactaaatgattgtatgcttatgctgaacacctttcatattggagaatcatgcatttgggtcactaattatctcaaaatatttcatactaataaagttgaattattttttattggaagcc

SEQ ID NO: 153358 - DNA, 581 bp, Homo sapiens
  Payload ID: 10166
  Gene Symbol: MCCC1
  Gene Name: methylcrotonoyl-CoA carboxylase 1 (alpha)
  ENST ID: ENST00000486226
  CDS Start-End: 56-394
tgggacgcagctgcctctgtactggggagtcacggagtggccgggctccagggacatggcggcggcctctgcggtgtcggtgctgctggtggcggcggagaggaaccggtggcatcgtctcccgagcctgctcctgccgccgaggacatgggtgtggaggcaaagaaccatgaagtacacaacagccacaggaagaaacattaccaaggtcctcattgcaaacagaggagaaattgcctgcagggtgatgcgcacagccaaaaaactgggtgtacagactgtggcggtttatagtgaggctgacagaaattccatgcatgtagatatgcaggatgatcttgatttcacagagaaaataaaattgaggttcctgccacagaatctgctgacttagttatgtctgcatccatctttcccatcgaaggcagatgaagcatattccatcggccccgctccctcccagcagagctacctatctatggagaaaatcattcaagtggccaagacctctgctgcacaggctatccatccaggatgcggttttctctcagaaaacatggaatttgctgaactttgtaagc

SEQ ID NO: 153359 - DNA, 1906 bp, Homo sapiens
  Payload ID: 10166
  Gene Symbol: MCCC1
  Gene Name: methylcrotonoyl-CoA carboxylase 1 (alpha)
  ENST ID: ENST00000476176
  CDS Start-End: 111-1906
gacggtggccggcgggggtcacgaggcttcgtagtggaggaacgggtttggcgtgtgggacgcagctgcctctgtactggggagtcacggagtggccgggctccagggacatggcggcggcctctgcggtgtcggtgctgctggtggcggcggagaggaaccggtggcatcgtctcccgagcctgctcctgccgccgaggacatgggtgtggaggcaaagaaccatgaagtacacaacagccacagatgaagcatattccatcggccccgctccctcccagcagagctacctatctatggagaaaatcattcaagtggccaagacctctgctgcacaggctatccatccaggatgcggttttctctcagaaaacatggaatttgctgaactttgtaagcaagaaggaattatttttataggccctcctccatctgcaattagagacatgggtataaagagcacatccaaatccataatggctgctgctggagtacctgttgtggagggttatcatggtgaggaccaatcagaccagtgcctgaaggaacacgccaggagaattggctatcctgtcatgattaaagccgtccggggtggaggaggaaaaggaatgaggattgttagatcagaacaagaatttcaagaacagttagagtcagcacggagagaagctaagaagtctttcaatgatgatgctatgctgatcgagaagtttgtagacacaccgaggcatgtagaagtccaggtgtttggtgatcaccatggcaatgctgtgtacttgtttgaaagagactgtagtgtgcagaggcgacatcagaagatcattgaggaggccccagcgcctggtattaaatctgaagtaagaaaaaagctgggagaagctgcagtcagagctgctaaagctgtaaattatgttggagcagggactgtggagtttattatggactcaaaacataatttctgtttcatggagatgaatacaaggctgcaagtggaacatcctgttactgagatgatcacaggaactgacttggtggagtggcagcttagaattgcagcaggagagaagattcctttgagccaggaagaaataactctgcagggccatgccttcgaagctagaatatatgcagaagatcctagcaataacttcatgcctgtggcaggcccattagtgcacctctctactcctcgagcagacccttccaccaggattgaaactggagtacggcaaggagacgaagtttccgtgcattatgaccccatgattgcgaagctggtcgtgtgggcagcagatcgccaggcggcattgacaaaactgaggtacagccttcgtcagtacaatattgttggactgcacaccaacattgacttcttactcaacctgtctggccacccagagtttgaagctgggaacgtgcacactgatttcatccctcaacaccacaaacagttgttgctcagtcggaaggctgcagccaaagagtctttatgccaggcagccctgggtctcatcctcaaggagaaagccatgaccgacactttcactcttcaggcacatgatcaattctctccattttcgtctagcagtggaagaagactgaatatctcgtataccagaaacatgactcttaaagatggtaaaaacaatgtagccatagctgtaacgtataaccatgatgggtcttatagcatgcagattgaagataaaactttccaagtccttggtaatctttacagcgagggagactgcacttacctgaaatgttctgttaatggagttgctagtaaagcgaagctgattatcctggaaaacactatttacctattttccaaggaaggaagtattgagattgacattccagtccccaaatacttatcttctgtgagctcacaagaaactca

SEQ ID NO: 153360 - DNA, 559 bp, Homo sapiens
  Payload ID: 10166
  Gene Symbol: MCCC1
  Gene Name: methylcrotonoyl-CoA carboxylase 1 (alpha)
  ENST ID: ENST00000487634
  CDS Start-End: 79-264
agtggaggaacgggtttggcgtgtgggacgcagctgcctctgtactggggagtcacggagtggccgggctccagggacatggcggcggcctctgcggtgtcggtgctgctggtggcggcggagaggaaccggtggcatcgtctcccgagcctgctcctgccgccgaggacatgggtgtggaggcaaagaaccatgaagtacacaacagccacaggctatccatccaggatgcggttttctctcagaaaacatggaatttgctgaactttgtaagcaagaaggaattatttttataggccctcctccatctgcaattagagacatgggtataaagagcacatccaaatccataatggctgctgctggagtacctgttgtggagggttatcatggtgaggaccaatcagaccagtgcctgaaggaacacgccaggagaattggctatcctgtcatgattaaagccgtccggggtggaggaggaaaaggaatgaggattgttagatcagaacaagaatttcaagaacagttagagtcagcacggagagaagctaagaagtct

SEQ ID NO: 153361 - DNA, 2874 bp, Homo sapiens
  Payload ID: 10166
  Gene Symbol: MCCC1
  Gene Name: methylcrotonoyl-CoA carboxylase 1 (alpha)
  ENST ID: ENST00000497959
  CDS Start-End: 782-2086
ggtaggaaaaccccaggcactttcggaggggttctgccggcagtcacggcgtcgggaggaagacatccccaccagcccttccctttctccccgcttccgcacatccacgcttcagcgcgcctttggcttctgtttttccatttctgaggactgggcccgccatcctccaggctcccctcgccgtcgctgcagctcgtagccgtttacatcgggctttcgcagcaccccttaggtgggagcgttgttataatccggttccggggaagcccaaagggatcaacgacttcctcaacgaaacacagctagtaagaaatggggccgggatgccctcaaagccatttttcagttcagctgtgccccatcaggtgtccagttcagagaaagactcctggagttccttctcattgttagaagagtgaagttgtcaagaagagcaaatgtaccttccacagagctgggaaattattttgtcaaaaactcttgtacccaagtttgaacaacgctatcagatgactcagtctagctcacctgactccagctctgtttcaaattttgagctctaagctttggtggcaataactctggcagtgaaaaaaccctcaggcttgtagatagctttgcttctttgtcttcttttgcttcatcgttatcatccttcatcattctggaaagattgacagtttagtgttcaagggcacagactctgcagtcaaggctgaggtcttagttagctactcactaggtgtgtgactttgggacatgggtgtggaggcaaagaaccatgaagtacacaacagccacaggaagaaacattaccaaggtcctcattgcaaacagaggagaaattgcctgcagggtgatgcgcacagccaaaaaactgggtgtacagactgtggcggtttatagtgaggctgacagaaattccatgcatgtagatatggcagatgaagcatattccatcggccccgctccctcccagcagagctacctatctatggagaaaatcattcaagtggccaagacctctgctgcacaggctatccatccaggatgcggttttctctcagaaaacatggaatttgctgaactttgtaagcaagaaggaattatttttataggccctcctccatctgcaattagagacatgggtataaagagcacatccaaatccataatggctgctgctggagtacctgttgtggagggttatcatggtgaggaccaatcagaccagtgcctgaaggaacacgccaggagaattggctatcctgtcatgattaaagccgtccggggtggaggaggaaaaggaatgaggattgttagatcagaacaagaatttcaagaacagttagagtcagcacggagagaagctaagaagtctttcaatgatgatgctatgctgatcgagaagtttgtagacacaccgaggcatgtagaagtccaggtgtttggtgatcaccatggcaatgctgtgtacttgtttgaaagagactgtagtgtgcagaggcgacatcagaagatcattgaggaggccccagcgcctggtattaaatctgaagtaagaaaaaagctgggagaagctgcagtcagagctgctaaagctgtaaattatgttggagcagggactgtggagtttattatggactcaaaacataatttctgtttcatggagatgaatacaaggctgcaagtggaacatcctgttactgagatgatcacaggaactgacttggtggagtggcagcttagaattgcagcaggagagaagattcctttgagccaggaagaaataactctgcagggccatgccttcgaagctagaatatatgcagaagatcctagcaataacttcatgcctgtggcaggcccattagtgcacctctctactcctcgagcagacccttccaccaggattgaaactggagtacggcaaggagacgaagtttccgtgcattatgaccccatgattgcgaagctggtcgtgtgggcagcagatcgccaggcggcattgacaaaactgaggtacagccttcgtcagtacaatatcaattctctccattttcgtctagcagtggaagaagactgaatatctcgtataccagaaacatgactcttaaagatggtaaaaacagttttcgtctcctcggataatcaaccatttccatactcatgtaatctaggcatactctggagttattacaggtttggttccagaccactacaataaaatgtagccatagctgtaacgtataaccatgatgggtcttatagcatgcagattgaagataaaactttccaagtccttggtaatctttacagcgagggagactgcacttacctgaaatgttctgttaatggagttgctagtaaagcgaagctgattatcctggaaaacactatttacctattttccaaggaaggaagtattgagattgacattccagtccccaaatacttatcttctgtgagctcacaagaaactcagggcggccccttagctcctatgactggaaccattgaaaaggtgtttgtcaaagctggagacaaagtgaaagcgggagattccctcatggttatgatcgccatgaagatggagcataccataaagtctccaaaggatggcacagtaaagaaagtgttctacagagaaggtgctcaggccaacagacacactcctttagtcgagtttgaggaggaagaatcagacaaaagggaatcggaataaactccagcaaggaaatggccagttaagtagtgtcttctctctccaccaaaaagaggaagtgcctccagcttttctgggggtctcataaagagcagttttactaaatgattgtatgcttatgctgaacacctttcatattggagaatcat

SEQ ID NO: 153362 - DNA, 2156 bp, Homo sapiens
  Payload ID: 10166
  Gene Symbol: MCCC1
  Gene Name: methylcrotonoyl-CoA carboxylase 1 (alpha)
  ENST ID: ENST00000539926
  CDS Start-End: 211-1938
agtggccgggctccagggacatggcggcggcctctgcggtgtcggtgctgctggtggcggcggagaggaaccggtggcatcgtctcccgagcctgctcctgccgccgaggacatgggtgtggaggcaaagaaccatgaagtacacaacagccacaggcagatgaagcatattccatcggccccgctccctcccagcagagctacctatctatggagaaaatcattcaagtggccaagacctctgctgcacagcacatccaatccataatggctgctgctggagtacctgttgtggagggttatcatggtgaggaccaatcagaccagtgcctgaaggaacacgccaggagaattggctatcctgtcatgattaaagccgtccggggtggaggaggaaaaggaatgaggattgttagatcagaacaagaatttcaagaacagttagagtcagcacggagagaagctaagaagtctttcaatgatgatgctatgctgatcgagaagtttgtagacacaccgaggcatgtagaagtccaggtgtttggtgatcaccatggcaatgctgtgtacttgtttgaaagagactgtagtgtgcagaggcgacatcagaagatcattgaggaggccccagcgcctggtattaaatctgaagtaagaaaaaagctgggagaagctgcagtcagagctgctaaagctgtaaattatgttggagcagggactgtggagtttattatggactcaaaacataatttctgtttcatggagatgaatacaaggctgcaagtggaacatcctgttactgagatgatcacaggaactgacttggtggagtggcagcttagaattgcagcaggagagaagattcctttgagccaggaagaaataactctgcagggccatgccttcgaagctagaatatatgcagaagatcctagcaataacttcatgcctgtggcaggcccattagtgcacctctctactcctcgagcagacccttccaccaggattgaaactggagtacggcaaggagacgaagtttccgtgcattatgaccccatgattgcgaagctggtcgtgtgggcagcagatcgccaggcggcattgacaaaactgaggtacagccttcgtcagtacaatattgttggactgcacaccaacattgacttcttactcaacctgtctggccacccagagtttgaagctgggaacgtgcacactgatttcatccctcaacaccacaaacagttgttgctcagtcggaaggctgcagccaaagagtctttatgccaggcagccctgggtctcatcctcaaggagaaagccatgaccgacactttcactcttcaggcacatgatcaattctctccattttcgtctagcagtggaagaagactgaatatctcgtataccagaaacatgactcttaaagatggtaaaaacaatgtagccatagctgtaacgtataaccatgatgggtcttatagcatgcagattgaagataaaactttccaagtccttggtaatctttacagcgagggagactgcacttacctgaaatgttctgttaatggagttgctagtaaagcgaagctgattatcctggaaaacactatttacctattttccaaggaaggaagtattgagattgacattccagtccccaaatacttatcttctgtgagctcacaagaaactcagggcggccccttagctcctatgactggaaccattgaaaaggtgtttgtcaaagctggagacaaagtgaaagcgggagattccctcatggttatgatcgccatgaagatggagcataccataaagtctccaaaggatggcacagtaaagaaagtgttctacagagaaggtgctcaggccaacagacacactcctttagtcgagtttgaggaggaagaatcagacaaaagggaatcggaataaactccagcaaggaaatggccagttaagtagtgtcttctctctccaccaaaaagaggaagtgcctccagcttttctgggggtctcataaagagcagttttactaaatgattgtatgcttatgctgaacacctttcatattggagaatcatgcatttgggtcactaattatctcaaaatatttcatactaataaagttgaattattttttattggaagcc

SEQ ID NO: 153363 - DNA, 2410 bp, Homo sapiens
  Payload ID: 10166
  Gene Symbol: MCCC1
  Gene Name: methylcrotonoyl-CoA carboxylase 1 (alpha)
  ENST ID: ENST00000610757
  CDS Start-End: 465-2192
atcagcccaaaggtaggctcaggctccgacggtggccggcgggggtcacgaggcttcgtagtggaggaacgggtttggcgtgtgggacgcagctgcctctgtactggggagtcacggagtggccgggctccagggacatggcggcggcctctgcggtgtcggtgctgctggtggcggcggagaggaaccggtggcatcgtctcccgagcctgctcctgccgccgaggacatgggtgtggaggcaaagaaccatgaagtacacaacagccacaggaagaaacattaccaaggtcctcattgcaaacagaggagaaattgcctgcagggtgatgcgcacagccaaaaaactgggtgtacagactgtggcggtttatagtgaggctgacagaaattccatgcatgtagatatggcagatgaagcatattccatcggccccgctccctcccagcagagctacctatctatggagaaaatcattcaagtggccaagacctctgctgcacagcacatccaatccataatggctgctgctggagtacctgttgtggagggttatcatggtgaggaccaatcagaccagtgcctgaaggaacacgccaggagaattggctatcctgtcatgattaaagccgtccggggtggaggaggaaaaggaatgaggattgttagatcagaacaagaatttcaagaacagttagagtcagcacggagagaagctaagaagtctttcaatgatgatgctatgctgatcgagaagtttgtagacacaccgaggcatgtagaagtccaggtgtttggtgatcaccatggcaatgctgtgtacttgtttgaaagagactgtagtgtgcagaggcgacatcagaagatcattgaggaggccccagcgcctggtattaaatctgaagtaagaaaaaagctgggagaagctgcagtcagagctgctaaagctgtaaattatgttggagcagggactgtggagtttattatggactcaaaacataatttctgtttcatggagatgaatacaaggctgcaagtggaacatcctgttactgagatgatcacaggaactgacttggtggagtggcagcttagaattgcagcaggagagaagattcctttgagccaggaagaaataactctgcagggccatgccttcgaagctagaatatatgcagaagatcctagcaataacttcatgcctgtggcaggcccattagtgcacctctctactcctcgagcagacccttccaccaggattgaaactggagtacggcaaggagacgaagtttccgtgcattatgaccccatgattgcgaagctggtcgtgtgggcagcagatcgccaggcggcattgacaaaactgaggtacagccttcgtcagtacaatattgttggactgcacaccaacattgacttcttactcaacctgtctggccacccagagtttgaagctgggaacgtgcacactgatttcatccctcaacaccacaaacagttgttgctcagtcggaaggctgcagccaaagagtctttatgccaggcagccctgggtctcatcctcaaggagaaagccatgaccgacactttcactcttcaggcacatgatcaattctctccattttcgtctagcagtggaagaagactgaatatctcgtataccagaaacatgactcttaaagatggtaaaaacaatgtagccatagctgtaacgtataaccatgatgggtcttatagcatgcagattgaagataaaactttccaagtccttggtaatctttacagcgagggagactgcacttacctgaaatgttctgttaatggagttgctagtaaagcgaagctgattatcctggaaaacactatttacctattttccaaggaaggaagtattgagattgacattccagtccccaaatacttatcttctgtgagctcacaagaaactcagggcggccccttagctcctatgactggaaccattgaaaaggtgtttgtcaaagctggagacaaagtgaaagcgggagattccctcatggttatgatcgccatgaagatggagcataccataaagtctccaaaggatggcacagtaaagaaagtgttctacagagaaggtgctcaggccaacagacacactcctttagtcgagtttgaggaggaagaatcagacaaaagggaatcggaataaactccagcaaggaaatggccagttaagtagtgtcttctctctccaccaaaaagaggaagtgcctccagcttttctgggggtctcataaagagcagttttactaaatgattgtatgcttatgctgaacacctttcatattggagaatcatgcatttgggtcactaattatctcaaaatatttcatactaataaagttgaattattttttattggaagcc

SEQ ID NO: 153364 - DNA, 2316 bp, Homo sapiens
  Payload ID: 10166
  Gene Symbol: MCCC1
  Gene Name: methylcrotonoyl-CoA carboxylase 1 (alpha)
  ENST ID: ENST00000629669
  CDS Start-End: 252-1556
atcagcccaaaggtaggctcaggctccgacggtggccggcgggggtcacgaggcttcgtagtggaggaacgggtttggcgtgtgggacgcagctgcctctgtactggggagtcacggagtggccgggctccagggacatggcggcggcctctgcggtgtcggtgctgctggtggcggcggagaggaaccggtggcatcgtctcccgagcctgctcctgccgccgaggacatgggtgtggaggcaaagaaccatgaagtacacaacagccacaggaagaaacattaccaaggtcctcattgcaaacagaggagaaattgcctgcagggtgatgcgcacagccaaaaaactgggtgtacagactgtggcggtttatagtgaggctgacagaaattccatgcatgtagatatggcagatgaagcatattccatcggccccgctccctcccagcagagctacctatctatggagaaaatcattcaagtggccaagacctctgctgcacaggctatccatccaggatgcggttttctctcagaaaacatggaatttgctgaactttgtaagcaagaaggaattatttttataggccctcctccatctgcaattagagacatgggtataaagagcacatccaaatccataatggctgctgctggagtacctgttgtggagggttatcatggtgaggaccaatcagaccagtgcctgaaggaacacgccaggagaattggctatcctgtcatgattaaagccgtccggggtggaggaggaaaaggaatgaggattgttagatcagaacaagaatttcaagaacagttagagtcagcacggagagaagctaagaagtctttcaatgatgatgctatgctgatcgagaagtttgtagacacaccgaggcatgtagaagtccaggtgtttggtgatcaccatggcaatgctgtgtacttgtttgaaagagactgtagtgtgcagaggcgacatcagaagatcattgaggaggccccagcgcctggtattaaatctgaagtaagaaaaaagctgggagaagctgcagtcagagctgctaaagctgtaaattatgttggagcagggactgtggagtttattatggactcaaaacataatttctgtttcatggagatgaatacaaggctgcaagtggaacatcctgttactgagatgatcacaggaactgacttggtggagtggcagcttagaattgcagcaggagagaagattcctttgagccaggaagaaataactctgcagggccatgccttcgaagctagaatatatgcagaagatcctagcaataacttcatgcctgtggcaggcccattagtgcacctctctactcctcgagcagacccttccaccaggattgaaactggagtacggcaaggagacgaagtttccgtgcattatgaccccatgattgcgaagctggtcgtgtgggcagcagatcgccaggcggcattgacaaaactgaggtacagccttcgtcagtacaatatcaattctctccattttcgtctagcagtggaagaagactgaatatctcgtataccagaaacatgactcttaaagatggtaaaaacaatgtagccatagctgtaacgtataaccatgatgggtcttatagcatgcagattgaagataaaactttccaagtccttggtaatctttacagcgagggagactgcacttacctgaaatgttctgttaatggagttgctagtaaagcgaagctgattatcctggaaaacactatttacctattttccaaggaaggaagtattgagattgacattccagtccccaaatacttatcttctgtgagctcacaagaaactcagggcggccccttagctcctatgactggaaccattgaaaaggtgtttgtcaaagctggagacaaagtgaaagcgggagattccctcatggttatgatcgccatgaagatggagcataccataaagtctccaaaggatggcacagtaaagaaagtgttctacagagaaggtgctcaggccaacagacacactcctttagtcgagtttgaggaggaagaatcagacaaaagggaatcggaataaactccagcaaggaaatggccagttaagtagtgtcttctctctccaccaaaaagaggaagtgcctccagcttttctgggggtctcataaagagcagttttactaaatgattgtatgcttatgctgaacacctttcatattggagaatcatgcatttgggtcactaattatctcaaaatatttcatactaataaagttgaattattttttattggaagcc

SEQ ID NO: 153365 - DNA, 3665 bp, Homo sapiens
  Payload ID: 10167
  Gene Symbol: MCCC2
  Gene Name: methylcrotonoyl-CoA carboxylase 2 (beta)
  Uniprot ID: Q9HCC0
  ENST ID: ENST00000340941
  CDS Start-End: 130-1821
agaatcagagaaaccttctctggggctgcaaggacctgagctcagcttccgccccagccagggaagcggcaggggaaagcaccggctccaggccagcgtgggccgctctctcgctcggtgcccgccgccatgtgggccgtcctgaggttagccctgcggccgtgtgcccgcgcctctcccgccgggccgcgcgcctatcacggggactcggtggcctcgctgggcacccagccggacttgggctctgccctctaccaggagaactacaagcagatgaaagcactagtaaatcagctccatgaacgagtggagcatataaaactaggaggtggtgagaaagcccgagcacttcacatatcaagaggaaaactattgcccagagaaagaattgacaatctcatagacccagggtctccatttctggaattatcccagtttgcaggttaccagttatatgacaatgaggaggtgccaggaggtggcattattacaggcattggaagagtatcaggagtagaatgcatgattattgccaatgatgccaccgtcaaaggaggtgcctactacccagtgactgtgaaaaaacaattacgggcccaagaaattgccatgcaaaacaggctcccctgcatctacttagttgattcgggaggagcatacttacctcgacaagcagatgtgtttccagatcgagaccactttggccgtacattctataatcaggcaattatgtcttctaaaaatattgcacagatcgcagtggtcatgggctcctgcaccgcaggaggagcctatgtgcctgccatggctgatgaaaacatcattgtacgcaagcagggtaccattttcttggcaggaccccccttggttaaagcggcaactggggaagaagtatctgctgaggatcttggaggtgctgatcttcattgcagaaagtctggagtaagtgaccactgggctttggatgatcatcatgcccttcacttaactaggaaggttgtgaggaatctaaattatcagaagaaattggatgtcaccattgaaccttctgaagagcctttatttcctgctgatgaattgtatggaatagttggtgctaaccttaagaggagctttgatgtccgagaggtcattgctagaatcgtggatggaagcagattcactgagttcaaagccttttatggagacacattagttacaggatttgctcgaatatttgggtacccagtaggtatcgttggaaacaacggagttctcttttctgaatctgcaaaaaagggtactcactttgtccagttatgctgccaaagaaatattcctctgctgttccttcaaaacattactggatttatggttggtagagagtatgaagctgaaggaattgccaaggatggtgccaagatggtggccgctgtggcctgtgcccaagtgcctaagataaccctcatcattgggggctcctatggagccggaaactatgggatgtgtggcagagcatatagcccaagatttctctacatttggccaaatgctcgtatctcagtgatgggaggagagcaggcagccaatgtgttggccacgataacaaaggaccaaagagcccgggaaggaaagcagttctccagtgctgatgaagcggctttaaaagagcccatcattaagaagtttgaagaggaaggaaacccttactattccagcgcaagggtatgggatgatgggatcattgatccagcagacaccagactggtcttgggtctcagttttagtgcagccctcaacgcaccaatagagaagactgacttcggtatcttcaggatgtaactggaataaaggatgttttctgttggacatgtactgaaaattaacacatgtagtagccttaaaattttagacttctcgaacatgaggctgttacagtaatttttttaacactgtgcattgtacttttctaccttaaaaaaatcagtgaggatatttatttaatgaacatcaattccttttaaattttcttagagaaatttctctgtggctcagttttaccacccataaagcggagacagtaatttacggttatcctttctgacccacaaagtatgaaaagttctgtaatctgtaaactcagttctgtaatctgtattattgagatgattaatataaagttgtattttcactgaaatgattgttttgctggttatgcttggtgatattttagcgggcttatttttgaaaggcatctgttacttcagtggcataaagtgccctcacactgctgtgcagccatcaccaccattcatctccagaatttgttctcagtcccaaactgaaactataccattcaaacaacagcgctccccatttccccctcccccgagcccatgacatctccttattattattttttttttgagacagggtgtttctctgttgcccaggctggagtgcggtggtgtgatctcggctcactgcagcttccacctcccgggttcaagcgattcttgtgcctcagcctcccaagcagctgggactataggcacgcaccaccacacccagctaagttctgtatttttagcagagacgggatttcactaggttgcccaggctggtctcaaactactgacctcaagtgatccacccgcctcggcctcccaaagtgctgggattacaggtgtgagccaccgcgcctgaccacatctccttattcttaaatgtatgtgtttctcatggtttgatttattcttgctgggccatttcagcccctgtcatggcttcactcgccatctaaatgcagatgattactgccttgacggttcttaacccagctctcccctgagctgcaggcctgcatatccagtaggtctactggacatctgtactggttgttgtggaggaacctctggcttgctcattaagtcctactgattttcactatcccctgaatttccccacttatttttgtctttcactatcgcaggccttagaagaggtctacctgcctccagtcttacctagtccagtctaccccctggagttagaatggccatcctgaagtgaaaagtaatgtcagattactcccttcagtgatttcttgtagaagtgccaatccctgaatgccaccaagatcttaatcttcacatctttaatcttatctctttgactcctctttacaccggagaacggctccagctgttctagctctctttcagttctttgaaccttcccaccttagggtctataaggttccctctgcccaaattgttctactctcccttcttcttcaacacatccttcagtttaagcacttgcttctctcagtttaaactccacttccttagggatgtctctgtgacctccctgtgctggattagcttccctactctatgctcttgtaaaacactatctacttcctttgtcataaactcatcattttcctataaacattaatattgtcctcctgctagaatgtaagctccgtgagagcaaggatcctcctgtttaccctgtacctccaatgtctggcacttgtaggtgctcaaatattcgttgaatgaatgaaaaatccatattgtaattgatgtcctctggccacatagttttaaaattaggtgattgattatatgaccgaatagaactatcaaatgttttcctaataaagtcaatatttcaaa

SEQ ID NO: 153366 - DNA, 1214 bp, Homo sapiens
  Payload ID: 10167
  Gene Symbol: MCCC2
  Gene Name: methylcrotonoyl-CoA carboxylase 2 (beta)
  ENST ID: ENST00000509358
  CDS Start-End: 97-1188
acctgagctcagcttccgccccagccagggaagcggcaggggaaagcaccggctccaggccagcgtgggccgctctctcgctcggtgcccgccgccatgtgggccgtcctgaggttagccctgcggccgtgtgcccgcgcctctcccgccgggccgcgcgcctatcacggggactcggtggcctcgctgggcacccagccggacttgggctctgccctctaccaggagaactacaagcagatgaaagcactagtaaatcagctccatgaacgagtggagcatataaaactaggaggtggtgagaaagcccgagcacttcacatatcaagaggaaaactattgcccagagaaagaattgacaatctcatagacccagggtctccatttctggaattatcccagtttgcaggttaccagttatatgacaatgaggaggtgccaggaggtggcattattacaggcattggaagagtatcaggagtagaatgcatgattattgccaatgatgccaccgtcaaaggaggtgcctactacccagtgactgtgaaaaaacaattacgggcccaagaaattgccatgcaaaacaggctcccctgcatctacttagttgattcgggaggagcatacttacctcgacaagcagatgtgtttccagatcgagaccactttggccgtacattctataatcaggcaattatgtcttctaaaaatattgcacagatcgcagtggtcatgggctcctgcaccgcaggaggagcctatgtgcctgccatggctgatgaaaacatcattgtacgcaagcagggtaccattttcttggcaggaccccccttggttaaagcggcaactggggaagaagtatctgctgaggatcttggaggtgctgatcttcattgcagaaagtctggagtaagtgaccactgggctttggatgatcatcatgcccttcacttaactaggaaggttgtgaggaatctaaattatcagaagaaattggatgtcaccattgaaccttctgaagagcctttatttcctgctgatgaattgtatggaatagttggtgctaaccttaagaggagctttgatgtccgagaggtcattgctagaatcgtggatggaagcagattcactgagttcaaagccttttatggagacacattagttacaggtataaaggtgaagaattgaaaatacgaacattttctgctgctttg

SEQ ID NO: 153367 - DNA, 2127 bp, Homo sapiens
  Payload ID: 10167
  Gene Symbol: MCCC2
  Gene Name: methylcrotonoyl-CoA carboxylase 2 (beta)
  ENST ID: ENST00000512218
  CDS Start-End: 139-1128
acaggcctgagaatcagagaaaccttctctggggctgcaaggacctgagctcagcttccgccccagccagggaagcggcaggggaaagcaccggctccaggccagcgtgggccgctctctcgctcggtgcccgccgccatgtgggccgtcctgaggttagccctgcggccgtgtgcccgcgcctctcccgccgggccgcgcgcctatcacggggactcggtggcctcgctgggcacccagccggacttgggctctgccctctaccaggagaactacaagcagatgaaagcactagtaaatcagctccatgaacgagtggagcatataaaactaggaggtggtgagaaagcccgagcacttcacatatcaagaggaaaactattgcccagagaaagaattgacaatctcatagacccagggtctccatttctggaattatcccagtttgcaggttaccagttatatgacaatgaggaggtgccaggaggtggcattattacaggcattggaagagtatcaggagtagaatgcatgattattgccaatgatgccaccgtcaaaggaggtgcctactacccagtgactgtgaaaaaacaattacgggcccaagaaattgccatgcaaaacaggctcccctgcatctacttagttgattcgggaggagcatacttacctcgacaagcagatgtgtttccagatcgagaccactttggccgtacattctataatcaggcaattatgtcttctaaaaatattgcacaggttaaagcggcaactggggaagaagtatctgctgaggatcttggaggtgctgatcttcattgcagaaagtctggagtaagtgaccactgggctttggatgatcatcatgcccttcacttaactaggaaggttgtgaggaatctaaattatcagaagaaattggatgtcaccattgaaccttctgaagagcctttatttcctgctgatgaattgtatggaatagttggtgctaaccttaagaggagctttgatgtccgagaggtcattgctagaatcgtggatggaagcagattcactgagttcaaagccttttatggagacacattagttacaggtataaagcccttggaaaagcacaagacataaatcttctttgaactttcttttgaggatttgctcgaatatttgggtacccagtaggtatcgttggaaacaacggagttctcttttctgaatctgcaaaaaagggtactcactttgtccagttatgctgccaaagaaatattcctctgctgttccttcaaaacattactggatttatggttggtagagagtatgaagctgaaggaattgccaaggatggtgccaagatggtggccgctgtggcctgtgcccaagtgcctaagataaccctcatcattgggggctcctatggagccggaaactatgggatgtgtggcagagcatatagcccaagatttctctacatttggccaaatgctcgtatctcagtgatgggaggagagcaggcagccaatgtgttggccacgataacaaaggaccaaagagcccgggaaggaaagcagttctccagtgctgatgaagcggctttaaaagagcccatcattaagaagtttgaagaggaaggaaacccttactattccagcgcaagggtatgggatgatgggatcattgatccagcagacaccagactggtcttgggtctcagttttagtgcagccctcaacgcaccaatagagaagactgacttcggtatcttcaggatgtaactggaataaaggatgttttctgttggacatgtactgaaaattaacacatgtagtagccttaaaattttagacttctcgaacatgaggctgttacagtaatttttttaacactgtgcattgtacttttctaccttaaaaaaatcagtgaggatatttatttaatgaacatcaattccttttaaattttcttagagaaatttctctgtggctcagttttaccacccataaagcggagacagtaatttacggttatcctttctgacccacaaagtatgaaaagttctgtaatctgtaaactcagttctgtaatctgtattattgagatgattaatataaagttgtattttcactgaaa

SEQ ID NO: 153368 - DNA, 895 bp, Homo sapiens
  Payload ID: 10167
  Gene Symbol: MCCC2
  Gene Name: methylcrotonoyl-CoA carboxylase 2 (beta)
  ENST ID: ENST00000509539
  CDS Start-End: 38-895
gggctcctgcaccgcaggaggagcctatgtgcctgccatggctgatgaaaacatcattgtacgcaagcagggtaccattttcttggcaggaccccccttggttaaagcggcaactggggaagaagtatctgctgaggatcttggaggtgctgatcttcattgcagaaagtctggagtaagtgaccactgggctttggatgatcatcatgcccttcacttaactaggaaggttgtgaggaatctaaattatcagaagaaattggatgtcaccattgaaccttctgaagagcctttatttcctgctgatgaattgtatggaatagttggtgctaaccttaagaggagctttgatgtccgagagaaattcttcatgaaatattttctacggctagatcttaattcctataatagtacttggcaacatggatttgctcgaatatttgggtacccagtaggtatcgttggaaacaacggagttctcttttctgaatctgcaaaaaagggtactcactttgtccagttatgctgccaaagaaatattcctctgctgttccttcaaaacattactggatttatggttggtagagagtatgaagctgaaggaattgccaaggatggtgccaagatggtggccgctgtggcctgtgcccaagtgcctaagataaccctcatcattgggggctcctatggagccggaaactatgggatgtgtggcagagcatatagcccaagatttctctacatttggccaaatgctcgtatctcagtgatgggaggagagcaggcagccaatgtgttggccacgataacaaaggaccaaagagcccgggaaggaaagcagttctccagtgctgatgaagcggctttaaaagagcccatcattaagaagtttgaa

SEQ ID NO: 153369 - DNA, 753 bp, Homo sapiens
  Payload ID: 10167
  Gene Symbol: MCCC2
  Gene Name: methylcrotonoyl-CoA carboxylase 2 (beta)
  ENST ID: ENST00000616108
  CDS Start-End: 130-753
agaatcagagaaaccttctctggggctgcaaggacctgagctcagcttccgccccagccagggaagcggcaggggaaagcaccggctccaggccagcgtgggccgctctctcgctcggtgcccgccgccatgtgggccgtcctgaggttagccctgcggccgtgtgcccgcgcctctcccgccgggccgcgcgcctatcacggggactcggtggcctcgctgggcacccagccggacttgggctctgccctctaccaggagaactacaagcagatgaaagcactagtaaatcagctccatgaacgagtggagcatataaaactaggaggtggtgagaaagcccgagcacttcacatatcaagaggaaaactattgcccagagaaagaattgacaatctcatagacccagggtctccatttctggaattatcccagtttgcaggttaccagttatatgacaatgaggaggtgccaggaggtggcattattacaggcattggaagagtatcaggagtagaatgcatgattattgccaatgatgccaccgtcaaaggaggtgcctactacccagtgactgtgaaaaaacaattacgggcccaagaaattgccatgcaaaacaggctcccctgcatctacttagttgattcgggaggagcatacttacctcgacaagcagatgtgtttccagatcgagaccactttggccgtacattctataatcaggcaattatgtcttctaaaaatattgcacag

SEQ ID NO: 153370 - DNA, 720 bp, Homo sapiens
  Payload ID: 10167
  Gene Symbol: MCCC2
  Gene Name: methylcrotonoyl-CoA carboxylase 2 (beta)
  ENST ID: ENST00000613643
  CDS Start-End: 97-720
acctgagctcagcttccgccccagccagggaagcggcaggggaaagcaccggctccaggccagcgtgggccgctctctcgctcggtgcccgccgccatgtgggccgtcctgaggttagccctgcggccgtgtgcccgcgcctctcccgccgggccgcgcgcctatcacggggactcggtggcctcgctgggcacccagccggacttgggctctgccctctaccaggagaactacaagcagatgaaagcactagtaaatcagctccatgaacgagtggagcatataaaactaggaggtggtgagaaagcccgagcacttcacatatcaagaggaaaactattgcccagagaaagaattgacaatctcatagacccagggtctccatttctggaattatcccagtttgcaggttaccagttatatgacaatgaggaggtgccaggaggtggcattattacaggcattggaagagtatcaggagtagaatgcatgattattgccaatgatgccaccgtcaaaggaggtgcctactacccagtgactgtgaaaaaacaattacgggcccaagaaattgccatgcaaaacaggctcccctgcatctacttagttgattcgggaggagcatacttacctcgacaagcagatgtgtttccagatcgagaccactttggccgtacattctataatcaggcaattatgtcttctaaaaatattgcacag

SEQ ID NO: 153371 - DNA, 720 bp, Homo sapiens; identical to SEQ ID NO: 153370
  Payload ID: 10167
  Gene Symbol: MCCC2
  Gene Name: methylcrotonoyl-CoA carboxylase 2 (beta)
  ENST ID: ENST00000626890
  CDS Start-End: 97-720

SEQ ID NO: 153372 - DNA, 744 bp, Homo sapiens
  Payload ID: 10167
  Gene Symbol: MCCC2
  Gene Name: methylcrotonoyl-CoA carboxylase 2 (beta)
  ENST ID: ENST00000628716
  CDS Start-End: 121-744
gaaaccttctctggggctgcaaggacctgagctcagcttccgccccagccagggaagcggcaggggaaagcaccggctccaggccagcgtgggccgctctctcgctcggtgcccgccgccatgtgggccgtcctgaggttagccctgcggccgtgtgcccgcgcctctcccgccgggccgcgcgcctatcacggggactcggtggcctcgctgggcacccagccggacttgggctctgccctctaccaggagaactacaagcagatgaaagcactagtaaatcagctccatgaacgagtggagcatataaaactaggaggtggtgagaaagcccgagcacttcacatatcaagaggaaaactattgcccagagaaagaattgacaatctcatagacccagggtctccatttctggaattatcccagtttgcaggttaccagttatatgacaatgaggaggtgccaggaggtggcattattacaggcattggaagagtatcaggagtagaatgcatgattattgccaatgatgccaccgtcaaaggaggtgcctactacccagtgactgtgaaaaaacaattacgggcccaagaaattgccatgcaaaacaggctcccctgcatctacttagttgattcgggaggagcatacttacctcgacaagcagatgtgtttccagatcgagaccactttggccgtacattctataatcaggcaattatgtcttctaaaaatattgcacag

SEQ ID NO: 153373 - DNA, 1128 bp, Homo sapiens
  Payload ID: 10167
  Gene Symbol: MCCC2
  Gene Name: methylcrotonoyl-CoA carboxylase 2 (beta)
  ENST ID: ENST00000629193
  CDS Start-End: 139-1128
acaggcctgagaatcagagaaaccttctctggggctgcaaggacctgagctcagcttccgccccagccagggaagcggcaggggaaagcaccggctccaggccagcgtgggccgctctctcgctcggtgcccgccgccatgtgggccgtcctgaggttagccctgcggccgtgtgcccgcgcctctcccgccgggccgcgcgcctatcacggggactcggtggcctcgctgggcacccagccggacttgggctctgccctctaccaggagaactacaagcagatgaaagcactagtaaatcagctccatgaacgagtggagcatataaaactaggaggtggtgagaaagcccgagcacttcacatatcaagaggaaaactattgcccagagaaagaattgacaatctcatagacccagggtctccatttctggaattatcccagtttgcaggttaccagttatatgacaatgaggaggtgccaggaggtggcattattacaggcattggaagagtatcaggagtagaatgcatgattattgccaatgatgccaccgtcaaaggaggtgcctactacccagtgactgtgaaaaaacaattacgggcccaagaaattgccatgcaaaacaggctcccctgcatctacttagttgattcgggaggagcatacttacctcgacaagcagatgtgtttccagatcgagaccactttggccgtacattctataatcaggcaattatgtcttctaaaaatattgcacaggttaaagcggcaactggggaagaagtatctgctgaggatcttggaggtgctgatcttcattgcagaaagtctggagtaagtgaccactgggctttggatgatcatcatgcccttcacttaactaggaaggttgtgaggaatctaaattatcagaagaaattggatgtcaccattgaaccttctgaagagcctttatttcctgctgatgaattgtatggaatagttggtgctaaccttaagaggagctttgatgtccgagaggtcattgctagaatcgtggatggaagcagattcactgagttcaaagccttttatggagacacattagttacaggtataaagcccttggaaaagcacaagacataa

SEQ ID NO: 153374 - DNA, 762 bp, Homo sapiens
  Payload ID: 10167
  Gene Symbol: MCCC2
  Gene Name: methylcrotonoyl-CoA carboxylase 2 (beta)
  ENST ID: ENST00000628261
  CDS Start-End: 139-762
acaggcctgagaatcagagaaaccttctctggggctgcaaggacctgagctcagcttccgccccagccagggaagcggcaggggaaagcaccggctccaggccagcgtgggccgctctctcgctcggtgcccgccgccatgtgggccgtcctgaggttagccctgcggccgtgtgcccgcgcctctcccgccgggccgcgcgcctatcacggggactcggtggcctcgctgggcacccagccggacttgggctctgccctctaccaggagaactacaagcagatgaaagcactagtaaatcagctccatgaacgagtggagcatataaaactaggaggtggtgagaaagcccgagcacttcacatatcaagaggaaaactattgcccagagaaagaattgacaatctcatagacccagggtctccatttctggaattatcccagtttgcaggttaccagttatatgacaatgaggaggtgccaggaggtggcattattacaggcattggaagagtatcaggagtagaatgcatgattattgccaatgatgccaccgtcaaaggaggtgcctactacccagtgactgtgaaaaaacaattacgggcccaagaaattgccatgcaaaacaggctcccctgcatctacttagttgattcgggaggagcatacttacctcgacaagcagatgtgtttccagatcgagaccactttggccgtacattctataatcaggcaattatgtcttctaaaaatattgcacag

SEQ ID NO: 153375 - DNA, 3136 bp, Homo sapiens
  Payload ID: 10168
  Gene Symbol: MTHFD1
  Gene Name: methylenetetrahydrofolate dehydrogenase (NADP+ dependent) 1, methenyltetrahydrofolate cyclohydrolase, formyltetrahydrofolate synthetase
  Uniprot ID: P11586
  ENST ID: ENST00000216605
  CDS Start-End: 79-2886
gttgtcctgcttggctgcggagggagtggaacctcgatattggtggtgtccatcgtgggcagcggactaataaaggccatggcgccagcagaaatcctgaacgggaaggagatctccgcgcaaataagggcgagactgaaaaatcaagtcactcagttgaaggagcaagtacctggtttcacaccacgcctggcaatattacaggttggcaacagagatgattccaatctttatataaatgtgaagctgaaggctgctgaagagattgggatcaaagccactcacattaagttaccaagaacaaccacagaatctgaggtgatgaagtacattacatctttgaatgaagactctactgtacatgggttcttagtgcagctacctttagattcagagaattccattaacactgaagaagtgatcaatgctattgcacccgagaaggatgtggatggattgactagcatcaatgctgggaaacttgctagaggtgacctcaatgactgtttcattccttgtacgcctaagggatgcttggaactcatcaaagagacaggggtgccgattgccggaaggcatgctgtggtggttgggcgcagtaaaatagttggggccccgatgcatgacttgcttctgtggaacaatgccacagtgaccacctgccactccaagactgcccatctggatgaggaggtaaataaaggtgacatcctggtggttgcaactggtcagcctgaaatggttaaaggggagtggatcaaacctggggcaatagtcatcgactgtggaatcaattatgtcccagatgataaaaaaccaaatgggagaaaagttgtgggtgatgtggcatacgacgaggccaaagagagggcgagcttcatcactcctgttcctggcggcgtagggcccatgacagttgcaatgctcatgcagagcacagtagagagtgccaagcgtttcctggagaaatttaagccaggaaagtggatgattcagtataacaaccttaacctcaagacacctgttccaagtgacattgatatatcacgatcttgtaaaccgaagcccattggtaagctggctcgagaaattggtctgctgtctgaagaggtagaattatatggtgaaacaaaggccaaagttctgctgtcagcactagaacgcctgaagcaccggcctgatgggaaatacgtggtggtgactggaataactccaacacccctgggagaagggaaaagcacaactacaatcgggctagtgcaagcccttggtgcccatctctaccagaatgtctttgcgtgtgtgcgacagccttctcagggccccacctttggaataaaaggtggcgctgcaggaggcggctactcccaggtcattcctatggaagagtttaatctccacctcacaggtgacatccatgccatcactgcagctaataacctcgttgctgcggccattgatgctcggatatttcatgaactgacccagacagacaaggctctctttaatcgtttggtgccatcagtaaatggagtgagaaggttctctgacatccaaatccgaaggttaaagagactaggcattgaaaagactgaccctaccacactgacagatgaagagataaacagatttgcaagattggacattgatccagaaaccataacttggcaaagagtgttggataccaatgatagattcctgaggaagatcacgattggacaggctccaacggagaagggtcacacacggacggcccagtttgatatctctgtggccagtgaaattatggctgtcctggctctcaccacttctctagaagacatgagagagagactgggcaaaatggtggtggcatccagtaagaaaggagagcccgtcagtgccgaagatctgggggtgagtggtgcactgacagtgcttatgaaggacgcaatcaagcccaatctcatgcagacactggagggcactccagtgtttgtccatgctggcccgtttgccaacatcgcacatggcaattcctccatcattgcagaccggatcgcactcaagcttgttggcccagaagggtttgtagtgacggaagcaggatttggagcagacattggaatggaaaagttttttaacatcaaatgccggtattccggcctctgcccccacgtggtggtgcttgttgccactgtcagggctctcaagatgcacgggggcggccccacggtcactgctggactgcctcttcccaaggcttacatacaggagaacctggagctggttgaaaaaggcttcagtaacttgaagaaacaaattgaaaatgccagaatgtttggaattccagtagtagtggccgtgaatgcattcaagacggatacagagtctgagctggacctcatcagccgcctttccagagaacatggggcttttgatgccgtgaagtgcactcactgggcagaagggggcaagggtgccttagccctggctcaggccgtccagagagcagcacaagcacccagcagcttccagctcctttatgacctcaagctcccagttgaggataaaatcaggatcattgcacagaagatctatggagcagatgacattgaattacttcccgaagctcaacacaaagctgaagtctacacgaagcagggctttgggaatctccccatctgcatggctaaaacacacttgtctttgtctcacaacccagagcaaaaaggtgtccctacaggcttcattctgcccattcgcgacatccgcgccagcgttggggctggttttctgtaccccttagtaggaacgatgagcacaatgcctggactccccacccggccctgtttttatgatattgatttggaccctgaaacagaacaggtgaatggattattctaaacagatcaccatccatcttcaagaagctactttgaaagtctggccagtgtctattcaggcccactgggagttaggaagtataagtaagccaagagaagtcagcccctgcccagaagatctgaaactaatagtaggagtttccccagaagtcattttcagccttaattctcatcatgtataaattaacataaatcatgcatgtctgtttactttagtgacgttccacagaataaaaggaaacaagtttgcc

SEQ ID NO: 153376 - DNA, 6814 bp, Homo sapiens
  Payload ID: 10168
  Gene Symbol: MTHFD1
  Gene Name: methylenetetrahydrofolate dehydrogenase (NADP+ dependent) 1, methenyltetrahydrofolate cyclohydrolase, formyltetrahydrofolate synthetase
  ENST ID: ENST00000545908
  CDS Start-End: 230-3292
gattggctggaattacggccggattccggagtcctttccagctccctcttcggccgggtttcccgccgaatacaaaggcgcactgtgaactggctctttctttccgccaatcatttccgccagccattcatcaccgattttcttcatcttcccctccctcttccgtcccgcagtccccgacctgttagctctcggttagttaagggactcgggtccttccgaactgcgcatgcgccaccgcgtctgcagggggagaagcgggcaggggcgcaggcgcagtagtgtgatcccctggccagtccctaagcacgtgggttgggttgtcctgcttggctgcggagggagtggaacctcgatattggtggtgtccatcgtgggcagcggactaataaaggccatggcgccagcagaaatcctgaacgggaaggagatctccgcgcaaataagggcgagactgaaaaatcaagtcactcagttgaaggagcaagtacctggtttcacaccacgcctggcaatattacaggttggcaacagagatgattccaatctttatataaatgtgaagctgaaggctgctgaagagattgggatcaaagccactcacattaagttaccaagaacaaccacagaatctgaggtgatgaagtacattacatctttgaatgaagactctactgtacatgggttcttagtgcagctacctttagattcagagaattccattaacactgaagaagtgatcaatgctattgcacccgagaaggatgtggatggattgactagcatcaatgctgggaaacttgctagaggtgacctcaatgactgtttcattccttgtacgcctaagggatgcttggaactcatcaaagagacaggggtgccgattgccggaaggcatgctgtggtggttgggcgcagtaaaatagttggggccccgatgcatgacttgcttctgtggaacaatgccacagtgaccacctgccactccaagactgcccatctggatgaggaggtaaataaaggtgacatcctggtggttgcaactggtcagcctgaaatggttaaaggggagtggatcaaacctggggcaatagtcatcgactgtggaatcaattatgtcccagatgataaaaaaccaaatgggagaaaagttgtgggtgatgtggcatacgacgaggccaaagagagggcgagcttcatcactcctgttcctggcggcgtagggcccatgacagttgcaatgctcatgcagagcacagtagagagtgccaagcgtttcctggagaaatttaagccaggaaagtggatgattcagtataacaaccttaacctcaagacacctgttccaagtgacattgatatatcacgatcttgtaaaccgaagcccattggtaagctggctcgagaaattggtctgctgtctgaagaggtagaattatatggtgaaacaaaggccaaagttctgctgtcagcactagaacgcctgaagcaccggcctgatgggaaatacgtggtggtgactggaataactccaacacccctgggagaagggaaaagcacaactacaatcgggctagtgcaagcccttggtgcccatctctaccagaatgtctttgcgtgtgtgcgacagccttctcagggccccacctttggaataaaaggtggcgctgcaggaggcggctactcccaggtcattcctatggaagagtttaatctccacctcacaggtgacatccatgccatcactgcagctaataacctcgttgctgcggccattgatgctcggatatttcatgaactgacccagacagacaaggctctctttaatcgtttggtgccatcagtaaatggagtgagaaggttctctgacatccaaatccgaaggttaaagagactaggcattgaaaagactgaccctaccacactgacagatgaagagataaacagatttgcaagattggacattgatccagaaaccataacttggcaaagagtgttggataccaatgatagattcctgaggaagatcacgattggacaggctccaacggagaagggtcacacacggacggcccagtttgatatctctgtggccagtgaaattatggctgtcctggctctcaccacttctctagaagacatgagagagagactgggcaaaatggtggtggcatccagtaagaaaggagagcccgtcagtgccgaagatctgggggtgagtggtgcactgacagtgcttatgaaggacgcaatcaagcccaatctcatgcagacactggagggcactccagtgtttgtccatgctggcccgtttgccaacatcgcacatggcaattcctccatcattgcagaccggatcgcactcaagcttgttggcccagaagggtttgtagtgacggaagcaggatttggagcagacattggaatggaaaagttttttaacatcaaatgccggtattccggcctctgcccccacgtggtggtgcttgttgccactgtcagggctctcaagatgcacgggggcggccccacggtcactgctggactgcctcttcccaaggcttacatacaggagaacctggagctggttgaaaaaggcttcagtaacttgaagaaacaaattgaaaatgccagaatgtttggaattccagtagtagtggccgtgaatgcattcaagacggatacagagtctgagctggacctcatcagccgcctttccagagaacatggggcttttgatgccgtgaagtgcactcactgggcagaagggggcaagggtgccttagccctggctcaggccgtccagagagcagcacaagcacccagcagcttccagctcctttatgacctcaagctcccagttgaggataaaatcaggatcattgcacagaagatctatggagcagatgacattgaattacttcccgaagctcaacacaaagctgaagtctacacgaagcagggctttgggaatctccccatctgcatggctaaaacacacttgtctttgtctcacaacccagagcaaaaaggtgtccctacaggcttcattctgcccattcgcgacatccgcgccagcgttggggctggttttctgtaccccttagtaggaacgatcaccatccatcttcaagaagctactttgaaagtctggccagtgtctattcaggcccactgggagttaggaagtataagtaagccaagagaagtcagcccctgcccagaagatctgaaactaatagtaggagtttccccagaagtcattttcagccttaattctcatcatgtataaattaacataaatcatgcatgtctgtttactttagtgacgttccacagaataaaaggaaacaagtttgccatcttggtgttgcaatatgaattacagccttaacagactgtgccacaggtctctgccatcctttgtgagctcatttgtcaggcagacccttgggctgaagatgcaagttgcagtgtgccctttatgatactgttgtgtttagagggaaatgtatgcatgcttgtgtatttctgagaggacacataattcaggggacctcctgagagggttgggttggaagttgatgacttaccttttaatcttatacctttctatattgttgaattttgtttttctaccctgaggaagtattgcttatacaagtttttgcctgaacttccttggaattcccatttctgtcacagctttagcactgtctatgtttagagtgctcaagaaggatggtcatgcagcattagccttaggtgagcctctattctgttggtgcagcaagtattcattgagtttcttctaaatgcctgggctccacccttccctacagactttttatttttatttttatttttttgagacagtgtctctgtcgcccaggctggagtgcagtggcgcgatctcagctcactgcaacctccgtctcctgggttcaagtgattctcctgcctcagcctcccaagtagctgggattataggcatgagccaccatacctggcccagactttctttttcctaaaacattaggttggtaaaaaccacaattacttttgcaccaacctaatattttttttcctcctcttctggctgggcgtggaggtggctcatgcctgtaatcccagcactttgggaggccgaggtgggcggatcacttgaggtctggggttcaagaccagcttggccaacatggtaaaaccctgtttctaccaaaaatacaaaaattagctgggtgtggtggcaggcacctataaccccaggtacttgggaggctgaggtacgagaattgcttgaacccaggaggcagaggttgcagtgagccaggatcatgctgctgcactccagcctgggagacagagctagactctgtctaaaaaaataaatcaaatatttttccttctcttcttgttctttatcttctatctctgttcttcctctcccatttgtttccttccctttttccccttgtctccctccactggatccttccagaggatgctgcatcccactggcgccagtgctaaacactgctgatgttggcaaagcagtatttttcccagtgaccttggttttattatttttaattccctaggtccatgtcaatgttgtaatacagtcaattttacagtccacagaaatgatagcgctgccttgagaggcatatggcaaaggggtcacagtgcagagccccagctctatggcagagagcctcacccacctccctgcctccacatcctcaccatggaaataggagcactgttggtacctacctcgtgagggcggttctggaattactcaaacacatcatctaagatgctttgtacagggcctggcacattgtaagcacttgtcagttcctgttgcacagcatcctccaggccctgtttgcagagttaattgcttctggtactttttttttccttttttttttttttttttggcagggggggtaggggggttgggacaagagtcgtgctcttttgcccaggctgcagtgtagtgacgtgatctcagctcactgcaacctctgcctcccgggttcaagcgattctcccacctcagcctcccgagtagctgggattacaggttcgcaccaccatgcctggctaattttttgtattttcagtatagatggggttttgccatgttggccaggctggtctcaaactcctggcctcaagtgatcctcccacctcggcctcccaaagtgctgggattacaggcgtgagccactgtgcccgaccgctttctggtacatttcttaatgtcctgtgaaacttcacctggaatgggatttgctgggaattcattttgtagacaagggaaggatgcagtcttgtcagatatggtgacttaaggatcatcttaaaggatttaggtttcctaatatcgccaacagccacatgggtttaaatcctcaatactggtaggggctgggcatggtagctcacacctgtaatcccaccacactcagctgagttttgaagttctgttttttgtagagatggggtctcactgtcttgtccaggctgctgaggcaggaggatcacttgagcccaggagttcaagactaacctggacaagacagaccccatctctacaaaaaacaaaaccccaaaactcagctgagtgtgtggtgcacgcttgtagtcctagctccttgggagtctgatgtgagaggtttgcttgagcctaggagttcgaggccgcagtgagctatgactgagccaccgcattccagcctgagcaacagagcaagaccctgtgtcaaaataaaaaagacctatagaagcattagtgcttggggtaactattagcatgtgctggcagagaaggtctagtgcctttaccttggtgctaagagtccctccagattagtggctttcccgtgccctttctcttctctgggctgctaatgccttccttccccttattagtaatattactgataaacaaattgtacattctctgatctcacttcagaggctgtttctgtgcactgaagatgtacacacagtcttaattcaaaagagatagcatttatgtgctgccacattaaacagattgcaacagtattactattgagtttgtgttggctctgtgcaaccctcatggtgcccaggaacagatgaaaccaccagagacttggagcctcaggttcattcaatggtgtcccagggaacggggttggagggcttattcccagaaggcctctgaaatgtaagagctattaacaaggagttataagtcatttttggtagctataggcccaggcaatgggtagagatcaagatgggataaatggtaagatcagtagagtattgctcagataaatatgtaagctattttactggcacactgtatctagtgatattaacatgataagctataggtaggataatttctcatcagattgcagaaatacatttatagcctatttcctgttatataatgaaaagctactaatggggtagtagacaatgatatgggtaatagcttaaacagccttcgttgtcacttacctgaattcaggaatgacaggtttctttcatgcatgaggtactggatacattaaacacacacacacacacacacacacacacacacatatggcattgagttctagtcatatcctaaagaaaaactatggtgcgctatgttatttatagtactatactctgtgtgagtgactctgtgtgtatgtgtgttggtggaggtcagggatgacttgtttgtaatataccttaaggaagtctgtccgaatttgcccttcaaatactaaataaattcatctctcacctcaaa

SEQ ID NO: 153377 - DNA, 803 bp, Homo sapiens
  Payload ID: 10168
  Gene Symbol: MTHFD1
  Gene Name: methylenetetrahydrofolate dehydrogenase (NADP+ dependent) 1, methenyltetrahydrofolate cyclohydrolase, formyltetrahydrofolate synthetase
  Uniprot ID: P11586
  ENST ID: ENST00000555709
  CDS Start-End: 21-803
cgggtccttccgaactgcgcatgcgccaccgcgtctgcagggggagaagcgggcaggggcgcaggcgcagtagtgtgatcccctggccagtccctaagcacgtgggttgggttgtcctgcttggctgcggagggagtggaacctcgatattggtggtgtccatcgtgggcagcggactaataaaggccatggcgccagcagaaatcctgaacgggaaggagatctccgcgcaaataagggcgagactgaaaaatcaagtcactcagttgaaggagcaagtacctggtttcacaccacgcctggcaatattacaggttggcaacagagatgattccaatctttatataaatgtgaagctgaaggctgctgaagagattgggatcaaagccactcacattaagttaccaagaacaaccacagaatctgaggtgatgaagtacattacatctttgaatgaagactctactgtacatgggttcttagtgcagctacctttagattcagagaattccattaacactgaagaagtgatcaatgctattgcacccgagaaggatgtggatggattgactagcatcaatgctgggaaacttgctagaggtgacctcaatgactgtttcattccttgtacgcctaagggatgcttggaactcatcaaagagacaggggtgccgattgccggaaggcatgctgtggtggttgggcgcagtaaaatagttggggccccgatgcatgacttgcttctgtggaacaatgccacagtgaccacctgccactccaagactgcccatctggatgaggag

SEQ ID NO: 153378 - DNA, 509 bp, Homo sapiens
  Payload ID: 10168
  Gene Symbol: MTHFD1
  Gene Name: methylenetetrahydrofolate dehydrogenase (NADP+ dependent) 1, methenyltetrahydrofolate cyclohydrolase, formyltetrahydrofolate synthetase
  ENST ID: ENST00000557539
  CDS Start-End: 304-509
gctggtgactttctgccgggagagtgggtagttgcggcttcctggagcccccctagtcagaactcagaaatccaatctacttaattcccgttaatttggaggcaaataagggcgagactgaaaaatcaagtcactcagttgaaggagcaagtacctggtttcacaccacgcctggcaatattacaggttggcaacagagatgattccaatctttatataaatgtgaagctgaaggctgctgaagagattgggatcaaagccactcacattaagttaccaagaacaaccacagaatctgaggtgatgaagtacattacatctttgaatgaagactctactgtacatgggttcttagtgcagctacctttagattcagagaattccattaacactgaagaagtgatcaatgctattgcacccgagaaggatgtggatggattgactagcatcaatgctgggaaacttgctagaggtgacctcaatgactgtttcattccttgtacgcctaa

SEQ ID NO: 153379 - DNA, 571 bp, Homo sapiens
  Payload ID: 10168
  Gene Symbol: MTHFD1
  Gene Name: methylenetetrahydrofolate dehydrogenase (NADP+ dependent) 1, methenyltetrahydrofolate cyclohydrolase, formyltetrahydrofolate synthetase
  ENST ID: ENST00000557370
  CDS Start-End: 1-324
tatgacctcaagctcccagttgaggataaaatcaggatcattgcacagaagatctatggagcagatgacattgaattacttcccgaagctcaacacaaagctgaagtctacacgaagcagggctttgggaatctccccatctgcatggctaaaacacacttgtctttgtctcacaacccagagcaaaaaggtgtccctacaggcttcattctgcccattcgcgacatccgcgccagcgttggggctggttttctgtaccccttagtaggaacggtaagtgcatgctgcaagggagtagtgggcgcatctgcacttctcgtctgaagtgtgttgccgaaaccatcaagcaaatgccaagtgagcagagttcactgcccagaagaaaattggaatcgggcctattatgattgctgtggatcataagctataaagcaggagctatatagctcttgctgtggaccatcttggtgtcaaatcaagaatgatgccaggactactcatactgaataaaaaattctgtttcccagggacagtatgctcttcactgaatctaggatgagcccagttgata

SEQ ID NO: 153380 - DNA, 688 bp, Homo sapiens
  Payload ID: 10168
  Gene Symbol: MTHFD1
  Gene Name: methylenetetrahydrofolate dehydrogenase (NADP+ dependent) 1, methenyltetrahydrofolate cyclohydrolase, formyltetrahydrofolate synthetase
  ENST ID: ENST00000554739
  CDS Start-End: 620-688
agtagtgtgatcccctggccagtccctaagcacgtgggttgggttgtcctgcttggctgcggagggagtggaacctcgatattggtggtgtccatcgtgggcagcggactaataaaggccatggcgccagcagaaatcctgaacgggaaggagatctccgcccatctctctgccctggtcctagagttacttgaaacgtaatttggctcctgagtcctgagaatattctgcattccacttgacctctgcctgttctacccttgcgggacatctgaatgcttaattactgctgccttgagatctatttttttttttgagatgaagtcttgctgtgtccaatcttggctcactgcaacctctgcctcctgcatacaagcaattctctcatatcagcctcctgagtacctgggattacaggcaaataagggcgagactgaaaaatcaagtcactcagttgaaggagcaagtacctggtttcacaccacgcctggcaatattacaggttggcaacagagatgattccaatctttatataaatgtgaagctgaaggctgctgaagagattgggatcaaagccactcacattaagttaccaagaacaaccacagaatctgaggtgatgaagtacattacatctttgaatgaagactctactgtacatgggttcttagtgcagctacctttagat

SEQ ID NO: 153381 - DNA, 563 bp, Homo sapiens
  Payload ID: 10168
  Gene Symbol: MTHFD1
  Gene Name: methylenetetrahydrofolate dehydrogenase (NADP+ dependent) 1, methenyltetrahydrofolate cyclohydrolase, formyltetrahydrofolate synthetase
  ENST ID: ENST00000554768
  CDS Start-End: 489-563
agtagtgtgatcccctggccagtccctaagcacgtgggttgggttgtcctgcttggctgcggagggagtggaacctcgatattggtggtgtccatcgtgggcagcggactaataaaggccatggcgccagcagaaatcctgaacgggaaggagatctccgcccatctctctgccctggtcctagagttacttgaaacgtaatttggctcctgagtcctgagaatattctgcattccacttgacctctgcctgttctacccttgcgggacatctgaatgcttaattagcaaataagggcgagactgaaaaatcaagtcactcagttgaaggagcaagtacctggtttcacaccacgcctggcaatattacaggttggcaacagagatgattccaatctttatataaatgtgaagctgaaggctgctgaagagattgggatcaaagccactcacattaagttaccaagaacaaccacagaatctgaggtgatgaagtacattacatctttgaatgaagactctactgtacatgggttcttagtgcagctacctttagattcagag

SEQ ID NO: 153382 - DNA, 1049 bp, Homo sapiens
  Payload ID: 10169
  Gene Symbol: MTHFD1L
  Gene Name: methylenetetrahydrofolate dehydrogenase (NADP+ dependent) 1-like
  Uniprot ID: Q6UB35
  ENST ID: ENST00000367307
  CDS Start-End: 108-935
tccttcccgccgccgccgccgccgccgccgcctgctcccctggcacgcgccccgccgccctcggcagccgcagctccgtgtcccctgagaaccagccgtcccgcgccatgggcacgcgtctgccgctcgtcctgcgccagctccgccgcccgccccagcccccgggccctccgcgccgcctccgtgtgccctgtcgcgctagcagcggcggcggcggaggcggcggcggtggccgggagggcctgcttggacagcggcggccgcaggatggccaggcccggagcagctgcagccccggcggccgaacgcccgcggcgcgggactccatcgtcagagaagtcattcagaattcaaaagaagttctaagtttattgcaagaaaaaaaccctgccttcaagccggttcttgcaattatccaggcaggtgacgacaacttgatgcaggaaatcaaccagaatttggctgaggaggctggtctgaacatcactcacatttgcctccctccagatagcagtgaagccgagattatagatgaaatcttaaagatcaatgaagataccagagtacatggccttgcccttcagatctctgagaacttgtttagcaacaaagtcctcaatgccttgaaaccagaaaaagatgtggatggagtaacagacataaacctggggaagctggtgcgaggggatgcccatgaatgttttgtttcacctgttgccaaagctgtaattgaacttcttgaaaaatcaggtgtcaacctagatggaaagaagattttggtagtgggggcccatgggtctttggaagctgctctacaatgcctgttccagagaaaagggtccatgacaatgagcatccagtggaaaacacgccagcttcaaagcaagacggagtctcgttctgtcaccaggctggagtgcaggcgcgtgatctaggctcactgcaagctctgcctcccaggttgaagtgattctcctgtgaaagggaattatttttgatgagtcattaaagtatatccattcccagaatggtgctgcatttttcctttt

SEQ ID NO: 153383 - DNA, 996 bp, Homo sapiens
  Payload ID: 10169
  Gene Symbol: MTHFD1L
  Gene Name: methylenetetrahydrofolate dehydrogenase (NADP+ dependent) 1-like
  ENST ID: ENST00000367308
  CDS Start-End: 1-996
gtggccgggagggcctgcttggacagcggcggccgcaggatggccaggcccggagcagctgcagccccggcggccgaacgcccgcggcgcgggactccatcgtcagagaagtcattcagaattcaaaagaagttctaagtttattgcaagaaaaaaaccctgccttcaagccggttcttgcaattatccaggcaggtgacgacaacttgatgcaggaaatcaaccagaatttggctgaggaggctggtctgaacatcactcacatttgcctccctccagatagcagtgaagccgagattatagatgaaatcttaaagatcaatgaagataccagagtacatggccttgcccttcagatctctgagaacttgtttagcaacaaagtcctcaatgccttgaaaccagaaaaagatgtggatggagtaacagacataaacctggggaagctggtgcgaggggatgcccatgaatgttttgtttcacctgttgccaaagctgtaattgaacttcttgaaaaatcagtaggtgtcaacctagatggaaagaagattttggtagtgggggcccatgggtctttggaagctgctctacaatgcctgttccagagaaaagggtccatgacaatgagcatccagtggaaaacacgccagcttcaaagcaagcttcacgaggctgacattgtggtcctaggctcacctaagccagaagagattccccttacttggatacaaccaggaactactgttctcaactgctcccatgacttcctgtcagggaaggttgggtgtggctctccaagaatacattttggtggactcattgaggaagatgatgtgattctccttgctgcagctctgcgaattcagaacatggtcagtagtggaaggagatggcttcgtgaacagcagcacaggcggtggagacttcactgcttgaaacttcagcctctctcccctgtgccaagtgacattgagatttcaagaggacaaactccaa

SEQ ID NO: 153384 - DNA, 3604 bp, Homo sapiens
  Payload ID: 10169
  Gene Symbol: MTHFD1L
  Gene Name: methylenetetrahydrofolate dehydrogenase (NADP+ dependent) 1-like
  Uniprot ID: Q6UB35
  ENST ID: ENST00000367321
  CDS Start-End: 275-3211
tgagtcccactccgcaccccaccctctgtctggtacagcttaccaaaccaaagtgcccaaagccgtgacatcccggccggcggctcgcaggcccccgccctccgcacgtcacggccgccgggtgcagtgccccctaggggcccctgggacgaggaggaagcgccaggtccttcccgccgccgccgccgccgccgccgcctgctcccctggcacgcgccccgccgccctcggcagccgcagctccgtgtcccctgagaaccagccgtcccgcgccatgggcacgcgtctgccgctcgtcctgcgccagctccgccgcccgccccagcccccgggccctccgcgccgcctccgtgtgccctgtcgcgctagcagcggcggcggcggaggcggcggcggtggccgggagggcctgcttggacagcggcggccgcaggatggccaggcccggagcagctgcagccccggcggccgaacgcccgcggcgcgggactccatcgtcagagaagtcattcagaattcaaaagaagttctaagtttattgcaagaaaaaaaccctgccttcaagccggttcttgcaattatccaggcaggtgacgacaacttgatgcaggaaatcaaccagaatttggctgaggaggctggtctgaacatcactcacatttgcctccctccagatagcagtgaagccgagattatagatgaaatcttaaagatcaatgaagataccagagtacatggccttgcccttcagatctctgagaacttgtttagcaacaaagtcctcaatgccttgaaaccagaaaaagatgtggatggagtaacagacataaacctggggaagctggtgcgaggggatgcccatgaatgttttgtttcacctgttgccaaagctgtaattgaacttcttgaaaaatcaggtgtcaacctagatggaaagaagattttggtagtgggggcccatgggtctttggaagctgctctacaatgcctgttccagagaaaagggtccatgacaatgagcatccagtggaaaacacgccagcttcaaagcaagcttcacgaggctgacattgtggtcctaggctcacctaagccagaagagattccccttacttggatacaaccaggaactactgttctcaactgctcccatgacttcctgtcagggaaggttgggtgtggctctccaagaatacattttggtggactcattgaggaagatgatgtgattctccttgctgcagctctgcgaattcagaacatggtcagtagtggaaggagatggcttcgtgaacagcagcacaggcggtggagacttcactgcttgaaacttcagcctctctcccctgtgccaagtgacattgagatttcaagaggacaaactccaaaagctgtggatgtccttgccaaggagattggattgcttgcagatgaaattgaaatctatggcaaaagcaaagccaaagtacgtttgtccgtgctagaaaggttaaaggatcaagcagatggaaaatacgtcttagttgctgggatcacacccacccctcttggagaagggaagagcacagtcaccatcgggcttgtgcaggctctgaccgcacacctgaatgtcaactcctttgcctgcttgaggcagccttcccaaggaccgacgtttggagtgaaaggaggagccgcgggtggtggatatgcccaggtcatccccatggaggagttcaaccttcacttgactggagacatccacgccatcaccgctgccaataacttgctggctgccgccatcgacacgaggattcttcatgaaaacacgcaaacagataaggctctgtataatcggctggttcctttagtgaatggtgtcagagaattttcagaaattcagcttgctcggctaaaaaaactgggaataaataagactgatccgagcacactgacagaagaggaagtgagtaaatttgcccgtctcgacatcgacccatctaccatcacgtggcagagagtattggatacaaatgaccgatttctacgaaaaataaccatcgggcagggaaacacagagaagggccattaccggcaggcgcagtttgacatcgcagtggccagcgagatcatggcggtgctggccctgacggacagcctcgcagacatgaaggcacggctgggaaggatggtggtggccagtgacaaaagcgggcagcctgtgacagcagatgatttgggggtgacaggtgctttgacagttttgatgaaagatgcaataaaaccaaacctgatgcagaccctggaagggacacctgtgttcgtgcatgcgggcccttttgctaacattgctcacggcaactcttcagtgttggctgataaaattgccctgaaactggttggtgaagaaggatttgtagtgaccgaagctggctttggtgctgacatcggaatggagaaattcttcaacatcaagtgccgagcttccggcttggtgcccaacgtggttgtgttagtggcaacggtgcgagctctgaagatgcatggaggcgggccaagtgtaacggctggtgttcctcttaagaaagaatatacagaggagaacatccagctggtggcagacggctgctgtaacctccagaagcaaattcagatcactcagctctttggggttcccgttgtggtggctctgaatgtcttcaagaccgacacccgcgctgagattgacttggtgtgtgagcttgcaaagcgggctggtgcctttgatgcagtcccctgctatcactggtccgttggtggaaaaggatcggtggacttggctcgggctgtgagagaggctgcgagtaaaagaagccgattccagttcctgtatgatgttcaggttccaattgtggacaagataaggaccattgctcaggctgtctatggagccaaagatattgaactctctcctgaggcacaagccaaaatagatcgttacactcaacagggttttggaaatttgcccatctgcatggcaaagacccacctttctctatctcaccaacctgacaaaaaaggtgtgccaagggacttcatcttacctatcagtgacgtccgggccagcataggcgctgggttcatttaccctttggtcggaacgatgagcaccatgccaggactgcccacccggccctgcttttatgacatagatcttgataccgaaacagaacaagttaaaggcttgttctaagtggacaaggctctcacaggacccgatgcagactcctgaaacagactactctttgcctttttgctgcagttggagaagaaactgaatttgaaaaatgtctgttatgcaatgctggagacatggtgaaataggccaaagatttcttcttcgttcaagatgaattctgttcacagtggagtatggtgttcggcaaaaggacctccaccaagactgaaagaaactaatttatttctgtttctgtggagtttccattatttctactgcttacactttagaatgtttattttatggggactaagggattaggagtgtgaactaaaaggtaacattttccactctcaagttttctactttgtctttgaactgaaaataaacatggatctagaaaaccaa

SEQ ID NO: 153385 - DNA, 503 bp, Homo sapiens
  Payload ID: 10169
  Gene Symbol: MTHFD1L
  Gene Name: methylenetetrahydrofolate dehydrogenase (NADP+ dependent) 1-like
  ENST ID: ENST00000453602
  CDS Start-End: 1-279
gtctatggagccaaagatattgaactctctcctgaggcacaagccaaaatagatcgttacactcaacagggttttggaaatttgcccatctgcatggcaaagacccacctttctctatctcaccaacctgacaaaaaaggtgtgccaagggacttcatcttacctatcagtgacgtccgggccagcataggcgctgggttcatttaccctttggtcggaacgagaagctcccctctggctctagttggagaatcccaacccaagcaagtccatccttaaacaataaacatctccagcattgctggctttggaagaccccatggtgagatgctggagcttttttccgctccagatttcgcttctaaatatttacttttactttccatgttcacttataggccagggtttttttttcctaccattgaattatttcgtcatgttctatttaattattgctttaattggcattggtgaccacaaataataataaatactattaactg

SEQ ID NO: 153386 - DNA, 606 bp, Homo sapiens
  Payload ID: 10169
  Gene Symbol: MTHFD1L
  Gene Name: methylenetetrahydrofolate dehydrogenase (NADP+ dependent) 1-like
  ENST ID: ENST00000420192
  CDS Start-End: 1-291
aacatccagctggtggcagacggctgctgtaacctccagaagcaaattcagatcactcagctctttggggttcccgttgtggtggctctgaatgtcttcaagaccgacacccgcgctgagattgacttggtgtgtgagcttgcaaagcgggctggtgcctttgatgcagtcccctgctatcactggtccgttggtggaaaaggatcggtggacttggctcgggctgtgagagaggctgcgagtaaaagaagccgattccagttcctgtatgatgttcagccattctcttgatcccagtgggggctggatgaaggaagagcaaaacaaaccacgaagacagcctggagccgcagccagctctgctgacttctgaacttcacgctctcactgcccagatggccaggggtgtttcctcctctgctggtcttttttaaggcaggatgtttgttgttattgttgttgtttttctggttggttcttaagaaattattttctacatcttgaaaatgccagctggaacctacaccagttgttggtggggtgtgagaactatcctttacatggacttggagcatttgcaactagagcctccacattgaaataaac

SEQ ID NO: 153387 - DNA, 427 bp, Homo sapiens
  Payload ID: 10169
  Gene Symbol: MTHFD1L
  Gene Name: methylenetetrahydrofolate dehydrogenase (NADP+ dependent) 1-like
  ENST ID: ENST00000450635
  CDS Start-End: 1-174
aatttgcccatctgcatggcaaagacccacctttctctatctcaccaacctgacaaaaaaggtgtgccaagggacttcatcttacctatcagtgacgtccgggccagcataggcgctgggttcatttaccctttggtcggaacgggaggcagagaagctcccctctggctctagttggagaatcccaacccaagcaagtccatccttaaacaataaacatctccagcattgctggctttggaagaccccatggtgagatgctggagcttttttccgctccagatttcgcttctaaatatttacttttactttccatgttcacttataggccagggtttttttttcctaccattgaattatttcgtcatgttctatttaattattgctttaattggcattggtgaccacaaataataataaatactat

SEQ ID NO: 153388 - DNA, 524 bp, Homo sapiens
  Payload ID: 10169
  Gene Symbol: MTHFD1L
  Gene Name: methylenetetrahydrofolate dehydrogenase (NADP+ dependent) 1-like
  ENST ID: ENST00000423867
  CDS Start-End: 183-524
gtgcgcccttccccgcgcgcggcccctcctgctgggctggggtctgtggctgacgtccgcttttcccggaacggcaaagagaagtcattcagaattcaaaagaagttctaagtttattgcaagaaaaaaaccctgccttcaagccggttcttgcaattatccaggcaggtgacgacaacttgatgcaggaaatcaaccagaatttggctgaggaggctggtctgaacatcactcacatttgcctccctccagatagcagtgaagccgagattatagatgaaatcttaaagatcaatgaagataccagagtacatggccttgcccttcagatctctgagaacttgtttagcaacaaagtcctcaatgccttgaaaccagaaaaagatgtggatggagtaacagacataaacctggggaagctggtgcgaggggatgcccatgaatgttttgtttcacctgttgccaaagctgtaattgaacttcttgaaaaatcaggtgtcaacctagatggaaagaagattttg

SEQ ID NO: 153389 - DNA, 1134 bp, Homo sapiens
  Payload ID: 10169
  Gene Symbol: MTHFD1L
  Gene Name: methylenetetrahydrofolate dehydrogenase (NADP+ dependent) 1-like
  ENST ID: ENST00000441122
  CDS Start-End: 234-560
gggagaggcgggctcgggcccagcgccgcccgcgcgaagctccctggtgttgtgcgcccttccccgcgcgcggcccctcctgctgggctggggtctgtggctgacgtccgcttttcccggaacggcaaagagaagtcattcagaattcaaaagaagttctaagtttattgcaagaaaaaaaccctgccttcaagccggttcttgcaattatccaggcaggtgacgacaacttgatgcaggaaatcaaccagaatttggctgaggaggctggtctgaacatcactcacatttgcctccctccagatagcagtgaagccgagattatagatgaaatcttaaagatcaatgaagataccagagtacatggccttgcccttcagatctctgagaacttgtttagcaacaaagtcctcaatgccttgaaaccagaaaaagatgtggatggagtaacagacataaacctggggaagctggtgcgaggggatgcccatgaatgttttgtttcacctgttgccaaagctgtaattgaacttcttgaaaaatcagcttcacgaggctgacattgtggtcctaggctcacctaagccagaagagattccccttacttggatacaaccaggaactactgttctcaactgctcccatgacttcctgtcagggaaggttgggtgtggctctccaagaatacattttggtggactcattgaggaagatgatgtgattctccttgctgcagctctgcgaattcagaacatggtcagtagtggaaggagatggcttcgtgaacagcagcacaggcggtggagacttcactgcttgaaacttcagcctctctcccctgtgccaagtgacattgagatttcaagaggacaaactccaaaagctgtggatgtccttgccaaggagattggattgcttgcagatgaaattgaaatctatggcaaaagcaaagccaaagtacgtttgtccgtgctagaaaggttaaaggatcaagcagatggaaaatacgtcttagttgctgggatcacacccacccctcttggagaagggaagagcacagtcaccatcgggcttgtgcaggctctgaccgcacacctgaatgtcaactcctttgcctgcttgaggcagccttcc

SEQ ID NO: 153390 - DNA, 3475 bp, Homo sapiens
  Payload ID: 10169
  Gene Symbol: MTHFD1L
  Gene Name: methylenetetrahydrofolate dehydrogenase (NADP+ dependent) 1-like
  ENST ID: ENST00000611279
  CDS Start-End: 145-3084
cccctaggggcccctgggacgaggaggaagcgccaggtccttcccgccgccgccgccgccgccgccgcctgctcccctggcacgcgccccgccgccctcggcagccgcagctccgtgtcccctgagaaccagccgtcccgcgccatgggcacgcgtctgccgctcgtcctgcgccagctccgccgcccgccccagcccccgggccctccgcgccgcctccgtgtgccctgtcgcgctagcagcggcggcggcggaggcggcggcggtggccgggagggcctgcttggacagcggcggccgcaggatggccaggcccggagcagctgcagccccggcggccgaacgcccgcggcgcgggactccatcgtcagagaagtcattcagaattcaaaagaagttctaagtttattgcaagaaaaaaaccctgccttcaagccggttcttgcaattatccaggcaggtgacgacaacttgatgcaggaaatcaaccagaatttggctgaggaggctggtctgaacatcactcacatttgcctccctccagatagcagtgaagccgagattatagatgaaatcttaaagatcaatgaagataccagagtacatggccttgcccttcagatctctgagaacttgtttagcaacaaagtcctcaatgccttgaaaccagaaaaagatgtggatggagtaacagacataaacctggggaagctggtgcgaggggatgcccatgaatgttttgtttcacctgttgccaaagctgtaattgaacttcttgaaaaatcagtaggtgtcaacctagatggaaagaagattttggtagtgggggcccatgggtctttggaagctgctctacaatgcctgttccagagaaaagggtccatgacaatgagcatccagtggaaaacacgccagcttcaaagcaagcttcacgaggctgacattgtggtcctaggctcacctaagccagaagagattccccttacttggatacaaccaggaactactgttctcaactgctcccatgacttcctgtcagggaaggttgggtgtggctctccaagaatacattttggtggactcattgaggaagatgatgtgattctccttgctgcagctctgcgaattcagaacatggtcagtagtggaaggagatggcttcgtgaacagcagcacaggcggtggagacttcactgcttgaaacttcagcctctctcccctgtgccaagtgacattgagatttcaagaggacaaactccaaaagctgtggatgtccttgccaaggagattggattgcttgcagatgaaattgaaatctatggcaaaagcaaagccaaagtacgtttgtccgtgctagaaaggttaaaggatcaagcagatggaaaatacgtcttagttgctgggatcacacccacccctcttggagaagggaagagcacagtcaccatcgggcttgtgcaggctctgaccgcacacctgaatgtcaactcctttgcctgcttgaggcagccttcccaaggaccgacgtttggagtgaaaggaggagccgcgggtggtggatatgcccaggtcatccccatggaggagttcaaccttcacttgactggagacatccacgccatcaccgctgccaataacttgctggctgccgccatcgacacgaggattcttcatgaaaacacgcaaacagataaggctctgtataatcggctggttcctttagtgaatggtgtcagagaattttcagaaattcagcttgctcggctaaaaaaactgggaataaataagactgatccgagcacactgacagaagaggaagtgagtaaatttgcccgtctcgacatcgacccatctaccatcacgtggcagagagtattggatacaaatgaccgatttctacgaaaaataaccatcgggcagggaaacacagagaagggccattaccggcaggcgcagtttgacatcgcagtggccagcgagatcatggcggtgctggccctgacggacagcctcgcagacatgaaggcacggctgggaaggatggtggtggccagtgacaaaagcgggcagcctgtgacagcagatgatttgggggtgacaggtgctttgacagttttgatgaaagatgcaataaaaccaaacctgatgcagaccctggaagggacacctgtgttcgtgcatgcgggcccttttgctaacattgctcacggcaactcttcagtgttggctgataaaattgccctgaaactggttggtgaagaaggatttgtagtgaccgaagctggctttggtgctgacatcggaatggagaaattcttcaacatcaagtgccgagcttccggcttggtgcccaacgtggttgtgttagtggcaacggtgcgagctctgaagatgcatggaggcgggccaagtgtaacggctggtgttcctcttaagaaagaatatacagaggagaacatccagctggtggcagacggctgctgtaacctccagaagcaaattcagatcactcagctctttggggttcccgttgtggtggctctgaatgtcttcaagaccgacacccgcgctgagattgacttggtgtgtgagcttgcaaagcgggctggtgcctttgatgcagtcccctgctatcactggtccgttggtggaaaaggatcggtggacttggctcgggctgtgagagaggctgcgagtaaaagaagccgattccagttcctgtatgatgttcaggttccaattgtggacaagataaggaccattgctcaggctgtctatggagccaaagatattgaactctctcctgaggcacaagccaaaatagatcgttacactcaacagggttttggaaatttgcccatctgcatggcaaagacccacctttctctatctcaccaacctgacaaaaaaggtgtgccaagggacttcatcttacctatcagtgacgtccgggccagcataggcgctgggttcatttaccctttggtcggaacgatgagcaccatgccaggactgcccacccggccctgcttttatgacatagatcttgataccgaaacagaacaagttaaaggcttgttctaagtggacaaggctctcacaggacccgatgcagactcctgaaacagactactctttgcctttttgctgcagttggagaagaaactgaatttgaaaaatgtctgttatgcaatgctggagacatggtgaaataggccaaagatttcttcttcgttcaagatgaattctgttcacagtggagtatggtgttcggcaaaaggacctccaccaagactgaaagaaactaatttatttctgtttctgtggagtttccattatttctactgcttacactttagaatgtttattttatggggactaagggattaggagtgtgaactaaaaggtaacattttccactctcaagttttctactttgtctttgaactgaaaataaacatggatctagaaaacc

SEQ ID NO: 153391 - DNA, 3159 bp, Homo sapiens
  Payload ID: 10169
  Gene Symbol: MTHFD1L
  Gene Name: methylenetetrahydrofolate dehydrogenase (NADP+ dependent) 1-like
  ENST ID: ENST00000618312
  CDS Start-End: 27-2768
acgtgcgcagccggccgccggctctgatgcaatcgcgccgggcgcgacccagacgagaagtcattcagaattcaaaagaagttctaagtttattgcaagaaaaaaaccctgccttcaagccggttcttgcaattatccaggcaggtgacgacaacttgatgcaggaaatcaaccagaatttggctgaggaggctggtctgaacatcactcacatttgcctccctccagatagcagtgaagccgagattatagatgaaatcttaaagatcaatgaagataccagagtacatggccttgcccttcagatctctgagaacttgtttagcaacaaagtcctcaatgccttgaaaccagaaaaagatgtggatggagtaacagacataaacctggggaagctggtgcgaggggatgcccatgaatgttttgtttcacctgttgccaaagctgtaattgaacttcttgaaaaatcagtaggtgtcaacctagatggaaagaagattttggtagtgggggcccatgggtctttggaagctgctctacaatgcctgttccagagaaaagggtccatgacaatgagcatccagtggaaaacacgccagcttcaaagcaagcttcacgaggctgacattgtggtcctaggctcacctaagccagaagagattccccttacttggatacaaccaggaactactgttctcaactgctcccatgacttcctgtcagggaaggttgggtgtggctctccaagaatacattttggtggactcattgaggaagatgatgtgattctccttgctgcagctctgcgaattcagaacatggtcagtagtggaaggagatggcttcgtgaacagcagcacaggcggtggagacttcactgcttgaaacttcagcctctctcccctgtgccaagtgacattgagatttcaagaggacaaactccaaaagctgtggatgtccttgccaaggagattggattgcttgcagatgaaattgaaatctatggcaaaagcaaagccaaagtacgtttgtccgtgctagaaaggttaaaggatcaagcagatggaaaatacgtcttagttgctgggatcacacccacccctcttggagaagggaagagcacagtcaccatcgggcttgtgcaggctctgaccgcacacctgaatgtcaactcctttgcctgcttgaggcagccttcccaaggaccgacgtttggagtgaaaggaggagccgcgggtggtggatatgcccaggtcatccccatggaggagttcaaccttcacttgactggagacatccacgccatcaccgctgccaataacttgctggctgccgccatcgacacgaggattcttcatgaaaacacgcaaacagataaggctctgtataatcggctggttcctttagtgaatggtgtcagagaattttcagaaattcagcttgctcggctaaaaaaactgggaataaataagactgatccgagcacactgacagaagaggaagtgagtaaatttgcccgtctcgacatcgacccatctaccatcacgtggcagagagtattggatacaaatgaccgatttctacgaaaaataaccatcgggcagggaaacacagagaagggccattaccggcaggcgcagtttgacatcgcagtggccagcgagatcatggcggtgctggccctgacggacagcctcgcagacatgaaggcacggctgggaaggatggtggtggccagtgacaaaagcgggcagcctgtgacagcagatgatttgggggtgacaggtgctttgacagttttgatgaaagatgcaataaaaccaaacctgatgcagaccctggaagggacacctgtgttcgtgcatgcgggcccttttgctaacattgctcacggcaactcttcagtgttggctgataaaattgccctgaaactggttggtgaagaaggatttgtagtgaccgaagctggctttggtgctgacatcggaatggagaaattcttcaacatcaagtgccgagcttccggcttggtgcccaacgtggttgtgttagtggcaacggtgcgagctctgaagatgcatggaggcgggccaagtgtaacggctggtgttcctcttaagaaagaatatacagaggagaacatccagctggtggcagacggctgctgtaacctccagaagcaaattcagatcactcagctctttggggttcccgttgtggtggctctgaatgtcttcaagaccgacacccgcgctgagattgacttggtgtgtgagcttgcaaagcgggctggtgcctttgatgcagtcccctgctatcactggtccgttggtggaaaaggatcggtggacttggctcgggctgtgagagaggctgcgagtaaaagaagccgattccagttcctgtatgatgttcaggttccaattgtggacaagataaggaccattgctcaggctgtctatggagccaaagatattgaactctctcctgaggcacaagccaaaatagatcgttacactcaacagggttttggaaatttgcccatctgcatggcaaagacccacctttctctatctcaccaacctgacaaaaaaggtgtgccaagggacttcatcttacctatcagtgacgtccgggccagcataggcgctgggttcatttaccctttggtcggaacgatgagcaccatgccaggactgcccacccggccctgcttttatgacatagatcttgataccgaaacagaacaagttaaaggcttgttctaagtggacaaggctctcacaggacccgatgcagactcctgaaacagactactctttgcctttttgctgcagttggagaagaaactgaatttgaaaaatgtctgttatgcaatgctggagacatggtgaaataggccaaagatttcttcttcgttcaagatgaattctgttcacagtggagtatggtgttcggcaaaaggacctccaccaagactgaaagaaactaatttatttctgtttctgtggagtttccattatttctactgcttacactttagaatgtttattttatggggactaagggattaggagtgtgaactaaaaggtaacattttccactctcaagttttctactttgtctttgaactgaaaataaacatggatctagaaaacc

SEQ ID NO: 153392 - DNA, 4456 bp, Homo sapiens
  Payload ID: 10170
  Gene Symbol: MTHFD2
  Gene Name: methylenetetrahydrofolate dehydrogenase (NADP+ dependent) 2, methenyltetrahydrofolate cyclohydrolase
  Uniprot ID: P13995
  ENST ID: ENST00000394053
  CDS Start-End: 81-1133
cggggcctgccacgaggccgcagtataaccgcgtggcccgcgcgcgcgcttccctcccggcgcagtcaccggcgcggtctatggctgcgacttctctaatgtctgctttggctgcccggctgctgcagcccgcgcacagctgctcccttcgccttcgccctttccacctcgcggcagttcgaaatgaagctgttgtcatttctggaaggaaactggcccagcagatcaagcaggaagtgcggcaggaggtagaagagtgggtggcctcaggcaacaaacggccacacctgagtgtgatcctggttggcgagaatcctgcaagtcactcctatgtcctcaacaaaaccagggcagctgcagttgtgggaatcaacagtgagacaattatgaaaccagcttcaatttcagaggaagaattgttgaatttaatcaataaactgaataatgatgataatgtagatggcctccttgttcagttgcctcttccagagcatattgatgagagaaggatctgcaatgctgtttctccagacaaggatgttgatggctttcatgtaattaatgtaggacgaatgtgtttggatcagtattccatgttaccggctactccatggggtgtgtgggaaataatcaagcgaactggcattccaaccctagggaagaatgtggttgtggctggaaggtcaaaaaacgttggaatgcccattgcaatgttactgcacacagatggggcgcatgaacgtcccggaggtgatgccactgttacaatatctcatcgatatactcccaaagagcagttgaagaaacatacaattcttgcagatattgtaatatctgctgcaggtattccaaatctgatcacagcagatatgatcaaggaaggagcagcagtcattgatgtgggaataaatagagttcacgatcctgtaactgccaaacccaagttggttggagatgtggattttgaaggagtcagacaaaaagctgggtatatcactccagttcctggaggtgttggccccatgacagtggcaatgctaatgaagaataccattattgctgcaaaaaaggtgctgaggcttgaagagcgagaagtgctgaagtctaaagagcttggggtagccactaattaactactgtgtcttctgtgtcacaaacagcactccaggccagctcaagaagcaaagcaggccaatagaaatgcaatatttttaatttattctactgaaatggtttaaaatgatgccttgtatttattgaaagcttaaatgggtgggtgtttctgcacatacctctgcagtacctcaccagggagcattccagtatcatgcagggtcctgtgatctagccaggagcagccattaacctagtgattaatatgggagacattaccatatggaggatggatgcttcactttgtcaagcacctcagttacacattcgccttttctaggattgcatttcccaagtgctattgcaataacagttgatactcattttaggtaccaaaccttttgagttcaactgatcaaaccaaaggaaaagtgttgctagagaaaattagggaaaaggtgaaaaagaaaaaatggtagtaattgagcagaaaaaaattaatttatatatgtattgattggcaaccagatttatctaagtagaactgaattggctaggaaaaaagaaaaactgcatgttaatcattttcctaagctgtccttttgaggcttagtcagtttattgggaaaatgtttaggattattccttgctattagtactcattttatgtatgttacccttcagtaagttctccccattttagttttctaggactgaaaggattcttttctacattatacatgtgtgttgtcatatttggcttttgctatatactttaacttcattgttaaatttttgtattgtatagtttctttggtgtatcttaaaacctatttttgaaaaacaaacttggcttgataatcatttgggcagcttgggtaagtacgcaacttacttttccaccaaagaactgtcagcagctgcctgcttttctgtgatgtatgtatcctgttgacttttccagaaattttttaagagtttgagttactattgaatttaatcagactttctgattaaagggttttctttcttttttaataaaacacatctgtctggtatggtatgaatttctgaaattctgtcttcctatgactcctagttgtgacctaaccagtttttttctcatttaatcaatgtagctattcctatattcagtaacacttacttctatagccttaaatagataattttttttcttctatttttttttttttttttgtagagatggggtcttgctatgttgcctgggctggtattgaactcctggcctcaagcaatcaatcctcttgcctcagcttcccagagggctgggattacaggcctgggccacccacacccaaacagaggtttaaagagctttggagaaaccagcctcgtcctccagtctctttgtttgtttgttttgagactgagtcttgctctgttgcccaggctggagtgcagtggcatgatctcgggtcactgcaacctctgcctctcgggttcaaacaattcttgtgcctcagcctcctgagtagctgggattacaggtgcatgccaccatgcctggctaatttttgtgtttttagtagagatggggtttcatcacattggccaggctggtctcaaactcctgacctcaagtgatccacctgcctcggcctcccaaaatgctaggattacaggcgtgagccactgcacctggcctgtcctacagtcttatatcacaacaggttgtgccaagctaggagcttaatctgtaaaatacttgaggcagggataggtttgtctgttttggcttttggctttcatgcgagcagaagtagctcctgctctaggcagcttgaggcagaaagagaagaaacaattgagttgacctacctccgtcctcgttcttctgccagctggcgttattcttttgatagttctctggagtttaaagaagtttagatagtttgctggagatgtttttgtaagtgacgtatagcttatgtctctaatccatgcctgcttacctagattattaaatgtggagcaagatgaccagacaggattaaattttattgaattacagttacaagtggaaaaaatgactgacttactgcatggagaagtattatgtcaacctgttaaaagctatggaaattaaaatgttcatgtatatacaaaatataaatgacatgtaaggtaaaattacagtgatcaatttacaacaaagaaattaacagtagttttccagcttgtttgattaatcaagcaggtttactcttgaatccatagcatttctacaatttaatttggacaaagttctattccagatcagccaggttttaaaactgaaatgtgttaagggtggattgttagcttccccaggattggtgtggatgataaatactttttttaaaaattaattattattgtttataagacatggattccagctgtctccctggctggagtgcagtggcatgattatagctcactgcagccttgaactcctggacttaaacgatcctcctgcatcagcctctgaaatggctgggactacaggtgtgtgccagcatgcctagctaatttttaaacatttgtttagagatgggtctcactatgttgcccaggctggtcttgacctcctgacctctgctgattccccccacctctgcctcccaagtagcgggattacaggtgtgagccactgtgtctgacaagaatttatacttaagcataggagatggttctggaaattctaagaaattctgctctcagtaagagtagaggtttggagctttacctcttggcagtatcccttggaagggagctctgagattaaatgtaatcaaacacttattgagagctttctatggaccaggcactacactagacgctgggaattacagaggcaattacctgtcctatactcaaggtgttaatgatctagtgtcatttttctttaaaaaagaaagcacctgcatttgtcatcttgagcaaatatagtaactctaacctcaaggttcaagtgatttactcaaggtttaaatcatagttgttttggagaaagtaagtgtcagatgcactgtggctgtcagggtcatagtaggcattaaatcaacatggttggtgttcattaaatgtggattgaagataaaatgactgatcttaagtttcatgaggaataggtttgcttcattgaaactggtttttatcttcccaaatagttttcaatcattcctttaaagtactaggttgattaatattgcaaagttgtaatgtaaaatgtgaccttacctctgtctaacctgtattgttcacatgaatgggagtttgactttgggaataaacattgaaaatttgcagggaggaccca

SEQ ID NO: 153393 - DNA, 1757 bp, Homo sapiens
  Payload ID: 10170
  Gene Symbol: MTHFD2
  Gene Name: methylenetetrahydrofolate dehydrogenase (NADP+ dependent) 2, methenyltetrahydrofolate cyclohydrolase
  ENST ID: ENST00000409804
  CDS Start-End: 33-701
cttccctcccggcgcagtcaccggcgcggtctatggctgcgacttctctaatgtctgctttggctgcccggctgctgcagcccgcgcacagctgctcccttcgccttcgccctttccacctcgcggcagttcgaaatgaagctgttgtcatttctggaaggaaactggcccagcagatcaagcaggaagtgcggcaggaggtagaagagtgggtggcctcaggcaacaaacggccacacctgagtgtgatcctggttggcgagaatcctgcaagtcactcctatgtcctcaacaaaaccagggcagctgcagttgtgggtgatgccactgttacaatatctcatcgatatactcccaaagagcagttgaagaaacatacaattcttgcagatattgtaatatctgctgcaggtattccaaatctgatcacagcagatatgatcaaggaaggagcagcagtcattgatgtgggaataaatagagttcacgatcctgtaactgccaaacccaagttggttggagatgtggattttgaaggagtcagacaaaaagctgggtatatcactccagttcctggaggtgttggccccatgacagtggcaatgctaatgaagaataccattattgctgcaaaaaaggtgctgaggcttgaagagcgagaagtgctgaagtctaaagagcttggggtagccactaattaactactgtgtcttctgtgtcacaaacagcactccaggccagctcaagaagcaaagcaggccaatagaaatgcaatatttttaatttattctactgaaatggtttaaaatgatgccttgtatttattgaaagcttaaatgggtgggtgtttctgcacatacctctgcagtacctcaccagggagcattccagtatcatgcagggtcctgtgatctagccaggagcagccattaacctagtgattaatatgggagacattaccatatggaggatggatgcttcactttgtcaagcacctcagttacacattcgccttttctaggattgcatttcccaagtgctattgcaataacagttgatactcattttaggtaccaaaccttttgagttcaactgatcaaaccaaaggaaaagtgttgctagagaaaattagggaaaaggtgaaaaagaaaaaatggtagtaattgagcagaaaaaaattaatttatatatgtattgattggcaaccagatttatctaagtagaactgaattggctaggaaaaaagaaaaactgcatgttaatcattttcctaagctgtccttttgaggcttagtcagtttattgggaaaatgtttaggattattccttgctattagtactcattttatgtatgttacccttcagtaagttctccccattttagttttctaggactgaaaggattcttttctacattatacatgtgtgttgtcatatttggcttttgctatatactttaacttcattgttaaatttttgtattgtatagtttctttggtgtatcttaaaacctatttttgaaaaacaaacttggcttgataatcatttgggcagcttgggtaagtacgcaacttacttttccaccaaagaactgtcagcagctgcctgcttttctgtgatgtatgtatcctgttgacttttccagaaattttttaagagtttgagttactattgaatttaatcagactttctgattaaagggttttctttcttttttaataaaacacatctgtctggtatggtatgaatttctgaaa

SEQ ID NO: 153394 - DNA, 1865 bp, Homo sapiens
  Payload ID: 10170
  Gene Symbol: MTHFD2
  Gene Name: methylenetetrahydrofolate dehydrogenase (NADP+ dependent) 2, methenyltetrahydrofolate cyclohydrolase
  ENST ID: ENST00000409601
  CDS Start-End: 27-830
tcccggcgcagtcaccggcgcggtctatggctgcgacttctctaatgtctgctttggctgcccggctgctgcagcccgcgcacagctgctcccttcgccttcgccctttccacctcgcggcagttcgaaatgaagctgttgtcatttctggaaggaaactggcccagcagatcaagcaggaagtgcggcaggaggtagaagagtgggtggcctcaggcaacaaacggccacacctgagtgtgatcctggttggcgagaatcctgcaagtcactcctatgtcctcaacaaaaccagggcagctgcagttgtggagcatattgatgagagaaggatctgcaatgctgtttctccagacaaggatgttgatggctttcatgtaattaatgtaggacgaatgtgtttggatcagtattccatgttaccggctactccatggggtgtgtgggaaataatcaagcgaactggcattccaaccctagggaagaatgtggttgtggctggaaggtcaaaaaacgttggaatgcccattgcaatgttactgcacacagatggggcgcatgaacgtcccggaggtgatgccactgttacaatatctcatcgatatactcccaaagagcagttgaagaaacatacaattcttgcagatattgtaatatctgctgcaggagtcagacaaaaagctgggtatatcactccagttcctggaggtgttggccccatgacagtggcaatgctaatgaagaataccattattgctgcaaaaaaggtgctgaggcttgaagagcgagaagtgctgaagtctaaagagcttggggtagccactaattaactactgtgtcttctgtgtcacaaacagcactccaggccagctcaagaagcaaagcaggccaatagaaatgcaatatttttaatttattctactgaaatggtttaaaatgatgccttgtatttattgaaagcttaaatgggtgggtgtttctgcacatacctctgcagtacctcaccagggagcattccagtatcatgcagggtcctgtgatctagccaggagcagccattaacctagtgattaatatgggagacattaccatatggaggatggatgcttcactttgtcaagcacctcagttacacattcgccttttctaggattgcatttcccaagtgctattgcaataacagttgatactcattttaggtaccaaaccttttgagttcaactgatcaaaccaaaggaaaagtgttgctagagaaaattagggaaaaggtgaaaaagaaaaaatggtagtaattgagcagaaaaaaattaatttatatatgtattgattggcaaccagatttatctaagtagaactgaattggctaggaaaaaagaaaaactgcatgttaatcattttcctaagctgtccttttgaggcttagtcagtttattgggaaaatgtttaggattattccttgctattagtactcattttatgtatgttacccttcagtaagttctccccattttagttttctaggactgaaaggattcttttctacattatacatgtgtgttgtcatatttggcttttgctatatactttaacttcattgttaaatttttgtattgtatagtttctttggtgtatcttaaaacctatttttgaaaaacaaacttggcttgataatcatttgggcagcttgggtaagtacgcaacttacttttccaccaaagaactgtcagcagctgcctgcttttctgtgatgtatgtatcctgttgacttttccagaaattttttaagagtttgagttactattgaatttaatcagactttctgattaaagggttttctttcttttttaataaaacacatctgtctg

SEQ ID NO: 153395 - DNA, 1396 bp, Homo sapiens
  Payload ID: 10170
  Gene Symbol: MTHFD2
  Gene Name: methylenetetrahydrofolate dehydrogenase (NADP+ dependent) 2, methenyltetrahydrofolate cyclohydrolase
  ENST ID: ENST00000470592
  CDS Start-End: 30-143
ccctcccggcgcagtcaccggcgcggtctatggctgcgacttctctaatgtctgctttggctgcccggctgctgcagcccgcgcacagctgctcccttcgccttcgccctttccacctcgcggcagttcggaatcaacagtgagacaattatgaaaccagcttcaatttcagaggaagaattgttgaatttaatcaataaactgaataatgatgataatgtagatggcctccttgttcagttgcctcttccagagcatattgatgagagaaggatctgcaatgctgtttctccagacaaggatgttgatggctttcatgtaattaatgtaggacgaatgtgtttggatcagtattccatgttaccggctactccatggggtgtgtgggaaataatcaagcgaactggcattccaaccctagggaagaatgtggttgtggctggaaggtcaaaaaacgttggaatgcccattgcaatgttactgcacacagatggggcgcatgaacgtcccggaggtgatgccactgttacaatatctcatcgatatactcccaaagagcagttgaagaaacatacaattcttgcagatattgtaatatctgctgcaggtattccaaatctgatcacagcagatatgatcaaggaaggagcagcagtcattgatgtgggaataaatagagttcacgatcctgtaactgccaaacccaagttggttggagatgtggattttgaaggagtcagacaaaaagctgggtatatcactccagttcctggaggtgttggccccatgacagtggcaatgctaatgaagaataccattattgctgcaaaaaaggtgctgaggcttgaagagcgagaagtgctgaagtctaaagagcttggggtagccactaattaactactgtgtcttctgtgtcacaaacagcactccaggccagctcaagaagcaaagcaggccaatagaaatgcaatatttttaatttattctactgaaatggtttaaaatgatgccttgtatttattgaaagcttaaatgggtgggtgtttctgcacatacctctgcagtacctcaccagggagcattccagtatcatgcagggtcctgtgatctagccaggagcagccattaacctagtgattaatatgggagacattaccatatggaggatggatgcttcactttgtcaagcacctcagttacacattcgccttttctaggattgcatttcccaagtgctattgcaataacagttgatactcattttaggtaccaaaccttttgagttcaactgatcaaaccaaaggaaaagtgttgctagagaaaattagggaaaaggtgaaaaagaaaaaatggtagtaattgagcagaaaaaaattaatttatatatgtattgatt

SEQ ID NO: 153396 - DNA, 1135 bp, Homo sapiens
  Payload ID: 10170
  Gene Symbol: MTHFD2
  Gene Name: methylenetetrahydrofolate dehydrogenase (NADP+ dependent) 2, methenyltetrahydrofolate cyclohydrolase
  ENST ID: ENST00000489041
  CDS Start-End: 28-138
ctcccggcgcagtcaccggcgcggtctatggctgcgacttctctaatgtctgctttggctgcccggctgctgcagcccgcgcacagctgctcccttcgccttcgccctttccacctcgcggcagttcgagcatattgatgagagaaggatctgcaatgctgtttctccagacaaggatgttgatggctttcatgtaattaatgtaggacgaatgtgtttggatcagtattccatgttaccggctactccatggggtgtgtgggaaataatcaagcgaactggcattccaaccctagggaagaatgtggttgtggctggaaggtcaaaaaacgttggaatgcccattgcaatgttactgcacacagatggggcgcatgaacgtcccggaggtgatgccactgttacaatatctcatcgatatactcccaaagagcagttgaagaaacatacaattcttgcagatattgtaatatctgctgcaggtattccaaatctgatcacagcagatatgatcaaggaaggagcagcagtcattgatgtgggaataaatagagttcacgatcctgtaactgccaaacccaagttggttggagatgtggattttgaaggagtcagacaaaaagctgggtatatcactccagttcctggaggtgttggccccatgacagtggcaatgctaatgaagaataccattattgctgcaaaaaaggtgctgaggcttgaagagcgagaagtgctgaagtctaaagagcttggggtagccactaattaactactgtgtcttctgtgtcacaaacagcactccaggccagctcaagaagcaaagcaggccaatagaaatgcaatatttttaatttattctactgaaatggtttaaaatgatgccttgtatttattgaaagcttaaatgggtgggtgtttctgcacatacctctgcagtacctcaccagggagcattccagtatcatgcagggtcctgtgatctagccaggagcagccattaacctagtgattaatatgggagacattaccatatggaggatggatgcttcactttgtcaagcacctcagttacacattcgccttttctaggattgcatttcccaagtgctattgcaataacagttgatactca

SEQ ID NO: 153397 - DNA, 2300 bp, Homo sapiens
  Payload ID: 10171
  Gene Symbol: MTHFD2L
  Gene Name: methylenetetrahydrofolate dehydrogenase (NADP+ dependent) 2-like
  Uniprot ID: Q9H903
  ENST ID: ENST00000325278
  CDS Start-End: 141-1010
gcggccgccttggccgagcgccggcgttgggcagaagcacagcaccctccgtaagggcaccgggagagcccgggagtgcgttccggggctttcggagcagcggtgtgagacatgaagccattattatatcaggaaccgaaatggccaagcatatccagaaagaaatacagcgaggtgtggaatcatgggtttcccttggaaacagaagacctcacctcagtataattttagtgggagataacccagcaagccatacatatgtcaggaataagataagagctgcctctgctgtaggtatttgtagtgagctcattctaaaacctaaggatgtttctcaggaagaacttttggacgtaactgatcaattgaatatggacccaagagtcagcggtatattagttcagttaccactaccagaccacgttgatgagcgaacaatatgcaatggaattgccccagaaaaagatgtagatggatttcatattatcaatattggaagattgtgccttgatcagcattctctcatacctgccactgccagtgctgtttgggaaataataaaaagaacaggaattcaaacatttggaaaaaatgtggttgtggctggaagatccaagaacgtagggatgcctattgccatgcttttacacactgatggagagcatgaacggccaggaggtgatgcaactgtgacaatagctcacagatacacccccaaagagcaactgaagattcatacgcagctggcagatattatcatagttgctgcaggtattccaaagttgattacgtctgatatggttaaagaaggtgctgctgtaattgatgtgggtatcaactatgtccacgatccagtgacaggaaagacaaaattagttggagatgtggacttcgaagctgttaaaaagaaagctggctttatcactccagttccaggaggtgtgggacccatgacagtggcaatgcttctgaagaacacccttctggcagctaaaaaaatcatttactagatcacatgaaaggataaagcaaactgaagtcatgctatttgtttatttgacaaagggtaaaacctttatattttactacaaagctatttatttctacatggtatttattttttcatgggtgaaatcattgtgaatcaattgattcacatagttttatgcatttcctgctaatttattttgagttttaagaaaacaaccaaaacaattccaatgaaaattttagtaacaattgtttattttgagggtatttgttcataacattaaaacaataaagggctcataataaataaatatatttttgacacaattaaatattacatagagtatgtttacaacaaatatcctgtcagccaaatggttacccatataaaatgtaatttaggttttgctacttgcatgctaacatttttaatgtattttatgatctatgtcatatattaaaaaagagcttgcttactacaagaaaaatattgaaatattgaaaatattgaaaatattattattgaaaataaaatcttgatctcaactatcccccaaatgcatcctataagtccatcctaatgagaaatgatgttctatttaaggaaaggaaaatattccgggaaggcaaaaaatgcagtgctgtttggaagtgtaatgattttatcacatggtgaatgactactaagagtaatgattatatcacattgtgaatgactacttgccacagtaaaaatacatgaagaatgtgttaggtttaaacgtcgtttctttcttctaaaaaatatttggttagtaccttcactgagcaatagtggaaaaataaaaaaataagtaaacagaaaaaactaaagttgtattttcccacaaatatagtatgaatgaggtcatattaaagaacagcaactgttaatgtttgttcacaaattcagaaatctaataggaaaacatgatactttcaatgtgccaaaactaaaccttagtatacaactaaaaatctcctgccttcttgcctacctgtcttccctcttctgttacagaatttgttcctcaaagtagatgcaatgtttctaacacaatttaaattaggaaatatatatgaatgtcgttgaagtctattttgagactgctaaagctattaattgatactgtgtttttatgcccaaatcccagtatgtttatgtaccaataatgactcttacccagcgcatgtctttatcagtgtgtactcgtgacgatttgtgtgaaaatagacttgatgtttataattaataccattacaactgtataataaaagcaatttgaagaaaa

SEQ ID NO: 153398 - DNA, 954 bp, Homo sapiens
  Payload ID: 10171
  Gene Symbol: MTHFD2L
  Gene Name: methylenetetrahydrofolate dehydrogenase (NADP+ dependent) 2-like
  ENST ID: ENST00000359107
  CDS Start-End: 198-954
ggtccgcggcttctcgctgctccgcggccgccttggccgagcgccggcgttgggcagaagcacagcaccctccgtaagggcaccgggagagcccgggagtgcgttccggggctttcggagcagcggtgtgaggaccagcagagagaagagattccatcttccagagacatgaagccattattatatcaggaaccgaaatggccaagcatatccagaaagaaatacagcgaggtgtggaatcatgggtttcccttggaaacagaagacctcacctcagtataattttagtgggagataacccagcaagccatacatatgtcaggaataagataagagctgcctctgctgtaggtatttgtagtgagctcattctaaaacctaaggatgtttctcaggaagaacttttggacgtaactgatcaattgaatatggacccaagagtcagcggtatattagttcagttaccactaccagaccacgttgatgagcgaacaatatgcaatggaattgccccagaaaaagatgtagatggatttcatattatcaatattggaagattgtgccttgatcagcattctctcatacctgccactgccagtgctgtttgggaaataataaaaagaacaggaattcaaacatttggaaaaaatgtggttgtggctggaagatccaagaacgtagggatgcctattgccatgcttttacacactgatggagagcatgaacggccaggaggtgatgcaactgtgacaatagctcacagatacacccccaaagagcaactgaagattcatacgcagctggcagatattatcatagttgctgcaggtattccaaagttgattacgtctgatatggttaaagaaggtgctgctgtaattgatgtgggtatcaactatgtccacgatccagtgacaggaaagacaaaattagttggagatgtggacttcgaag

SEQ ID NO: 153399 - DNA, 2354 bp, Homo sapiens
  Payload ID: 10171
  Gene Symbol: MTHFD2L
  Gene Name: methylenetetrahydrofolate dehydrogenase (NADP+ dependent) 2-like
  Uniprot ID: Q9H903
  ENST ID: ENST00000395759
  CDS Start-End: 28-1071
cagtccggaagccggggatccgcggccatgacggtgccggtccgcggcttctcgctgctccgcggccgccttggccgagcgccggcgttgggcagaagcacagcaccctccgtaagggcaccgggagagcccgggagtgcgttccggggctttcggagcagcggtgtgagacatgaagccattattatatcaggaaccgaaatggccaagcatatccagaaagaaatacagcgaggtgtggaatcatgggtttcccttggaaacagaagacctcacctcagtataattttagtgggagataacccagcaagccatacatatgtcaggaataagataagagctgcctctgctgtaggtatttgtagtgagctcattctaaaacctaaggatgtttctcaggaagaacttttggacgtaactgatcaattgaatatggacccaagagtcagcggtatattagttcagttaccactaccagaccacgttgatgagcgaacaatatgcaatggaattgccccagaaaaagatgtagatggatttcatattatcaatattggaagattgtgccttgatcagcattctctcatacctgccactgccagtgctgtttgggaaataataaaaagaacaggaattcaaacatttggaaaaaatgtggttgtggctggaagatccaagaacgtagggatgcctattgccatgcttttacacactgatggagagcatgaacggccaggaggtgatgcaactgtgacaatagctcacagatacacccccaaagagcaactgaagattcatacgcagctggcagatattatcatagttgctgcaggtattccaaagttgattacgtctgatatggttaaagaaggtgctgctgtaattgatgtgggtatcaactatgtccacgatccagtgacaggaaagacaaaattagttggagatgtggacttcgaagctgttaaaaagaaagctggctttatcactccagttccaggaggtgtgggacccatgacagtggcaatgcttctgaagaacacccttctggcagctaaaaaaatcatttactagatcacatgaaaggataaagcaaactgaagtcatgctatttgtttatttgacaaagggtaaaacctttatattttactacaaagctatttatttctacatggtatttattttttcatgggtgaaatcattgtgaatcaattgattcacatagttttatgcatttcctgctaatttattttgagttttaagaaaacaaccaaaacaattccaatgaaaattttagtaacaattgtttattttgagggtatttgttcataacattaaaacaataaagggctcataataaataaatatatttttgacacaattaaatattacatagagtatgtttacaacaaatatcctgtcagccaaatggttacccatataaaatgtaatttaggttttgctacttgcatgctaacatttttaatgtattttatgatctatgtcatatattaaaaaagagcttgcttactacaagaaaaatattgaaatattgaaaatattgaaaatattattattgaaaataaaatcttgatctcaactatcccccaaatgcatcctataagtccatcctaatgagaaatgatgttctatttaaggaaaggaaaatattccgggaaggcaaaaaatgcagtgctgtttggaagtgtaatgattttatcacatggtgaatgactactaagagtaatgattatatcacattgtgaatgactacttgccacagtaaaaatacatgaagaatgtgttaggtttaaacgtcgtttctttcttctaaaaaatatttggttagtaccttcactgagcaatagtggaaaaataaaaaaataagtaaacagaaaaaactaaagttgtattttcccacaaatatagtatgaatgaggtcatattaaagaacagcaactgttaatgtttgttcacaaattcagaaatctaataggaaaacatgatactttcaatgtgccaaaactaaaccttagtatacaactaaaaatctcctgccttcttgcctacctgtcttccctcttctgttacagaatttgttcctcaaagtagatgcaatgtttctaacacaatttaaattaggaaatatatatgaatgtcgttgaagtctattttgagactgctaaagctattaattgatactgtgtttttatgcccaaatcccagtatgtttatgtaccaataatgactcttacccagcgcatgtctttatcagtgtgtactcgtgacgatttgtgtgaaaatagacttgatgtttataattaataccattacaactgtataataaaagcaatttg

SEQ ID NO: 153400 - DNA, 2007 bp, Homo sapiens
  Payload ID: 10171
  Gene Symbol: MTHFD2L
  Gene Name: methylenetetrahydrofolate dehydrogenase (NADP+ dependent) 2-like
  ENST ID: ENST00000423607
  CDS Start-End: 240-560
gccccagtccggaagccggggatccgcggccatgacggtgccggtccgcggcttctcgctgctccgcggccgccttggccgagcgccggcgttgggcagaagcacagcaccctccgtaagggcaccgggagagcccgggagtgcgttccggggctttcggagcagcggtgtgaggaccagcagagagaagagattccatcttccagagacatgaagccattattatatcaggaaccgaaatggccaagcatatccagaaagaaatacagcgaggtgtggaatcatgggtttcccttggaaacagaagacctcacctcagtataattttagtgggagataacccagcaagccatacatatgtcaggaataagataagagctgcctctgctgtaggtatttgtagtgagctcattctaaaacctaaggatgtttctcaggaagaacttttggacgtaactgatcaattgaatatggacccaagagtcagcggtatattagttcagttaccactaccagaagctgtgcaactttgttcaggatttgaaatgctcgggatataagagtacacaggcttgctctttgtccagtagctgaccctaaagctaaggagaaataaaaatgaccgaatgcagatgctttcctactcctgtcctgaccgtgcagagattcttatcaataagtggtcactttgtcgagttgtctagtttgaagcctttgaggattagcaccttccagtttattcaagggaattggacaaagaaatgagaatgaactataggattaaaggataaaactaaagaagattgagcccatgtgactactggacaatagattgtaaaaggaagagacatttttggaaccacttccagactgagatggttaaaagctgttgtgccctcctccttcacttctgtttctgttgcattgttcttggaaactaggtattacagatggttgtaaattacaaaaagtagggcagtagaattcttattggacttgacatgaataagaaataaatacccttttataaatgactgggatttcagatttttttaaacctataaactcacagatcaaagaagctcaccaaactctcaagctcatgaaacatgaagaaaactatgccaaagaacaccataatcaaattattcaaaaccactgatagaaaaaaatcttaaaagcaataagggggttgggggagggcattacatacaaaggaacaaagaggacagtgacagaatatttattgatagaaacaatgcaagcaagaagacaatagaacaatatctttaagtattaagaggaaaaaaaacacctgtaaacccaaatttctatacctagtgaaaataccttcaaaaacaaaggcaaaaagtcttttatgagacatgtgaggaagagagctcaaaactaaaaacaattatttactagcagacctatgatctaagaaatactaaaaggcccgggtgtggtggctcatgcctgtaatccctgcccttgtgggtggatcacttgaggtcaggagttcaagaccagcctggccaacatcgggaaaccccatctctactgaaaatacaaaaatcagctgggcattgtggtgcacacctgtaatcacagctactcaggaggttgagacaggaggattgcttggacctgggaagtggaggttggagtgagccaagatcatgccactggactccagcctgggcaacagagcaagactccatctcaacaaccacaacaaaaaagagatattaaaggaagtccttcacctagatggaaatgatactagatggaaatatggatctgtccaaggaattaagagctctggaagtggtaactacctgaataaatatatattattcatgtatatatatgttataatatattgttcttattcttattattcagattattttagaagataattaatgtttaaccaaagccaaaaacaatgtagtttgtggtttgtaacatacaattaaaatgtatggcaacaatagcacaaaa

SEQ ID NO: 153401 - DNA, 1798 bp, Homo sapiens
  Payload ID: 10171
  Gene Symbol: MTHFD2L
  Gene Name: methylenetetrahydrofolate dehydrogenase (NADP+ dependent) 2-like
  Uniprot ID: Q9H903
  ENST ID: ENST00000429519
  CDS Start-End: 524-1195
ctcgttcaccagagcacctactatgttccaggtggtatcataagaacttgggagacatcactaaacaaaatagaaaaatccctgcccttatggagctgacattctagtgggggcttggtttttttccttgggtactgggtttgtttttccatgatgagcatatcctatgatgcactatagcactcaagcaagatgcctgaagcaaaggaggccaaagtaatgattcatggattcagcacactttcctttgttgaaaagcactgcttgttccccctcaaagctatgtgagaggctgtgtaggagagagtggagagcaggtagcctaccggacctacagttcaccatttcagccctgtaattgaccagctgtgggacctcagtgtgaagcttattcatgaagagacctctgcctgaacatacagcaaatttaagaaggttgtgcagatagtctgaaggaggaccagcagagagaagagattccatcttccagagacatgaagccattattatatcaggaaccgaaatggccaagcatatccagaaagaaatacagcgaggtgtggaatcatgggtttcccttggaaacagaagacctcacctcagtataattttagtgggagataacccagcaagccatacatatgtcaggaataagataagagctgcctctgctgtaggtatttgtagtgagctcattctaaaacctaaggatgtttctcaggaagaacttttggacgtaactgatcaattgaatatggacccaagagtcagcggtatattagttcagttaccactaccagaccacgttgatgagcgaacaatatgcaatggaattgccccagaaaaagatgtagatggatttcatattatcaatattggaagattgtgccttgatcagcattctctcatacctgccactgccagtgctgtttgggaaataataaaaagaacaggaattcaaacatttggaaaaaatgtggttgtggctggaagatccaagaacgtagggatgcctattgccatgcttttacacactgatggagagcatgaacggccaggaggtgatgcaactgtgacaatagctcacagatacacccccaaagagcaactgaagattcatacgcagctggcagatattatcatagttgctgcagagagatttcaccattttgcccaggacctctccaactcctgaactcaagcgatccacctgcctcagcttcccaaagtgctgagattacaggcatgagccaccacacccggcactatataagtattttagaccttagaaaaacctatctagttttaaatttgtcttattaattttcttgacattgctaaaaaaagaagcatgtatatccattcatgcaatattcctcagcagtgaaaaggaatgaactattgatacagcaacctgaatgaatttccagcaaattatgaagtaaaaaaggcaatctcacatgttctttgttcaatcatagaatatatgattccatttatatagcattcttgaaagtgacaaaattagcggtttccgggagtcaaggacaggttgatgtgggagggaactgggtgtggctgtaataaggcaacatgagggacccttttgatgatggaaatgttctatatcttaactgtatcaatgtcaatatcctgggtataatattgtcctgtagtttggcaagatattatcattgtatagtatcttgtattatttcttacaatggatgtgaatctataattatcaaaaaatgacaatttaattaaagcatatagtaaataagtaaaaaaataaaaa

SEQ ID NO: 153402 - DNA, 1407 bp, Homo sapiens
  Payload ID: 10171
  Gene Symbol: MTHFD2L
  Gene Name: methylenetetrahydrofolate dehydrogenase (NADP+ dependent) 2-like
  ENST ID: ENST00000433372
  CDS Start-End: 377-817
agtgtgaagcttattcatgaagagacctctgcctgaacatacagcaaatttaagaaggttgtgcagatagtctgaaggaggaccagcagagagaagagattccatcttccagagacatgaagccattattatatcaggaaccgaaatggccaagcatatccagaaagaaatacagcgaggtgtggaatcatgggtttcccttggaaacagaagacctcacctcagtataattttagtgggagataacccagcaagccatacatatgtcaggaataagataagagctgcctctgctgtaggtatttgtagtgagctcattctaaaacctaaggatgtttctcaggaagaacttttggacgtaactgatcaattgaatatggacccaagagtcagcggtatattagttcagttaccactaccagaccacgttgatgagcgaacaatatgcaatggaattgccccagaaaaagatgtagatggatttcatattatcaatattggaagattgtgccttgatcagcattctctcatacctgccactgccagtgctgtttgggaaataataaaaagaacaggaattcaaacatttggaaaaaatgtggttgtggctggaagatccaagaacgtagggatgcctattgccatgcttttacacactgatggagagcatgaacggccaggaggtgatgcaactgtgacaatagctcacagatacacccccaaagagcaactgaagattcatacgcagctggcagatattatcatagttgctgcagagagatttcaccattttgcccaggacctctccaactcctgaactcaagcgatccacctgcctcagcttcccaaagtgctgagattacaggcatgagccaccacacccggcactatataagtattttagaccttagaaaaacctatctagttttaaatttgtcttattaattttcttgacattgctaaaaaaagaagcatgtatatccattcatgcaatattcctcagcagtgaaaaggaatgaactattgatacagcaacctgaatgaatttccagcaaattatgaagtaaaaaaggcaatctcacatgttctttgttcaatcatagaatatatgattccatttatatagcattcttgaaagtgacaaaattagcggtttccgggagtcaaggacaggttgatgtgggagggaactgggtgtggctgtaataaggcaacatgagggacccttttgatgatggaaatgttctatatcttaactgtatcaatgtcaatatcctgggtataatattgtcctgtagtttggcaagatattatcattgtatagtatcttgtattatttcttacaatggatgtgaatctataattatcaaaaaatgacaatttaattaaagcatatagtaaataagt

SEQ ID NO: 153403 - DNA, 786 bp, Homo sapiens
  Payload ID: 10171
  Gene Symbol: MTHFD2L
  Gene Name: methylenetetrahydrofolate dehydrogenase (NADP+ dependent) 2-like
  ENST ID: ENST00000429335
  CDS Start-End: 265-585
agtgtaaatatgacttctaagctggctgttgctctactgctttcttggcagttgcatgctttctgtagcactgtgtgaagtgtgaagcttattcatgaagagacctctgcctgaacatacagcaaatttaagaaggttgtgcagatagtctgaaggaggctggtgcagcatggaaacacggatttgagctcattactccaattttcacgctgagtttggaagggtcctagaggacatgaagccattattatatcaggaaccgaaatggccaagcatatccagaaagaaatacagcgaggtgtggaatcatgggtttcccttggaaacagaagacctcacctcagtataattttagtgggagataacccagcaagccatacatatgtcaggaataagataagagctgcctctgctgtaggtatttgtagtgagctcattctaaaacctaaggatgtttctcaggaagaacttttggacgtaactgatcaattgaatatggacccaagagtcagcggtatattagttcagttaccactaccagaagctgtgcaactttgttcaggatttgaaatgctcgggatataagagtacacaggcttgctctttgtccagtagctgaccctaaagctaaggagaaataaaaatgaccgaatgcagatgctttcctactcctgtcctgaccgtgcagagattcttatcaataagtggtcactttgtcgagttgtctagtttgaagcctttgaggattagcaccttccagtttattcaagggaattggacaaagaa

SEQ ID NO: 153404 - DNA, 1135 bp, Homo sapiens
  Payload ID: 10172
  Gene Symbol: MTHFR
  Gene Name: methylenetetrahydrofolate reductase (NAD(P)H)
  ENST ID: ENST00000376486
  CDS Start-End: 1047-1135
ctccaaataaccaccctcctcttcaggacacctcaaagatgtccaacgccagctgaaaaggggggtaaaaatgcaggttccatttgacagtgtgacgtatctgaaatcagaaaggacttgtcaactctgggaacacaactcaagttttcccaggatgctttgcagggggaagctggactgtcagtgacccagaaagggtgagggatagagtgagaaaggactggagaagctaaaacagcagcatgataagcacaaagtcctgtgaggaagctcattctgaaaacgcttgtttcattccaaactcttttcagatggaaataaaaggaaacatgggtgggatttactggagctggcctggattctccctcagattccaggaggggttatgagaaaagaccccagacttaggcacgtgaagcagggtagacgcttcgagagccctggctgcggtccccaggccccacccgctgccacctgcgggcccagattggcccggccccacccccggcaacgcctctctcagtcccttagcaaccgccccctccccaggccgactccgccggcttcttaccagctcctcgggggtgcgggtctcacgctcaccgcagcagcagcaccacctgcagcagcagcacagagaccccctgcaccccgccatcttcctcctttactgccactctggacccctctaccaaccccctcccagccaggatctgcgcctcacgtgactggccccgggacggtcacgtggccctctcgagctctgggactgagaccaggagtggctgcagacgggtggggcgaggactcgcgtcacatgacgataaaggcacggcctccaacgagacctgtgggcacggccatgttgggggcggggcttccggtcacccgcgccggtggtttccgccctgtaggcccgcctctccagcaacctgacacctgcgccgcgccccttcactgcgttccccgcccctgcagcggccacagtggtgcggccggcggccgagcgttctgagtcacccgggactggaggtaggaacccagccatggtgaacgaagccagaggaaacagcagcctcaacccctgcttggagggcagtgccagcagtggcagtgagagctccaaagatagttc

SEQ ID NO: 153405 - DNA, 7044 bp, Homo sapiens
  Payload ID: 10172
  Gene Symbol: MTHFR
  Gene Name: methylenetetrahydrofolate reductase (NAD(P)H)
  Uniprot ID: P42898
  ENST ID: ENST00000376583
  CDS Start-End: 1-2094
atggaccatcgaaaagccagggtcctcccagctgggcactactgcccctcgctaggaatatgggcctcgcaggtcggcagcgtgaggtcctctgtgccaccttccatcagtaggaacccagccatggtgaacgaagccagaggaaacagcagcctcaacccctgcttggagggcagtgccagcagtggcagtgagagctccaaagatagttcgagatgttccaccccgggcctggaccccgagcggcatgagagactccgggagaagatgaggcggcgattggaatctggtgacaagtggttctccctggaattcttccctcctcgaactgctgagggagctgtcaatctcatctcaaggtttgaccggatggcagcaggtggccccctctacatagacgtgacctggcacccagcaggtgaccctggctcagacaaggagacctcctccatgatgatcgccagcaccgccgtgaactactgtggcctggagaccatcctgcacatgacctgctgccgtcagcgcctggaggagatcacgggccatctgcacaaagctaagcagctgggcctgaagaacatcatggcgctgcggggagacccaataggtgaccagtgggaagaggaggagggaggcttcaactacgcagtggacctggtgaagcacatccgaagtgagtttggtgactactttgacatctgtgtggcaggttaccccaaaggccaccccgaagcagggagctttgaggctgacctgaagcacttgaaggagaaggtgtctgcgggagccgatttcatcatcacgcagcttttctttgaggctgacacattcttccgctttgtgaaggcatgcaccgacatgggcatcacttgccccatcgtccccgggatctttcccatccagggctaccactcccttcggcagcttgtgaagctgtccaagctggaggtgccacaggagatcaaggacgtgattgagccaatcaaagacaacgatgctgccatccgcaactatggcatcgagctggccgtgagcctgtgccaggagcttctggccagtggcttggtgccaggcctccacttctacaccctcaaccgcgagatggctaccacagaggtgctgaagcgcctggggatgtggactgaggaccccaggcgtcccctaccctgggctctcagcgcccaccccaagcgccgagaggaagatgtacgtcccatcttctgggcctccagaccaaagagttacatctaccgtacccaggagtgggacgagttccctaacggccgctggggcaattcctcttcccctgcctttggggagctgaaggactactacctcttctacctgaagagcaagtcccccaaggaggagctgctgaagatgtggggggaggagctgaccagtgaagaaagtgtctttgaagtcttcgttctttacctctcgggagaaccaaaccggaatggtcacaaagtgacttgcctgccctggaacgatgagcccctggcggctgagaccagcctgctgaaggaggagctgctgcgggtgaaccgccagggcatcctcaccatcaactcacagcccaacatcaacgggaagccgtcctccgaccccatcgtgggctggggccccagcgggggctatgtcttccagaaggcctacttagagtttttcacttcccgcgagacagcggaagcacttctgcaagtgctgaagaagtacgagctccgggttaattaccaccttgtcaatgtgaagggtgaaaacatcaccaatgcccctgaactgcagccgaatgctgtcacttggggcatcttccctgggcgagagatcatccagcccaccgtagtggatcccgtcagcttcatgttctggaaggacgaggcctttgccctgtggattgagcggtggggaaagctgtatgaggaggagtccccgtcccgcaccatcatccagtacatccacgacaactacttcctggtcaacctggtggacaatgacttcccactggacaactgcctctggcaggtggtggaagacacattggagcttctcaacaggcccacccagaatgcgagagaaacggaggctccatgaccctgcgtcctgacgccctgcgttggagccactcctgtcccgccttcctcctccacagtgctgcttctcttgggaactccactctccttcgtgtctctcccaccccggcctccactcccccacctgacaatggcagctagactggagtgaggcttccaggctcttcctggacctgagtcggccccacatgggaacctagtactctctgctctagccaggagtctgtgctcttttggtggggagcacttgcgtcctgcagaggaccacagtgggtggcacctcctgagaaggcgaggagagtggttgttgccaactaagccctcgaaccaaggcagcctccagagccagcctgggactcccagtgaacttacacttggagcccgtgcagtacaggcaaaacacgcaagggcatcaggcactggtggcatcgtagaagagatgtggcaaagtgctgtacccttccacctcctagaggtgggcagctgggccccacctacttgtgactgaaggggcacaccactgccctgcctgcccacttagccgtccatggcaccagccccctggatgggcattgggctgacacctaccatgctgctttttggcacagttgtctattctgagccttgagagaaaaagtgccccttaagggttgaaggcagtctgaacccttgtgcttggtggggctcgtggccttccccttttgcctggctgtggaggcctgatgctgccccgttccctgtcagaggctaagatgagatttgccagcacaggggccccagatctgcctgggcctgtgcagcagcccagcttcctggtgtatttttcaggtaggcccttgtcctgccagctgccttcctcatcccctcgtcctgtcccagaggttatctgcctggcctggctccccacgagtcacctgcaagccccagggcctgggggcagtgactggcaggtgcagatgggctgtttcgtgtagtggaagagcagcctgatggccaagggggtggacgcaattgtgggatgtcctctttactcccttcctggcctcactggctggggcagaggggcagccgctaggagagactgaaagcagcagctaggactgaggagtgggttttattgtccttcagagctcttcaagctgtcccctctgtcatcactccctggatgtgtggggcatggttccttccctgggaaggctaagttcagttctgttttttattctatgagaacaagtcacagctgcagctgggccccatgctctgccccaagcccccaaccccgcggtgctctggcggcttcctgtccactctcggggcccttggggcctggcttgctccagggtcttgggctactggcagctcctctccttgggctcctggctgccaggcgttggtgccacttcttaaaggcctggaaccagggaggagaggaaatgctattgttgtgggctttctccggggtctgtgctgtgcctgctagagcaacccctgtacccagctccttttgtccccagggcccctccctctgccccaagcagccagccagtcttgcctaggccaaatgcacaagctcagaatagatctgatggtgagctgggaagctgtactcagagcagagcaaatgagggagggggcgctcaggacccaggccctccatgggctagtgtgagtggcagccatgcctcatgccacaccttcttcgcaaactgatggaccgggtgggcctggcctgagctggggccacaaatcaaagcaagggctccagcatccagcctgtgtgttctgtaatggaactgaccccctcccctgaaaacgaaggggccccggggctggcaagcagggaaagctccacggtgcgtggctgtggcacagacttctggaaggctggctgagtggaatgcagggaagagggcagtacctgggaaaggacccacccatcttcctgctgctgtaactgctgagccactcgcagtcgcaggatccgctgccaccacgtctgccaggcccatctcaggtgccactccctgagctttggggacagttggcagagaaggcctcttgtgctcacgctcccccgcagtccccagcccttctgcctttctcccccgacactgctgcaccagagtgaaagggctatggcaagggggtgtcatctgaggagtattaagaatgcagattcctgggcctgtcccccaaggttttggagtcagtaggtccaagggccatacttttgagaggggtttgggttaagtatgaggtgaaatgggagatggtcagtgtggagaggggtgcacccactcaccagggtccgcaccagctgctctgccccttgggcatccacccagtgctgccatgccactgccaggcacctggcctgctgggaaccccgcagcccgtgaagcagtgcctcgaggcaccggcgctgcaggtacttcctcctgatggccaagagcatcgtgacccttcagggccagaaggagggcagagccatgggcctgggcctgcttttccaggatcctgcaggaacgagcactggccagagagggcccagctgtagccatggctcaggcaagcccctcagcccttgcccccatccctcggacccaccaaactgcacacacagctcctcttaccgtagcctccgtttatgggccttgctttgggctttgcaggctctgggctcagggctggagtgcgctcttggtccctggtccctcgtccacaggggcaggcctgggacccagctactctgtccaggccactgtggccagagctggaaggcagggcagagggaatgttccctgcaccctggaaaggggagttgagtcacaagaggttaaggtgggtccaggaaggcagctgctcttagtgcccgcctaggagttgagtacagtgaggagggtggaggaaggtgctgagcttagccttgtgccctgcccccatctccccaggcctccagcctctcccggctgcctgccgcccaaagagaaatcacaggggcggggcaggaatgcaaagtgttttctcagaacagctgaaacattccgaagagggaatggatggggagaatggtcaatacacataagaccgtgtcccaaggagctgatttccaggcccctgaggactggagaccgcttcacccctgcacttcagacaccgtttgtcccccggggcaaggtctccttactctgagcccaggccgttccccttggcttcctccgtccacccaggctgcactgcagtgatggcgcgggaggcaccagctctgtggcctgtgtccagcagctgcgggtctgaaggaatagccagagaggagcacctgaaccccatgggcttggacttcctggggccccgctgggatttcttcgctgctctagctggcaggacacatcccggcctcttccacccattcccccatgtggctgaagacattccaacaatggggtgggcccataatagttagccctcagtcagttcccggagcacagccctgggagggggctatttctctccccactgaaaacatttcaaagctgagttacttgtctgaggcctcatccctcggaagccgtctgactccagagtctgagcccccggctagtaccctatagagagggggctctccaaaggggctgctggggcatgtgtgcctgtggcagaaaagaggagaccctggaattcagcaccctgggtgccattcccagcgtttagtttctagaggcctcagtttctccatcagcttatgggatccttgtctttactgacaagaatggaatagaaatgtaaaagtactctgaaaagcaattgccctgtaacttatctagaaagaaaagaccctgagactccagaatctgctgttgccatagccccatatgtgtgaattctgcaactagccaaggctagttcctttcaattccatttaaaaaacaaaaaccagcaggtgtggtggctcatggcgtaatgggcctgcccaatgctttgggaggccaaggcaggtagatcgcttgagcccaggagtttgagacaagccctggcaacatagtgagatcccatttctacaaaaaaaaaaaaaaaaaaattagccgggtgtggtggcacacgcctgtagtctcagctactcaggtggctgaggtgggaggatcgtttgagccctggaggttgaggctgcagtgagctgtgatcgcaccactgcactctggcctgggcgacagagtgagacactgtctgagaacaaaaaacgactgaaaaaaaaaatcaccttagctttttctcttagaatcttctctaaaacgtattctttgtggcattctgaaataggattcatgatgatgcctgttgatcttagggacactacctcacctgccagtatctttggggctgtgtccttcaaggacatgtccccagactgctgtgcagtgtcattttttgtgtttggtttggtggtggcttcttcccccttgctaggctatcaacctcttatcaccacttgttggtgtcagaactaactgcttctggtctggagagggactgaccgatgcctttgggtagagagaattatgaaagaaattttggtatttttctactttatattttctgaggtttctgtaataagcatatttcacttttccaataagaaaaaaaaaaacttggcctggcgcggtggctcacacctgtaatcccagcactttgggaagtcgaggtgggaggatcacttgagttcaggagttcgagaccagcttgggcaatatggtgaaaccccgtctctactaaaaatacaaaaattagccaggcgtggtggcgtgcacttgtagtcccagctactcaggaagctgaggcgggagaatcacttgaacccgggaggcagaggttgcagtgagctgagatcactcctctgcttcagcctgggcaattgagccagactctgtctcaaaaataaacaaaaaaacttgac

SEQ ID NO: 153406 - DNA, 5532 bp, Homo sapiens
  Payload ID: 10172
  Gene Symbol: MTHFR
  Gene Name: methylenetetrahydrofolate reductase (NAD(P)H)
  Uniprot ID: P42898
  ENST ID: ENST00000376585
  CDS Start-End: 1053-3146
gtccgccgggacctttctgggagtcgtaggcttaatgaccctatgccctctgttggcctgtctgtgccctggtggctctgattacttgtttctgttttttgtttttgtttttttttttgagatggagttttgcttttgtcgcccaggctggagtgctatggcacaatcttggttcactgcaacctctgccttccgggttcaagcgattctcctgcctcagcctccagagtagctgggattacaggcgcccgccaccaaacctggctaatttttatatttttagtagagtcgggatttcaccatgttggccaggctggtctcaaactcctggcctcaggtgatccacccacctcggcctcccaaagtgctgggattacaggtgtgttttttgtttttttaagagatggagtctcgctatgttgcccaggctggccttgaactcctgggctcaggcaatccttctgcctcagccttcccagtagctgggtcactgtgatgatttgaattgaattctgtgatgtgtaagaagagcagcctgcaaggcaagcacagatggggcagcttttgttctgagaaattcgtgcccttactgaacttgggtctggctatttttggaacatggccagcatcaagttctaacccacaacacggtctttttggagtagcatgaattcaggagaaatctggctgcatagtcaagccctcaccccttccatcctgtgcacgaactgtttcaagtaacagatgttccaggcagagccagccagagtgagctgttccttctctggagggtgatctggtatccctgaacgcctgttggcctcatctccaccaacccctgcagtctctgcccctgagtccccctccttccatccgcctccccttactagagcctcagccctccctcctcgcctggaagccttgcccccgcccccttgtgctggctggagctcaagcctcttcctttgtcgcagctccgcccagttgaacacacccgctggggaaggtgcctctgttccctccccacgcactctgggcctgagctgacagagatggaccatcgaaaagccagggtcctcccagctgggcactactgcccctcgctaggaatatgggcctcgcaggtcggcagcgtgaggtcctctgtgccaccttccatcagtaggaacccagccatggtgaacgaagccagaggaaacagcagcctcaacccctgcttggagggcagtgccagcagtggcagtgagagctccaaagatagttcgagatgttccaccccgggcctggaccccgagcggcatgagagactccgggagaagatgaggcggcgattggaatctggtgacaagtggttctccctggaattcttccctcctcgaactgctgagggagctgtcaatctcatctcaaggtttgaccggatggcagcaggtggccccctctacatagacgtgacctggcacccagcaggtgaccctggctcagacaaggagacctcctccatgatgatcgccagcaccgccgtgaactactgtggcctggagaccatcctgcacatgacctgctgccgtcagcgcctggaggagatcacgggccatctgcacaaagctaagcagctgggcctgaagaacatcatggcgctgcggggagacccaataggtgaccagtgggaagaggaggagggaggcttcaactacgcagtggacctggtgaagcacatccgaagtgagtttggtgactactttgacatctgtgtggcaggttaccccaaaggccaccccgaagcagggagctttgaggctgacctgaagcacttgaaggagaaggtgtctgcgggagccgatttcatcatcacgcagcttttctttgaggctgacacattcttccgctttgtgaaggcatgcaccgacatgggcatcacttgccccatcgtccccgggatctttcccatccagggctaccactcccttcggcagcttgtgaagctgtccaagctggaggtgccacaggagatcaaggacgtgattgagccaatcaaagacaacgatgctgccatccgcaactatggcatcgagctggccgtgagcctgtgccaggagcttctggccagtggcttggtgccaggcctccacttctacaccctcaaccgcgagatggctaccacagaggtgctgaagcgcctggggatgtggactgaggaccccaggcgtcccctaccctgggctctcagcgcccaccccaagcgccgagaggaagatgtacgtcccatcttctgggcctccagaccaaagagttacatctaccgtacccaggagtgggacgagttccctaacggccgctggggcaattcctcttcccctgcctttggggagctgaaggactactacctcttctacctgaagagcaagtcccccaaggaggagctgctgaagatgtggggggaggagctgaccagtgaagaaagtgtctttgaagtcttcgttctttacctctcgggagaaccaaaccggaatggtcacaaagtgacttgcctgccctggaacgatgagcccctggcggctgagaccagcctgctgaaggaggagctgctgcgggtgaaccgccagggcatcctcaccatcaactcacagcccaacatcaacgggaagccgtcctccgaccccatcgtgggctggggccccagcgggggctatgtcttccagaaggcctacttagagtttttcacttcccgcgagacagcggaagcacttctgcaagtgctgaagaagtacgagctccgggttaattaccaccttgtcaatgtgaagggtgaaaacatcaccaatgcccctgaactgcagccgaatgctgtcacttggggcatcttccctgggcgagagatcatccagcccaccgtagtggatcccgtcagcttcatgttctggaaggacgaggcctttgccctgtggattgagcggtggggaaagctgtatgaggaggagtccccgtcccgcaccatcatccagtacatccacgacaactacttcctggtcaacctggtggacaatgacttcccactggacaactgcctctggcaggtggtggaagacacattggagcttctcaacaggcccacccagaatgcgagagaaacggaggctccatgaccctgcgtcctgacgccctgcgttggagccactcctgtcccgccttcctcctccacagtgctgcttctcttgggaactccactctccttcgtgtctctcccaccccggcctccactcccccacctgacaatggcagctagactggagtgaggcttccaggctcttcctggacctgagtcggccccacatgggaacctagtactctctgctctagccaggagtctgtgctcttttggtggggagcacttgcgtcctgcagaggaccacagtgggtggcacctcctgagaaggcgaggagagtggttgttgccaactaagccctcgaaccaaggcagcctccagagccagcctgggactcccagtgaacttacacttggagcccgtgcagtacaggcaaaacacgcaagggcatcaggcactggtggcatcgtagaagagatgtggcaaagtgctgtacccttccacctcctagaggtgggcagctgggccccacctacttgtgactgaaggggcacaccactgccctgcctgcccacttagccgtccatggcaccagccccctggatgggcattgggctgacacctaccatgctgctttttggcacagttgtctattctgagccttgagagaaaaagtgccccttaagggttgaaggcagtctgaacccttgtgcttggtggggctcgtggccttccccttttgcctggctgtggaggcctgatgctgccccgttccctgtcagaggctaagatgagatttgccagcacaggggccccagatctgcctgggcctgtgcagcagcccagcttcctggtgtatttttcaggtaggcccttgtcctgccagctgccttcctcatcccctcgtcctgtcccagaggttatctgcctggcctggctccccacgagtcacctgcaagccccagggcctgggggcagtgactggcaggtgcagatgggctgtttcgtgtagtggaagagcagcctgatggccaagggggtggacgcaattgtgggatgtcctctttactcccttcctggcctcactggctggggcagaggggcagccgctaggagagactgaaagcagcagctaggactgaggagtgggttttattgtccttcagagctcttcaagctgtcccctctgtcatcactccctggatgtgtggggcatggttccttccctgggaaggctaagttcagttctgttttttattctatgagaacaagtcacagctgcagctgggccccatgctctgccccaagcccccaaccccgcggtgctctggcggcttcctgtccactctcggggcccttggggcctggcttgctccagggtcttgggctactggcagctcctctccttgggctcctggctgccaggcgttggtgccacttcttaaaggcctggaaccagggaggagaggaaatgctattgttgtgggctttctccggggtctgtgctgtgcctgctagagcaacccctgtacccagctccttttgtccccagggcccctccctctgccccaagcagccagccagtcttgcctaggccaaatgcacaagctcagaatagatctgatggtgagctgggaagctgtactcagagcagagcaaatgagggagggggcgctcaggacccaggccctccatgggctagtgtgagtggcagccatgcctcatgccacaccttcttcgcaaactgatggaccgggtgggcctggcctgagctggggccacaaatcaaagcaagggctccagcatccagcctgtgtgttctgtaatggaactgaccccctcccctgaaaacgaaggggccccggggctggcaagcagggaaagctccacggtgcgtggctgtggcacagacttctggaaggctggctgagtggaatgcagggaagagggcagtacctgggaaaggacccacccatcttcctgctgctgtaactgctgagccactcgcagtcgcaggatccgctgccaccacgtctgccaggcccatctcaggtgccactccctgagctttggggacagttggcagagaaggcctcttgtgctcacgctcccccgcagtccccagcccttctgcctttctcccccgacactgctgcaccagagtgaaagggctatggcaagggggtgtcatctgaggagtattaagaatgcagattcctgggcctgtcccccaaggttttggagtcagtaggtccaagggccatacttttgagaggggtttgggttaagtatgaggtgaaatgggagatggtcagtgtggagaggggtgcacccactcaccagggtccgcaccagctgctctgccccttgggcatccacccagtgctgccatgccactgccaggcacctggcctgctgggaaccc

SEQ ID NO: 153407 - DNA, 6232 bp, Homo sapiens
  Payload ID: 10172
  Gene Symbol: MTHFR
  Gene Name: methylenetetrahydrofolate reductase (NAD(P)H)
  Uniprot ID: P42898
  ENST ID: ENST00000376590
  CDS Start-End: 185-2155
atgttgggggcggggcttccggtcacccgcgccggtggtttccgccctgtaggcccgcctctccagcaacctgacacctgcgccgcgccccttcactgcgttccccgcccctgcagcggccacagtggtgcggccggcggccgagcgttctgagtcacccgggactggaggtaggaacccagccatggtgaacgaagccagaggaaacagcagcctcaacccctgcttggagggcagtgccagcagtggcagtgagagctccaaagatagttcgagatgttccaccccgggcctggaccccgagcggcatgagagactccgggagaagatgaggcggcgattggaatctggtgacaagtggttctccctggaattcttccctcctcgaactgctgagggagctgtcaatctcatctcaaggtttgaccggatggcagcaggtggccccctctacatagacgtgacctggcacccagcaggtgaccctggctcagacaaggagacctcctccatgatgatcgccagcaccgccgtgaactactgtggcctggagaccatcctgcacatgacctgctgccgtcagcgcctggaggagatcacgggccatctgcacaaagctaagcagctgggcctgaagaacatcatggcgctgcggggagacccaataggtgaccagtgggaagaggaggagggaggcttcaactacgcagtggacctggtgaagcacatccgaagtgagtttggtgactactttgacatctgtgtggcaggttaccccaaaggccaccccgaagcagggagctttgaggctgacctgaagcacttgaaggagaaggtgtctgcgggagccgatttcatcatcacgcagcttttctttgaggctgacacattcttccgctttgtgaaggcatgcaccgacatgggcatcacttgccccatcgtccccgggatctttcccatccagggctaccactcccttcggcagcttgtgaagctgtccaagctggaggtgccacaggagatcaaggacgtgattgagccaatcaaagacaacgatgctgccatccgcaactatggcatcgagctggccgtgagcctgtgccaggagcttctggccagtggcttggtgccaggcctccacttctacaccctcaaccgcgagatggctaccacagaggtgctgaagcgcctggggatgtggactgaggaccccaggcgtcccctaccctgggctctcagcgcccaccccaagcgccgagaggaagatgtacgtcccatcttctgggcctccagaccaaagagttacatctaccgtacccaggagtgggacgagttccctaacggccgctggggcaattcctcttcccctgcctttggggagctgaaggactactacctcttctacctgaagagcaagtcccccaaggaggagctgctgaagatgtggggggaggagctgaccagtgaagaaagtgtctttgaagtcttcgttctttacctctcgggagaaccaaaccggaatggtcacaaagtgacttgcctgccctggaacgatgagcccctggcggctgagaccagcctgctgaaggaggagctgctgcgggtgaaccgccagggcatcctcaccatcaactcacagcccaacatcaacgggaagccgtcctccgaccccatcgtgggctggggccccagcgggggctatgtcttccagaaggcctacttagagtttttcacttcccgcgagacagcggaagcacttctgcaagtgctgaagaagtacgagctccgggttaattaccaccttgtcaatgtgaagggtgaaaacatcaccaatgcccctgaactgcagccgaatgctgtcacttggggcatcttccctgggcgagagatcatccagcccaccgtagtggatcccgtcagcttcatgttctggaaggacgaggcctttgccctgtggattgagcggtggggaaagctgtatgaggaggagtccccgtcccgcaccatcatccagtacatccacgacaactacttcctggtcaacctggtggacaatgacttcccactggacaactgcctctggcaggtggtggaagacacattggagcttctcaacaggcccacccagaatgcgagagaaacggaggctccatgaccctgcgtcctgacgccctgcgttggagccactcctgtcccgccttcctcctccacagtgctgcttctcttgggaactccactctccttcgtgtctctcccaccccggcctccactcccccacctgacaatggcagctagactggagtgaggcttccaggctcttcctggacctgagtcggccccacatgggaacctagtactctctgctctagccaggagtctgtgctcttttggtggggagcacttgcgtcctgcagaggaccacagtgggtggcacctcctgagaaggcgaggagagtggttgttgccaactaagccctcgaaccaaggcagcctccagagccagcctgggactcccagtgaacttacacttggagcccgtgcagtacaggcaaaacacgcaagggcatcaggcactggtggcatcgtagaagagatgtggcaaagtgctgtacccttccacctcctagaggtgggcagctgggccccacctacttgtgactgaaggggcacaccactgccctgcctgcccacttagccgtccatggcaccagccccctggatgggcattgggctgacacctaccatgctgctttttggcacagttgtctattctgagccttgagagaaaaagtgccccttaagggttgaaggcagtctgaacccttgtgcttggtggggctcgtggccttccccttttgcctggctgtggaggcctgatgctgccccgttccctgtcagaggctaagatgagatttgccagcacaggggccccagatctgcctgggcctgtgcagcagcccagcttcctggtgtatttttcaggtaggcccttgtcctgccagctgccttcctcatcccctcgtcctgtcccagaggttatctgcctggcctggctccccacgagtcacctgcaagccccagggcctgggggcagtgactggcaggtgcagatgggctgtttcgtgtagtggaagagcagcctgatggccaagggggtggacgcaattgtgggatgtcctctttactcccttcctggcctcactggctggggcagaggggcagccgctaggagagactgaaagcagcagctaggactgaggagtgggttttattgtccttcagagctcttcaagctgtcccctctgtcatcactccctggatgtgtggggcatggttccttccctgggaaggctaagttcagttctgttttttattctatgagaacaagtcacagctgcagctgggccccatgctctgccccaagcccccaaccccgcggtgctctggcggcttcctgtccactctcggggcccttggggcctggcttgctccagggtcttgggctactggcagctcctctccttgggctcctggctgccaggcgttggtgccacttcttaaaggcctggaaccagggaggagaggaaatgctattgttgtgggctttctccggggtctgtgctgtgcctgctagagcaacccctgtacccagctccttttgtccccagggcccctccctctgccccaagcagccagccagtcttgcctaggccaaatgcacaagctcagaatagatctgatggtgagctgggaagctgtactcagagcagagcaaatgagggagggggcgctcaggacccaggccctccatgggctagtgtgagtggcagccatgcctcatgccacaccttcttcgcaaactgatggaccgggtgggcctggcctgagctggggccacaaatcaaagcaagggctccagcatccagcctgtgtgttctgtaatggaactgaccccctcccctgaaaacgaaggggccccggggctggcaagcagggaaagctccacggtgcgtggctgtggcacagacttctggaaggctggctgagtggaatgcagggaagagggcagtacctgggaaaggacccacccatcttcctgctgctgtaactgctgagccactcgcagtcgcaggatccgctgccaccacgtctgccaggcccatctcaggtgccactccctgagctttggggacagttggcagagaaggcctcttgtgctcacgctcccccgcagtccccagcccttctgcctttctcccccgacactgctgcaccagagtgaaagggctatggcaagggggtgtcatctgaggagtattaagaatgcagattcctgggcctgtcccccaaggttttggagtcagtaggtccaagggccatacttttgagaggggtttgggttaagtatgaggtgaaatgggagatggtcagtgtggagaggggtgcacccactcaccagggtccgcaccagctgctctgccccttgggcatccacccagtgctgccatgccactgccaggcacctggcctgctgggaaccccgcagcccgtgaagcagtgcctcgaggcaccggcgctgcaggtacttcctcctgatggccaagagcatcgtgacccttcagggccagaaggagggcagagccatgggcctgggcctgcttttccaggatcctgcaggaacgagcactggccagagagggcccagctgtagccatggctcaggcaagcccctcagcccttgcccccatccctcggacccaccaaactgcacacacagctcctcttaccgtagcctccgtttatgggccttgctttgggctttgcaggctctgggctcagggctggagtgcgctcttggtccctggtccctcgtccacaggggcaggcctgggacccagctactctgtccaggccactgtggccagagctggaaggcagggcagagggaatgttccctgcaccctggaaaggggagttgagtcacaagaggttaaggtgggtccaggaaggcagctgctcttagtgcccgcctaggagttgagtacagtgaggagggtggaggaaggtgctgagcttagccttgtgccctgcccccatctccccaggcctccagcctctcccggctgcctgccgcccaaagagaaatcacaggggcggggcaggaatgcaaagtgttttctcagaacagctgaaacattccgaagagggaatggatggggagaatggtcaatacacataagaccgtgtcccaaggagctgatttccaggcccctgaggactggagaccgcttcacccctgcacttcagacaccgtttgtcccccggggcaaggtctccttactctgagcccaggccgttccccttggcttcctccgtccacccaggctgcactgcagtgatggcgcgggaggcaccagctctgtggcctgtgtccagcagctgcgggtctgaaggaatagccagagaggagcacctgaaccccatgggcttggacttcctggggccccgctgggatttcttcgctgctctagctggcaggacacatcccggcctcttccacccattcccccatgtggctgaagacattccaacaatggggtgggcccataatagttagccctcagtcagttcccggagcacagccctgggagggggctatttctctccccactgaaaacatttcaaagctgagttacttgtctgaggcctcatccctcggaagccgtctgactccagagtctgagcccccggctagtaccctatagagagggggctctccaaaggggctgctggggcatgtgtgcctgtggcagaaaagaggagaccctggaattcagcaccctgggtgccattcccagcgtttagtttctagaggcctcagtttctccatcagcttatgggatccttgtctttactgacaagaatggaatagaaatgtaaaagtactctgaaaagcaattgccctgtaacttatctagaaagaaaagaccctgagactccagaatctgctgttgccatagccccatatgtgtgaattctgcaactagccaaggctagttcctttcaattccatttaaaaaacaaaaaccagcaggtgtggtggctcatggcgtaatgggcctgcccaatgctttgggaggccaaggcaggtagatcgcttgagcccaggagtttgagacaagccctggcaacatagtgagatcccatttctacaaaaaaaaaaaaaaaaaaa

SEQ ID NO: 153408 - DNA, 7057 bp, Homo sapiens
  Payload ID: 10172
  Gene Symbol: MTHFR
  Gene Name: methylenetetrahydrofolate reductase (NAD(P)H)
  Uniprot ID: P42898
  ENST ID: ENST00000376592
  CDS Start-End: 130-2100
gccttcttcctgtgtggaaatacagcgcctccggcttgaacctgccactcaggtgtcttgatgtgtcgggggtgtggctgcctgccccctgatgctccctgccccaccctgtgcagtaggaacccagccatggtgaacgaagccagaggaaacagcagcctcaacccctgcttggagggcagtgccagcagtggcagtgagagctccaaagatagttcgagatgttccaccccgggcctggaccccgagcggcatgagagactccgggagaagatgaggcggcgattggaatctggtgacaagtggttctccctggaattcttccctcctcgaactgctgagggagctgtcaatctcatctcaaggtttgaccggatggcagcaggtggccccctctacatagacgtgacctggcacccagcaggtgaccctggctcagacaaggagacctcctccatgatgatcgccagcaccgccgtgaactactgtggcctggagaccatcctgcacatgacctgctgccgtcagcgcctggaggagatcacgggccatctgcacaaagctaagcagctgggcctgaagaacatcatggcgctgcggggagacccaataggtgaccagtgggaagaggaggagggaggcttcaactacgcagtggacctggtgaagcacatccgaagtgagtttggtgactactttgacatctgtgtggcaggttaccccaaaggccaccccgaagcagggagctttgaggctgacctgaagcacttgaaggagaaggtgtctgcgggagccgatttcatcatcacgcagcttttctttgaggctgacacattcttccgctttgtgaaggcatgcaccgacatgggcatcacttgccccatcgtccccgggatctttcccatccagggctaccactcccttcggcagcttgtgaagctgtccaagctggaggtgccacaggagatcaaggacgtgattgagccaatcaaagacaacgatgctgccatccgcaactatggcatcgagctggccgtgagcctgtgccaggagcttctggccagtggcttggtgccaggcctccacttctacaccctcaaccgcgagatggctaccacagaggtgctgaagcgcctggggatgtggactgaggaccccaggcgtcccctaccctgggctctcagcgcccaccccaagcgccgagaggaagatgtacgtcccatcttctgggcctccagaccaaagagttacatctaccgtacccaggagtgggacgagttccctaacggccgctggggcaattcctcttcccctgcctttggggagctgaaggactactacctcttctacctgaagagcaagtcccccaaggaggagctgctgaagatgtggggggaggagctgaccagtgaagaaagtgtctttgaagtcttcgttctttacctctcgggagaaccaaaccggaatggtcacaaagtgacttgcctgccctggaacgatgagcccctggcggctgagaccagcctgctgaaggaggagctgctgcgggtgaaccgccagggcatcctcaccatcaactcacagcccaacatcaacgggaagccgtcctccgaccccatcgtgggctggggccccagcgggggctatgtcttccagaaggcctacttagagtttttcacttcccgcgagacagcggaagcacttctgcaagtgctgaagaagtacgagctccgggttaattaccaccttgtcaatgtgaagggtgaaaacatcaccaatgcccctgaactgcagccgaatgctgtcacttggggcatcttccctgggcgagagatcatccagcccaccgtagtggatcccgtcagcttcatgttctggaaggacgaggcctttgccctgtggattgagcggtggggaaagctgtatgaggaggagtccccgtcccgcaccatcatccagtacatccacgacaactacttcctggtcaacctggtggacaatgacttcccactggacaactgcctctggcaggtggtggaagacacattggagcttctcaacaggcccacccagaatgcgagagaaacggaggctccatgaccctgcgtcctgacgccctgcgttggagccactcctgtcccgccttcctcctccacagtgctgcttctcttgggaactccactctccttcgtgtctctcccaccccggcctccactcccccacctgacaatggcagctagactggagtgaggcttccaggctcttcctggacctgagtcggccccacatgggaacctagtactctctgctctagccaggagtctgtgctcttttggtggggagcacttgcgtcctgcagaggaccacagtgggtggcacctcctgagaaggcgaggagagtggttgttgccaactaagccctcgaaccaaggcagcctccagagccagcctgggactcccagtgaacttacacttggagcccgtgcagtacaggcaaaacacgcaagggcatcaggcactggtggcatcgtagaagagatgtggcaaagtgctgtacccttccacctcctagaggtgggcagctgggccccacctacttgtgactgaaggggcacaccactgccctgcctgcccacttagccgtccatggcaccagccccctggatgggcattgggctgacacctaccatgctgctttttggcacagttgtctattctgagccttgagagaaaaagtgccccttaagggttgaaggcagtctgaacccttgtgcttggtggggctcgtggccttccccttttgcctggctgtggaggcctgatgctgccccgttccctgtcagaggctaagatgagatttgccagcacaggggccccagatctgcctgggcctgtgcagcagcccagcttcctggtgtatttttcaggtaggcccttgtcctgccagctgccttcctcatcccctcgtcctgtcccagaggttatctgcctggcctggctccccacgagtcacctgcaagccccagggcctgggggcagtgactggcaggtgcagatgggctgtttcgtgtagtggaagagcagcctgatggccaagggggtggacgcaattgtgggatgtcctctttactcccttcctggcctcactggctggggcagaggggcagccgctaggagagactgaaagcagcagctaggactgaggagtgggttttattgtccttcagagctcttcaagctgtcccctctgtcatcactccctggatgtgtggggcatggttccttccctgggaaggctaagttcagttctgttttttattctatgagaacaagtcacagctgcagctgggccccatgctctgccccaagcccccaaccccgcggtgctctggcggcttcctgtccactctcggggcccttggggcctggcttgctccagggtcttgggctactggcagctcctctccttgggctcctggctgccaggcgttggtgccacttcttaaaggcctggaaccagggaggagaggaaatgctattgttgtgggctttctccggggtctgtgctgtgcctgctagagcaacccctgtacccagctccttttgtccccagggcccctccctctgccccaagcagccagccagtcttgcctaggccaaatgcacaagctcagaatagatctgatggtgagctgggaagctgtactcagagcagagcaaatgagggagggggcgctcaggacccaggccctccatgggctagtgtgagtggcagccatgcctcatgccacaccttcttcgcaaactgatggaccgggtgggcctggcctgagctggggccacaaatcaaagcaagggctccagcatccagcctgtgtgttctgtaatggaactgaccccctcccctgaaaacgaaggggccccggggctggcaagcagggaaagctccacggtgcgtggctgtggcacagacttctggaaggctggctgagtggaatgcagggaagagggcagtacctgggaaaggacccacccatcttcctgctgctgtaactgctgagccactcgcagtcgcaggatccgctgccaccacgtctgccaggcccatctcaggtgccactccctgagctttggggacagttggcagagaaggcctcttgtgctcacgctcccccgcagtccccagcccttctgcctttctcccccgacactgctgcaccagagtgaaagggctatggcaagggggtgtcatctgaggagtattaagaatgcagattcctgggcctgtcccccaaggttttggagtcagtaggtccaagggccatacttttgagaggggtttgggttaagtatgaggtgaaatgggagatggtcagtgtggagaggggtgcacccactcaccagggtccgcaccagctgctctgccccttgggcatccacccagtgctgccatgccactgccaggcacctggcctgctgggaaccccgcagcccgtgaagcagtgcctcgaggcaccggcgctgcaggtacttcctcctgatggccaagagcatcgtgacccttcagggccagaaggagggcagagccatgggcctgggcctgcttttccaggatcctgcaggaacgagcactggccagagagggcccagctgtagccatggctcaggcaagcccctcagcccttgcccccatccctcggacccaccaaactgcacacacagctcctcttaccgtagcctccgtttatgggccttgctttgggctttgcaggctctgggctcagggctggagtgcgctcttggtccctggtccctcgtccacaggggcaggcctgggacccagctactctgtccaggccactgtggccagagctggaaggcagggcagagggaatgttccctgcaccctggaaaggggagttgagtcacaagaggttaaggtgggtccaggaaggcagctgctcttagtgcccgcctaggagttgagtacagtgaggagggtggaggaaggtgctgagcttagccttgtgccctgcccccatctccccaggcctccagcctctcccggctgcctgccgcccaaagagaaatcacaggggcggggcaggaatgcaaagtgttttctcagaacagctgaaacattccgaagagggaatggatggggagaatggtcaatacacataagaccgtgtcccaaggagctgatttccaggcccctgaggactggagaccgcttcacccctgcacttcagacaccgtttgtcccccggggcaaggtctccttactctgagcccaggccgttccccttggcttcctccgtccacccaggctgcactgcagtgatggcgcgggaggcaccagctctgtggcctgtgtccagcagctgcgggtctgaaggaatagccagagaggagcacctgaaccccatgggcttggacttcctggggccccgctgggatttcttcgctgctctagctggcaggacacatcccggcctcttccacccattcccccatgtggctgaagacattccaacaatggggtgggcccataatagttagccctcagtcagttcccggagcacagccctgggagggggctatttctctccccactgaaaacatttcaaagctgagttacttgtctgaggcctcatccctcggaagccgtctgactccagagtctgagcccccggctagtaccctatagagagggggctctccaaaggggctgctggggcatgtgtgcctgtggcagaaaagaggagaccctggaattcagcaccctgggtgccattcccagcgtttagtttctagaggcctcagtttctccatcagcttatgggatccttgtctttactgacaagaatggaatagaaatgtaaaagtactctgaaaagcaattgccctgtaacttatctagaaagaaaagaccctgagactccagaatctgctgttgccatagccccatatgtgtgaattctgcaactagccaaggctagttcctttcaattccatttaaaaaacaaaaaccagcaggtgtggtggctcatggcgtaatgggcctgcccaatgctttgggaggccaaggcaggtagatcgcttgagcccaggagtttgagacaagccctggcaacatagtgagatcccatttctacaaaaaaaaaaaaaaaaaaattagccgggtgtggtggcacacgcctgtagtctcagctactcaggtggctgaggtgggaggatcgtttgagccctggaggttgaggctgcagtgagctgtgatcgcaccactgcactctggcctgggcgacagagtgagacactgtctgagaacaaaaaacgactgaaaaaaaaaatcaccttagctttttctcttagaatcttctctaaaacgtattctttgtggcattctgaaataggattcatgatgatgcctgttgatcttagggacactacctcacctgccagtatctttggggctgtgtccttcaaggacatgtccccagactgctgtgcagtgtcattttttgtgtttggtttggtggtggcttcttcccccttgctaggctatcaacctcttatcaccacttgttggtgtcagaactaactgcttctggtctggagagggactgaccgatgcctttgggtagagagaattatgaaagaaattttggtatttttctactttatattttctgaggtttctgtaataagcatatttcacttttccaataagaaaaaaaaaaacttggcctggcgcggtggctcacacctgtaatcccagcactttgggaagtcgaggtgggaggatcacttgagttcaggagttcgagaccagcttgggcaatatggtgaaaccccgtctctactaaaaatacaaaaattagccaggcgtggtggcgtgcacttgtagtcccagctactcaggaagctgaggcgggagaatcacttgaacccgggaggcagaggttgcagtgagctgagatcactcctctgcttcagcctgggcaattgagccagactctgtctcaaaaataaacaaaaaaacttgacaaaaaaa

SEQ ID NO: 153409 - DNA, 1539 bp, Homo sapiens
  Payload ID: 10172
  Gene Symbol: MTHFR
  Gene Name: methylenetetrahydrofolate reductase (NAD(P)H)
  ENST ID: ENST00000423400
  CDS Start-End: 1382-1539
gtccgccgggacctttctgggagtcgtaggcttaatgaccctatgccctctgttggcctgtctgtgccctggtggctctgattacttgtttctgttttttgtttttgtttttttttttgagatggagttttgcttttgtcgcccaggctggagtgctatggcacaatcttggttcactgcaacctctgccttccgggttcaagcgattctcctgcctcagcctccagagtagctgggattacaggcgcccgccaccaaacctggctaatttttatatttttagtagagtcgggatttcaccatgttggccaggctggtctcaaactcctggcctcaggtgatccacccacctcggcctcccaaagtgctgggattacaggtgtgttttttgtttttttaagagatggagtctcgctatgttgcccaggctggccttgaactcctgggctcaggcaatccttctgcctcagccttcccagtagctgggtcactgtgatgatttgaattgaattctgtgatgtgtaagaagagcagcctgcaaggcaagcacagatggggcagcttttgttctgagaaattcgtgcccttactgaacttgggtctggctatttttggaacatggccagcatcaagttctaacccacaacacggtctttttggagtagcatgaattcaggagaaatctggctgcatagtcaagccctcaccccttccatcctgtgcacgaactgtttcaagtaacagatgttccaggcagagccagccagagtgagctgttccttctctggagggtgatctggtatccctgaacgcctgttggcctcatctccaccaacccctgcagtctctgcccctgagtccccctccttccatccgcctccccttactagagcctcagccctccctcctcgcctggaagccttgcccccgcccccttgtgctggctggagctcaagcctcttcctttgtcgcagctccgcccagttgaacacacccgctggggaaggtgcctctgttccctccccacgcactctgggcctgagctgacagagatggaccatcgaaaagccagggtcctcccagctgggcactactgcccctcgctaggaatatgggcctcgcaggtcggcagcgtgaggtcctctgtgccaccttccatcaggtagctgtcaccgaggagcatgttgcagtgccgggtgggggctgccttgcatgcaaggagcctggcagcagcggagggcaaggctttgagtgaggcggcccggacagccatagctgaggagcatggagccactgggagggggcagtgtcaccttttttggccttcttcctgtgtggaaatacagcgcctccggcttgaacctgccactcaggtgtcttgatgtgtcgggggtgtggctgcctgccccctgatgctccctgccccaccctgtgcagtaggaacccagccatggtgaacgaagccagaggaaacagcagcctcaacccctgcttggagggcagtgccagcagtggcagtgagagctccaaagatagttc

SEQ ID NO: 153410 - DNA, 870 bp, Homo sapiens
  Payload ID: 10172
  Gene Symbol: MTHFR
  Gene Name: methylenetetrahydrofolate reductase (NAD(P)H)
  ENST ID: ENST00000431243
  CDS Start-End: 782-870
gtccgccgggacctttctgggagtcgtaggcttaatgaccctatgccctctgttggcctgtctgtgccctggtggctctgattacttgtttctgttttttgtttttgtttttttttttgagatggagttttgcttttgtcgcccaggctggagtgctatggcacaatcttggttcactgcaacctctgccttccgggttcaagcgattctcctgcctcagcctccagagtagctgggattacaggcgcccgccaccaaacctggctaatttttatatttttagtagagtcgggatttcaccatgttggccaggctggtctcaaactcctggcctcaggtgatccacccacctcggcctcccaaagtgctgggattacaggtgtgttttttgtttttttaagagatggagtctcgctatgttgcccaggctggccttgaactcctgggctcaggcaatccttctgcctcagccttcccagtagctgggtcactgtgatgatttgaattgaattctgtgatgtgtaagaagagcagcctgcaaggcaagcacagatggggcagcttttgttctgagaaattcgtgcccttactgaacttgggtctggctatttttggaacatggccagcatcaagttctaacccacaacacggtctttttggagtagcatgaattcaggagaaatctggctgcatagtcaagccctcaccccttccatcctgtgcacgaactgtttcaagtaacagatgttccaggcagagccagccagataggaacccagccatggtgaacgaagccagaggaaacagcagcctcaacccctgcttggagggcagtgccagcagtggcagtgagagctccaaagatagttc

SEQ ID NO: 153411 - DNA, 1034 bp, Homo sapiens
  Payload ID: 10172
  Gene Symbol: MTHFR
  Gene Name: methylenetetrahydrofolate reductase (NAD(P)H)
  ENST ID: ENST00000418034
  CDS Start-End: 604-1034
cagtggtgcggccggcggccgagcgttctgagtcacccgggactggagggtgagtgacggcgaggccggggtcgccgggagggagatcctggagccggcaaacaacctcccgggggcaaggacgtgcttgtgggcggggagcgctggaggccggcctgcctctcttcttggggggggctgccgcctcccttgcgcacccttcgcgggattagtgtaactcccaatggctaccacttccagcgaccgccaaccctcaagcgaagactgactttggctccctgcctggacggaggggcccctgagccaggggtgacgatcccgcccctctgaccggcccaggcccgtgtcctcgcccccatcggtgactcagtgacctggtgactggattctcggccacctgggcgccgagacggcttccggctcctgccttttaaacctgcctccccggcgatcacctggagaagagcgctgggcccggggcactgcggtccctggcgcccactgcgtcccgctgcgcacgggggtccgccgggacctttctgggagtcgtaggcttagtatcccagtgcttggcgcagactagttgttcataggaacccagccatggtgaacgaagccagaggaaacagcagcctcaacccctgcttggagggcagtgccagcagtggcagtgagagctccaaagatagttcgagatgttccaccccgggcctggaccccgagcggcatgagagactccgggagaagatgaggcggcgattggaatctggtgacaagtggttctccctggaattcttccctcctcgaactgctgagggagctgtcaatctcatctcaaggtttgaccggatggcagcaggtggccccctctacatagacgtgacctggcacccagcaggtgaccctggctcagacaaggagacctcctccatgatgatcgccagcaccgccgtgaactactgtggcctggagaccatcctgcacatgacctgctgccgtcagcgcctggaggagatcacgggccatctgcacaa

SEQ ID NO: 153412 - DNA, 398 bp, Homo sapiens
  Payload ID: 10172
  Gene Symbol: MTHFR
  Gene Name: methylenetetrahydrofolate reductase (NAD(P)H)
  ENST ID: ENST00000413656
  CDS Start-End: 310-398
ctcagtgaatgttggctatcaccgtgtgccaaactctggggataccccaggcaggacaccggtcctgtctcagggaactggggaaagagaaaggagacaggccttttcacccacagttacaacccagggtgctatgggagtccagctgataacggataaatcgtgggagttggcttacaaatatggcacatgcgtggcatatactaggaatgcaataagtctttgaaaatcagagggtttacaggtggttcagcttcctcctactctaggttctgttccagcaagcaattaacgagtaggaacccagccatggtgaacgaagccagaggaaacagcagcctcaacccctgcttggagggcagtgccagcagtggcagtgagagctccaaagatagttc

SEQ ID NO: 153413 - DNA, 7068 bp, Homo sapiens
  Payload ID: 10173
  Gene Symbol: MMAA
  Gene Name: methylmalonic aciduria (cobalamin deficiency) cblA type
  Uniprot ID: Q8IVH4
  ENST ID: ENST00000281317
  CDS Start-End: 1211-2467
accagtaattcattttttattattctgtattcagtaagaatcaacctgtatcaaatagctgaaaaggcctgaagcctcccaaatgcatatcattacacaaattctgtgtgaggactgacatcttggtttcatatactaattatactgcatgggccccatttataaccatatctactcgtcatttgatcctggctactgccgatggatgctatcttcatcacattatagcaaacatttgggtgattaagtttttctcaaaaattctagattagcatacaacggctttactacttatatgtcatctaagacgttttttaagaattagttactactacgcccaacgcagtgaggtagcaaatattatgcctgtttattttcatctccatttcaggcttgcgcgcctttcccccctcgggacttcccgaggacacccctgcagcagtgagcccgagtcctggctttggctgcatgttaagaaatattaatcaaaatgaatgcgtgccctttaagagaaaaaaactgtgggtccttcagcctttaaaaaccatgccgtggtttaaaaacttaaaactatatttcggcagaacgctgagcatttcttcaaatcactctgagaagcttgagtgtctttaatttcaccggtctgtcaaacgtaacgcgtctctccctcaccccacattttaagtttccaaggagcggaagaagggcctccgggggtcccggccgccgcaggctgctgggggtgaggacacgactcggcctccgtccgactcgagggtgtcgcgaaggccaggagggaacgaaagttaccctcgaacttcggaggcgaaagatttcatgtggatcttaaaaagggcaaaacctaccccaaaggccgtaaaccgccctcccctcccccgccagagaacttcccggcgcagagcttccgcagcctgctgcaggccgggagaccttcacgctcactcgctctccgccacacgccggaactgcgcggccacgtccacggggaccctggccatgccccgcaccgccacccagccccaggcgatccccgggccccacgcgcctgcagtcggcgctgcgcctgcgtgggaggatccggcggaaggggcggggtcaggtggcacttccgtggcttcgggcggggaggtcacaatcacattgagccaaaacgcatccagtgttttctccagttacaaataaaacgaatatgcccatgctgctaccacatcctcaccagcatttcctaaaaggccttttaagagcacctttccgatgttaccacttcatctttcactcaagtactcatctcggatcaggaatcccatgtgctcagccgtttaattctcttggactccattgtacaaagtggatgctgctgtcagatggcttaaagagaaaattatgtgtacaaacaaccttaaaggaccacacagaaggactttctgataaagagcaaagatttgtggataaactttatactggtttaatccaagggcaaagggcctgtttagcagaggccataactcttgtagaatcaactcacagcaggaaaaaggagttagcccaggtgcttcttcagaaagtattactttaccacagagaacaagaacaatcaaataaaggaaaaccactagcatttcgagtaggattgtctgggccccctggtgctggaaaatcaacatttatagaatattttggaaaaatgcttactgagagagggcacaaattatctgtgctagctgtggacccttcttcttgtactagtggtggatcactcttaggtgataaaacccgaatgactgagttatcaagagatatgaatgcatacatcaggccatctcctactagaggaactttaggaggcgtgacaaggaccacaaatgaagctattctgttgtgtgaaggagcgggatatgacataattcttattgaaaccgttggtgtgggtcagtcggagtttgctgttgctgacatggttgacatgtttgttttactactgccaccagcaggaggagatgagctgcagggtatcaaaaggggtataatcgagatggcagatctggtagctgtaactaaatctgatggagacttgattgtgccagctcgaaggatacaagcggaatatgtgagtgcactgaaattactccgcaaacgttcacaagtctggaaaccaaaggtaattcgtatttctgcccgaagtggagaggggatctctgaaatgtgggataaaatgaaagatttccaggacctaatgcttgccagtggggagctgactgccaaacgacggaagcaacagaaagtttggatgtggaatctcattcaggaaagtgtgttagagcatttcaggacccaccccacagtccgggaacagattccacttctggaacaaaaggttctcattggggccctgtccccaggactagcagcagacttcttgttaaaagcttttaaaagcagagactaataaaattcatcctgtataataattttacatatcatttcataaagtattttaatagaaaaatcacttgtatgcttatattttcagtaattattgtatggtgctcttgtcttctttgtttgtgacccatgcttgaaaacttgaaggaagttagatatgaatggcaaaagttaggcagtatttataaggtacctgttttatgttactgatatctgtttccttctcttcttataccctggcatggtggcctgtagggtagtttcttcttaatagtcaagaacagagaaagctgaggagagcagaaaatatcttgcactttaaaatgcttattttgattccatattatctgaatttccagagaggatgtaaacaagagtgaccatatttttggagtccttcttgaagccagaacaacacacagtgggttgctaagagccgacaatcataattgacatttagtgtaccagattattctaagaatttctgaaattaccatgtacatgagtaatgaaacaactggaataatgtgatgatgtgaacacaattttaaagtctgcttgtctggatttgcaggtacccttccgccaccccccaacatgataggtaagagagcaaaagggaactgggaaaaatcagctacaaataaaatgggtgactaatccccagttcttggacccattatatttgtagccaattggagtaaacccctaaaagacaaagtgaggtcagaatgattcaaggattattcagtttgaagactaccaaaggcttttgcttctcttcttccttggccatttcacttcattttagtattttaaaaatcttttttcttgatggtgaacaagttttgtcctatgctatggaggaggcatagcacagtgattaagagcttgggctctgtagttggactatgtgggtttaaactttaaacccagatcaattgtatattagctacatgagctaatctctttaagcttccatttcctccctggtaaaatgaaattggcaaataactttctaaggttagtgaagataggaaatactcgaaggctgcttactatccttattacattaaagttatgggtatcttgaaactacaaacctgatgtataatttcagttttctctcatggtcttgttactaccatcatactcttgatattttaggatactttaggattacctttgaagaaccctttctagttaattctttgaatatgttttatacttatttgatggtagttgtaactgtgtacatttgaataaaatttctaaccataaaatttcgccattgcacaaaaagcctttatagaagtttctaacatattctattctgaaccctgtagaatattttatgtagtatagcagcttgcattgttacttactgtactggaatcaaacctcttgagcattattttaacaaacatccctttacattttttggaaagatttttagtactccattggcatagctatttcatacaaggattaggagaaactttgaaaggttatccacttgacttttctgattttagaaaggactaccattaaaccaccctatcagacaaaaaaaactggtttttagaaacctgagagaaggaattttataatttccctgagtaagctgttacagggaataacaaatctcctgccacatgtggcacagtgtaagtaatgctggagcacacatactgcattgtaaagaaggtaggaaaggtggggggacttttgttagctttaattttaaggctaaaagcatttcttctcagtttgaactacttttaaatgttataaatgtcatcataaaaatcattagaaaactcatttctccttatgttgtcgttgtaccattgggtattgtatagagaccaatttctaagagattttttcacctctgtttctgttatttgctatactggaggtaatataataataatgaaatatagctttttttttcaactcagaaatcctattccctctccccatctgtgattatattgtactggacttctgacttggtcaaaagcataggttttgacttagatacatgtgggggcagatctcagctctatcactaactagctatatgatatttggcaagttttttctctatgtgcagtagtttctttatctgtaaaattaagataatagctactttacagggttggaagaattaatttagaaattgtacagtgcttagcctcaataattggtaggtggtggtgtaaatattttacatagatacttgtgacagttctttgttctacaaaacagactaatattaatttcagattggccaagctacttaatttctctgtgcctcagtttcctcactattaaatggggatgacaatagtgtccacctagagcaggactattttagtattacatataatccttggatataaatgctgatgaagtttggatatttgtccccacccaagtctcatgttgaaatgtaatccccaatcttggaggtggagcctggtgggaggtgtatggattagatcagatctctcatgaatgacttgggccatcctttgggtggtaagtgagctcttgctccgagttcacacgaggtctagatctggtcatttaaaagtgtgtggcatctccccatccctcactctatcacttgctcctactttcgtcatatgacatgcctgctcccctttcaccttctgccatgattgtaagcttcctgaggcctccctagaagctgagcagatgccagcaccatgcttcctgtagtctgtagaaccataagccaaataaacatcttttctttataaatttataaattacccagtcgcagatatttatagaaagaacagcctaatacaggtgctaaatacatatctgacaataaatggtagttatctcttagaactgttatgaggattaaacgagttacagtgtccatcttaaaaagataattctgaaaaaaatctcataggttcactttgccttgtcaagaatatgattaccattaacttctgtagataggaaaaaaatgtgctgagctccaaaactgacagacattttgctaaaacaatatcaaatctcattaaaatgatgacagttatttcaatagttgacagtagctatcccaatacaacctaacaaggcattttctcttcagaatcactcgatcatatggccatttccctaagcttttatagctattgcccagtgtacactgaagacaacagctaacgaacaacatacgtgtgataatttatgtagttgaacctctaaggcaaaaaaaaaaaaaaaaaggaaaaattagtgaaaatcattcaaacattatgctcaccaggtagactgccatcatagaagtcctaatgctactgctaaaaactagtaaactaccagtaaactgtgaagacagaagtaactcctgtgatctatatgtttgtgcagatggtggagcttttctgctcctaaagcctgagaaatgcaaatgtggcttcgttaatgcaaatgcttcctacgccagactttatgaaactcctcctaaagttgaattcttatccaagtggacatatgttagggtgccattgtaattcaggtagagtgtcagagtggtggctggcaccaacggtagatgttctcaacattagcgttattcaggtaagactacaacaatgatgaacatgtcaaaactttcctttaaaaggaacaatcagaaaaactctttaacaaatgtttttctttccgtagtattttaattaaaatttttaaaattttaaaatttactaaatttatgaacgtttttatcccacttgagatgaatacttatttatagtccctgtcccatgaagcttctgtggatttgctttgtttgtcatttgtggtatgtttgataacaaaaatattagtggcacaaaagcagttatattgaatgcttttgttttagagaaaatttcactctgtactagaaaatgtagatgatgtgagtcaaagttcattaatatttacctgaaaatttgtgtataaaggtaaccttggggcagtttattttgcttagacccctcagcttcttgatagagtgaggtgagggcatatgtaagtcagtaaactattctgttagtaaagtcaaaggcgtaatctaaattaattatgcttttaactaacacagaagaaatcatgtgacctcattctcaaagctcgtaacatccacctggccaatcttaagatgtggatagagttcttttttttcttttttcaatttttacaataatttttgacacattgaagctgtgcatgtttatgggggcacaatttgatgtttcaatacatgtatatgttgtgtaatgatcaaatcggagtacttagcatatctatcatctcgtgcatttatcatttctttgtggcgagaacatttaaaaatcctattttctagctattttgtaatatacactaccttactgttgcgaaccatagtcaccctactgtgcaatagaacacctgaacttattcctcctatctagttgtaactttgtacccattgaccccccttcccttccttccactctcccctccccagtctctggtaaccactgttctgttccctatgagataaaactttttttgtcttccata

SEQ ID NO: 153414 - DNA, 1352 bp, Homo sapiens
  Payload ID: 10173
  Gene Symbol: MMAA
  Gene Name: methylmalonic aciduria (cobalamin deficiency) cblA type
  ENST ID: ENST00000511969
  CDS Start-End: 48-830
gagccaaaacgcatccagtgttttctccagttacaaataaaacgaatatgcccatgctgctaccacatcctcaccagcatttcctaaaaggccttttaagagcacctttccgatgttaccacttcatctttcactcaagtactcatctcggatcaggaatcccatgtgctcagccgtttaattctcttggactccattgtacaaagtggatgctgctgtcagatggcttaaagagaaaattatgtgtacaaacaaccttaaaggaccacacagaaggactttctgataaagagcaaagatttgtggataaactttatactggtttaatccaagggcaaagggcctgtttagcagaggccataactcttgtagaatcaactcacagcaggaaaaaggagttagcccaggtgcttcttcagaaagtattactttaccacagagaacaagaacaatcaaataaaggaaaaccactagcatttcgagtaggattgtctgggccccctggtgctggaaaatcaacatttatagaatattttggaaaaatgcttactgagagagggcacaaattatctgtgctagctgtggacccttcttcttgtactagtggtggatcactcttaggtgataaaacccgaatgactgagttatcaagagatatgaatgcatacatcaggccatctcctactagaggaactttaggaggcgtgacaaggaccacaaatgaagctattctgttgtgtgaaggagcgggatatgacataattcttattgaaaccgttgggtatcaaaaggggtataatcgagatggcagatctggtagctgtaactaaatctgatggagacttgattgtgccagctcgaaggatacaagcggaatatgtgagtgcactgaaattactccgcaaacgttcacaagtctggaaaccaaaggtaattcgtatttctgcccgaagtggagaggggatctctgaaatgtgggataaaatgaaagatttccaggacctaatgcttgccagtggggagctgactgccaaacgacggaagcaacagaaagtttggatgtggaatctcattcaggaaagtgtgttagagcatttcaggacccaccccacagtccgggaacagattccacttctggaacaaaaggttctcattggggccctgtccccaggactagcagcagacttcttgttaaaagcttttaaaagcagagactaataaaattcatcctgtataataattttacatatcatttcataaagtattttaatagaaaaatcacttgtatgcttatattttcagtaattattgtatggtgctcttgtcttctttgtttgtgacccatgcttgaa

SEQ ID NO: 153415 - DNA, 1437 bp, Homo sapiens
  Payload ID: 10173
  Gene Symbol: MMAA
  Gene Name: methylmalonic aciduria (cobalamin deficiency) cblA type
  ENST ID: ENST00000541599
  CDS Start-End: 48-1322
gagccaaaacgcatccagtgttttctccagttacaaataaaacgaatatgcccatgctgctaccacatcctcaccagcatttcctaaaaggccttttaagagcacctttccgatgttaccacttcatctttcactcaagtactcatctcggatcaggaatcccatgtgctcagccgtttaattctcttggactccattgtacaaagtggatgctgctgtcagatggcttaaagagaaaattatgtgtacaaacaaccttaaaggaccacacagaaggactttctgataaagagcaaagatttgtggataaactttatactggtttaatccaagggcaaagggcctgtttagcagaggccataactcttgtagaatcaactcacagcaggaaaaaggagttagcccaggtgcttcttcagaaagtattactttaccacagagaacaagaacaatcaaataaaggaaaaccactagcatttcgagtaggattgtctgggccccctggtgctggaaaatcaacatttatagaatattttggaaaaatgcttactgagagagggcacaaattatctgtgctagctgtggacccttcttcttgtactagtggtggatcactcttaggtgataaaacccgaatgactgagttatcaagagatatgaatgcatacatcaggccatctcctactagaggaactttaggaggcgtgacaaggaccacaaatgaagctattctgttgtgtgaaggagcgggatatgacataattcttattgaaaccgttggtgtgggtcagtcggagtttgctgttgctgacatggttgacatgtttgttttactactgccaccagcaggaggagatgagctgcagggtatcaaaaggggtataatcgagatggcagatctggtagctgtaactaaatctgatggagacttgattgtgccagctcgaaggatacaagcggaatatgtgagtgcactgaaattactccgcaaacgttcacaagtctggaaaccaaaggtaattcgtatttctgcccgaagtggagaggggatctctgaaatgtgggataaaatgaaagatttccaggacctaatgcttgccagtggggagctgactgccaaacgacggaagcaacagaaagtttggatgtggaatctcattcaggaaagtgtgttagagcatttcaggacccaccccacagtccgggaacagattccacttctggaacaaaaggttctcattggggccctgtccccaggactagcagcagacttcttgttaaaagctttaaaagcagagactaataaaattcatcctgtataataattttacatatcatttcataaagtattttaatagaaaaatcacttgtatgcttatattttcagtaattattgtatggtgctcttgtcttctttgtttgtgacccatgcttgaa

SEQ ID NO: 153416 - DNA, 561 bp, Homo sapiens
  Payload ID: 10174
  Gene Symbol: MMAB
  Gene Name: methylmalonic aciduria (cobalamin deficiency) cblB type
  ENST ID: ENST00000420167
  CDS Start-End: 18-311
gtcaagcagcctggctcatggctgtgtgcggcctggggagccgtcttggcctggggagccgtcttggcctgcgcgggtgcttcggcgccgccaggctcctgtatccccgtttccagagccgcggccctcagggcgtggaagacggggacaggccacagccttcctcgaagacacccaggatccccaagatttacaccaaaacgggagacaaagagacggggatttgccatgttggccaggctagtctcgaactcctggcctcaagtgatctgcccaccatggcctcccaaagtcctgggattacagtgtgagccactgcacctggcctgtaattggggttttctagtaccttcacaggagaaaggagacccaaagatgaccaagtgtttgaagccgtgggaactacagatgaattaagttcagctattgggtttgctctggaattagtcacagaaaagggccatacatttgccgaagagcttcagaaaatccagtgcacattgcaggacgtcggctcggccctggcgacaccatgctcctcggcccgggaggctcacttaa

SEQ ID NO: 153417 - DNA, 1089 bp, Homo sapiens
  Payload ID: 10174
  Gene Symbol: MMAB
  Gene Name: methylmalonic aciduria (cobalamin deficiency) cblB type
  ENST ID: ENST00000544051
  CDS Start-End: 35-178
tggcggggtcaggtcccgtcaagcagcctggctcatggctgtgtgcggcctggggagccgtcttggcctggggagccgtcttggcctgcgcgggtgcttcggcgccgccaggctcctgtatccccgtttccagagccgcggccctcagggcgtggaagacggggacagggttttctagtaccttcacaggagaaaggagacccaaagatgaccaagtgtttgaagccgtgggaactacagatgaattaagttcagctattgggtttgctctggaattagtcacagaaaagggccatacatttgccgaagagcttcagaaaatccagtgcacattgcaggacgtcggctcggccctggcgacaccatgctcctcggcccgggaggctcacttaaagtataccacgttcaaggcggggcccatcctggagctggagcagtggatcgacaagtacaccagccagctcccaccactcacggccttcatcctgccttgacagacgctgtcctccagttccccaagtccctccaggtcctcaccggtccctcccagccctgcccactctggagcagcgtgcccgtcgggaggcaagatcagctcggcgctgcatttctgccgggccgtgtgccgccgggccgagagacgtgtggtgcctcttgtccagatgggagagaccgatgcgaacgtggccaagttcttaaacagactcagtgactatctcttcacgctagccagatatgcagccatgaaggaggggaatcaagagaaaatatacatgaaaaatgacccatcggccgagtctgagggactctgaaatcacagaaagtgggagcttggaggatccctccatggcgatggccgtggagagaggagcttgcccttctggggtcctggttcctgaagagctcacccagagaggctcaaagcagccttttgtcccagctcagctttgatctacacctcttgccaccttcctcaagggactgtgaccctttggggattctgtccctgaccctgcttccccaagctctcctgggtcttggagggatgtgggaatgaattggcattgcaggaaagacaggtaaagtgat

SEQ ID NO: 153418 - DNA, 1188 bp, Homo sapiens
  Payload ID: 10174
  Gene Symbol: MMAB
  Gene Name: methylmalonic aciduria (cobalamin deficiency) cblB type
  ENST ID: ENST00000537496
  CDS Start-End: 24-545
ggtcccgtcaagcagcctggctcatggctgtgtgcggcctggggagccgtcttggcctggggagccgtcttggcctgcgcgggtgcttcggcgccgccaggctcctgtatccccgtttccagagccgcggccctcagggcgtggaagacggggacaggccacagccttcctcgaagacacccaggatccccaagatttacaccaaaacgggagacaaagggttttctagtaccttcacaggagaaaggagacccaaagatgaccaagtgtttgaagccgtgggaactacagatgaattaagttcagctattgggtttgctctggaattagtcacagaaaagggccatacatttgccgaagagcttcagaaaatccagtgcacattgcaggacgtcggctcggccctggcgacaccatgctcctcggcccgggaggctcacttaaagtataccacgttcaaggcggggcccatcctggagctggagcagtggatcgacaagtacaccagccagctcccaccactcacggccttcatcctgccttgacagacgctgtcctccagttccccaagtccctccaggtcctcaccggtccctcccagccctgcccactctggagcagcgtgcccgtcgggaggcaagatcagctcggcgctgcatttctgccgggccgtgtgccgccgggccgagagacgtgtggtgcctcttgtccagatgggagagaccgatgcgaacgtggccaagttcttaaacagactcagtgactatctcttcacgctagccagatatgcagccatgaaggaggggaatcaagagaaaatatacatgaaaaatgacccatcggccgagtctgagggactctgaaatcacagaaagtgggagcttggaggatccctccatggcgatggccgtggagagaggagcttgcccttctggggtcctggttcctgaagagctcacccagagaggctcaaagcagccttttgtcccagctcagctttgatctacacctcttgccaccttcctcaagggactgtgaccctttggggattctgtccctgaccctgcttccccaagctctcctgggtcttggagggatgtgggaatgaattggcattgcaggaaagacaggtaaagtgattgctgcaatgagaaggagctgtgcggaaaaggaataaaagttggaaag

SEQ ID NO: 153419 - DNA, 4438 bp, Homo sapiens
  Payload ID: 10174
  Gene Symbol: MMAB
  Gene Name: methylmalonic aciduria (cobalamin deficiency) cblB type
  Uniprot ID: Q96EY8
  ENST ID: ENST00000545712
  CDS Start-End: 395-1147
cctgccgccgccgccgcctccccggccgccgcccctccgcgccgaagccggagcagctccccaactcccacaacccagagcgcccgtgcctcaaggggaggaggcgttgtacttcaggccagccaatcagagcgcgcgagcccggagtacctttaccaataggcttgaacattggtcaataggtgttgcagccaagccgacacgggttttcccgccccgctccttccgttaaaccaatgggaaacaagtccctgggagtgtcccgccctggggtgagaactgcgaaccaataaaaattgaaacctgagcggtggcgcggccagctgtgggtggagtcaccccgcggactggacgggaacctggcggggtcaggtcccgtcaagcagcctggctcatggctgtgtgcggcctggggagccgtcttggcctggggagccgtcttggcctgcgcgggtgcttcggcgccgccaggctcctgtatccccgtttccagagccgcggccctcagggcgtggaagacggggacaggccacagccttcctcgaagacacccaggatccccaagatttacaccaaaacgggagacaaagggttttctagtaccttcacaggagaaaggagacccaaagatgaccaagtgtttgaagccgtgggaactacagatgaattaagttcagctattgggtttgctctggaattagtcacagaaaagggccatacatttgccgaagagcttcagaaaatccagtgcacattgcaggacgtcggctcggccctggcgacaccatgctcctcggcccgggaggctcacttaaagtataccacgttcaaggcggggcccatcctggagctggagcagtggatcgacaagtacaccagccagctcccaccactcacggccttcatcctgccttcgggaggcaagatcagctcggcgctgcatttctgccgggccgtgtgccgccgggccgagagacgtgtggtgcctcttgtccagatgggagagaccgatgcgaacgtggccaagttcttaaacagactcagtgactatctcttcacgctagccagatatgcagccatgaaggaggggaatcaagagaaaatatacatgaaaaatgacccatcggccgagtctgagggactctgaaatcacagaaagtgggagcttggaggatccctccatggcgatggccgtggagagaggagcttgcccttctggggtcctggttcctgaagagctcacccagagaggctcaaagcagccttttgtcccagctcagctttgatctacacctcttgccaccttcctcaagggactgtgaccctttggggattctgtccctgaccctgcttccccaagctctcctgggtcttggagggatgtgggaatgaattggcattgcaggaaagacaggtaaagtgattgctgcaatgagaaggagctgtgcggaaaaggaataaaagttggaaaggctggagccgtgtgtgtgtgtgtgtgtgtgtgtgtgtgtgtgtgtgtgtgtgtgagagagagccctcccactgccagctcaggttgttcacagatttggaatgggaccagaggcccttgaaaatgtaattgtgatttacctgtgccaaaggtgctttaaatgtcacatttgtaaaggggaaggcggacaagatttggaagtttagtcacctctgagccacccatcaccgccaaagtgtgggggaaggatagctgcagattgacaggcgaggctcagaaactcctggcttagattgaagtgtgtgtgatgggggtgcagcttagaggaccccctctgaaagggatggagatgctgatgagaacaacactaccacttgaaggtgaacattccctgtctggttggactgagtcaagggtctgcggtgcagcatcttcagcttgagaaaatgaggttgtcagtttccagcaaggctgacatccaccagactgatttctccgatgttgcacttggctggcttatgcctctgagatcggtgccacggctgtatttatttcagttgtcactgctgctccctcctgctatgaaacgacactgccagtgccagcagtgtccttgggaaaggcaatatttatgaagggcagaagaggcagccccaagaacctaaagactgcaggctgctaattgcaggaaatgactttggaagggcaggctcttgtccagtttcagggctgaaatgcctggcgaactccattcagccatcacatattgactgagtggctgcttagcatgggccaccgcgctaggctcgggacagctggtctttccggccatctttcttgctggcaagtcagcaaacattaccttcttagtcacgtgcatatttttgccttcattcttaccacctggcctgcaaagtttgcaggagggccaggtatattcacttgtgtcttctgggtcctttcattgctgacaggctgtgatggccctcttgagccttgggcagggtgggtgaggtgcagatgaccaggagtgtgtgaatgccttccaggaggtggctttgttccgtgcctccctgcccccatcgtcactaccaggtctggtacggagtcggtgctcagtgtttgcaaaacagagctgaaaacggactttgggaggccgaggcaggcagatcacctgaggtcaggagtttgagaccagcctggtcaacatggtaaaaccccatttctgctaaaaaaaaaaaaaaaaaaaaaaaattagctgggcatggtggcgggtgcctgtaatcccagctattcaggaggctgaggcaggagaatcacttgaacctacgaggcagaggctgcagtgagccaagatcgtgacacgacactccagcctggctgatagagtgagactccgtcacaaaaaaaaaaaaaaaaaaaaaaaaaccctgaaaacgcaatcactaaggctcggtcagggagtatgttcaaagagcttgcagcgaatcactcaattctgtctacacctcaaaatctcaaaatcttcctggaatatatatatatatataaaataacacagcagccctgcatgcctagccatgggaaagcacagcctccaaaggataaggaaagctttttgagtaaatacaacatcctaaagtgacaatctttgaaacaaggccgttcacctgttgccaagtcctgtccttccaggaccgggtgtcacagcctggatgttaacagtcgcgttctcagacccccgcctctgtatctgtctcccggttcaccagcaaacacttctctgagaaaccacctgggtgcagggcagatgccaccactcagcaggtgtttctctcctgtgctaccaacctgggaaaaatggagaaagcttgctttgggggctggaaggatggggtgtttaaaacatttgctcttctgcagtgcctttcaaaagctctatcaagagcccgaggcaaaagaaaagatgtgtacccctctgtacactgagcaaatgtcctcccatattttgaaccaggtgggaaaagttaatgaaagccctacagtcaggaaatgtgactgcgaagcccccgctgccccagtgtttgcacaccactggcaactctcagaaacaatcagtcccattgcacgggaacacggggttttgaaacaaacagcagcctgtttttatttaaagtcgtgatcccttgcttatcgtagatttttttcataatttgattttggaaaatattgcacacaaatactactcgatccctgagtttgtgggcacttccttacattttgcacccatgaaaatgcctcctccgcctccaggtcaggctccctggaatggggtgtttagtgtcatttccagagacaagctggcagttggctcttgtgtcagagagaagcccacagtcacagtgacaccagcccgcactgtggaagggcttgctatgtgcagtgccctgagccaagtgttccacagacattatctcatttgaaccccatagcagccctggaaggaggcattgggtggggaaccaagttgtcctggggagtcagtgccaagatgtgagccccggacgcggcctcgtcactcacagccccgtgctcctcagctcccacccactgccgcttgacagtcgttttaatcactacctgggctgtggcgaacaatgccaggctctgatagatcctgctgtctcatttctcaacctagtttcccttaactaatatttcatggctatcgttaatgtgcgtttttcatcgagtaatttccacagcccgaacttgtaacacatcccaatgacaaacgtccccagttcggaagcccccgtcagtggcaatgtcacccttgctgctgcctcgacaccttccgacagcccattcagttttatgatcgccctgtcccagtgatcactactgaacctttaagaatccagatgcatttcaagtttaattgaataaaattctttgtataataaa

SEQ ID NO: 153420 - DNA, 945 bp, Homo sapiens
  Payload ID: 10174
  Gene Symbol: MMAB
  Gene Name: methylmalonic aciduria (cobalamin deficiency) cblB type
  ENST ID: ENST00000540016
  CDS Start-End: 18-614
gtcaagcagcctggctcatggctgtgtgcggcctggggagccgtcttggcctggggagccgtcttggcctgcgcgggtgcttcggcgccgccaggctcctgtatccccgtttccagagccgcggccctcagggcgtggaagacggggacaggtttgctctggaattagtcacagaaaagggccatacatttgccgaagagcttcagaaaatccagtgcacattgcaggacgtcggctcggccctggcgacaccatgctcctcggcccgggaggctcacttaaagtataccacgttcaaggcggggcccatcctggagctggagcagtggatcgacaagtacaccagccagctcccaccactcacggccttcatcctgccttcgggaggcaagatcagctcggcgctgcatttctgccgggccgtgtgccgccgggccgagagacgtgtggtgcctcttgtccagatgggagagaccgatgcgaacgtggccaagttcttaaacagactcagtgactatctcttcacgctagccagatatgcagccatgaaggaggggaatcaagagaaaatatacatgaaaaatgacccatcggccgagtctgagggactctgaaatcacagaaagtgggagcttggaggatccctccatggcgatggccgtggagagaggagcttgcccttctggggtcctggttcctgaagagctcacccagagaggctcaaagcagccttttgtcccagctcagctttgatctacacctcttgccaccttcctcaagggactgtgaccctttggggattctgtccctgaccctgcttccccaagctctcctgggtcttggagggatgtgggaatgaattggcattgcaggaaagacaggtaaagtgattgctgcaatgagaaggagctgtgcggaaaaggaataaaagttggaaaggctgga

SEQ ID NO: 153421 - DNA, 546 bp, Homo sapiens
  Payload ID: 10174
  Gene Symbol: MMAB
  Gene Name: methylmalonic aciduria (cobalamin deficiency) cblB type
  ENST ID: ENST00000503497
  CDS Start-End: 25-471
aggtcccgtcaagcagcctggctcatggctgtgtgcggcctggggagccgtcttggcctggggagccgtcttggcctgcgcgggtgcttcggcgccgccaggctcctgtatccccgtttccagagccgcggccctcagggcgtggaagacggggacaggccacagccttcctcgaagacacccaggatccccaagatttacaccaaaacgggagacaaagggttttctagtaccttcacaggagaaaggagacccaaagatgaccaagtgtttgaagccgtgggaactacagatgaattaagttcagctattggacggagtttcgcgcttgttgcccagactggagtgcaatggtgtgatctcggctcactgcaacctctgcctcccgggttcaagcgagtctcctcattattactattcttaacacttacctgttcctggctaccatttctccatggcgggcctgactaggtttgctctggaattagtcacagaaaagggccatacatttgccgaagagcttcagaaaatccagtgcacattgca

SEQ ID NO: 153422 - DNA, 1252 bp, Homo sapiens
  Payload ID: 10174
  Gene Symbol: MMAB
  Gene Name: methylmalonic aciduria (cobalamin deficiency) cblB type
  ENST ID: ENST00000541763
  CDS Start-End: 1-522
atggctgtgtgcggcctggggagccgtcttggcctggggagccgtcttggcctgcgcgggtgcttcggcgccgccaggctcctgtatccccgtttccagagccgcggccctcagggcgtggaagacggggacaggccacagccttcctcgaagacacccaggatccccaagatttacaccaaaacgggagacaaagggttttctagtaccttcacaggagaaaggagacccaaagatgaccaagtgtttgaagccgtgggaactacagatgaattaagttcagctattgggtttgctctggaattagtcacagaaaagggccatacatttgccgaagagcttcagaaaatccagtgcacattgcaggacgtcggctcggccctggcgacaccatgctcctcggcccgggaggctcacttaaagtataccacgttcaaggcggggcccatcctggagctggagcagtggatcgacaagtacaccagccagctcccaccactcacggccttcatcctgccttgacagacgctgtcctccagttccccaagtccctccaggtcctcaccggtccctcccagccctgcccactctggagcagcgtgcccggtgggtgtgccgtggcagggctcctggaggcagaacactgcccggtttggggggcagggctggacttcagaggagctcctgtccgcagtgggcacacctttcccaccctgctcaggcaatgtccctttctcctttcagtcgggaggcaagatcagctcggcgctgcatttctgccgggccgtgtgccgccgggccgagagacgtgtggtgcctcttgtccagatgggagagaccgatgcgaacgtggccaagttcttaaacagactcagtgactatctcttcacgctagccagatatgcagccatgaaggaggggaatcaagagaaaatatacatgaaaaatgacccatcggccgagtctgagggactctgaaatcacagaaagtgggagcttggaggatccctccatggcgatggccgtggagagaggagcttgcccttctggggtcctggttcctgaagagctcacccagagaggctcaaagcagccttttgtcccagctcagctttgatctacacctcttgccaccttcctcaagggactgtgaccctttggggattctgtccctgaccctgcttccccaagctctcctgggtcttggagggatgtgggaatgaattggcattgcaggaaagacaggtaaagt

SEQ ID NO: 153423 - DNA, 1342 bp, Homo sapiens
  Payload ID: 10174
  Gene Symbol: MMAB
  Gene Name: methylmalonic aciduria (cobalamin deficiency) cblB type
  ENST ID: ENST00000537236
  CDS Start-End: 101-394
aattgaaacctgagcggtggcgcggccagctgtgggtggagtcaccccgcggactggacgggaacctggcggggtcaggtcccgtcaagcagcctggctcatggctgtgtgcggcctggggagccgtcttggcctggggagccgtcttggcctgcgcgggtgcttcggcgccgccaggctcctgtatccccgtttccagagccgcggccctcagggcgtggaagacggggacaggccacagccttcctcgaagacacccaggatccccaagatttacaccaaaacgggagacaaagggttttctagtaccttcacaggagaaaggagacccaaagatgaccaagtgtttgaagccgtgggaactacagatgaattaagttcagctattgggtaagggggacaggattggccttgaggttgcgtttgagtcgagtatgagtaaacgtaatgaatgtgaagctctcacgcatgctgggcagcagcctcggaggttgtcagcccttattgaactttcctcagccctgaagcacaggctggtcagctccacaaggctgtggggctgcagactcctttcccttctggccctgcctgtgcctgcgctggcctctggcccatgccatgtgaagctgcctccctctcatccctcacttttcaggtgagcctgtgtgtgccactgaggttagtatactgagtgaaagaggtgagttagtataatgcacagtacatccaatgtgatcccttttgtgactgttgttttttacataagccaaagtttagaaggtggactcaaggatggaccagatcaggatgggccaggtcatgctgtgatcacagacaaccccaaaatctcctgacttatgacaccaaagatggacttgctgttcccacttcatgcccatcacagggtatattctttggctccatgcggccttcattctgggacacaggctgctagtacagctgctgcctggggcaattatcagtcattgtggcagagggaaaagaggtcatggtgaagctcacattggctcctgacgctgccaggggattgtgcagtgtcagtgttgtcgccagtgaggtttacccaagatgtgattattgctgattgaaaacttttcccactaccccaccatgatgacttgaaatatagtcaacattggcagtttttgacagtctttatggagactaaactttgttggtaaataaaagttgaaaaaaaaatgactaggtgcagcggctcacatgtctaatcccagcgctttgggaggccgaggtgggagaatcacttgagctcaggagtttgagaccagcctgagcaacatagcaagacttcatctctact

SEQ ID NO: 153424 - DNA, 5296 bp, Homo sapiens
  Payload ID: 10175
  Gene Symbol: MMACHC
  Gene Name: methylmalonic aciduria (cobalamin deficiency) cblC type, with homocystinuria
  Uniprot ID: Q9Y4U1
  ENST ID: ENST00000401061
  CDS Start-End: 281-1129
ggcgatggaggcggtggaactacctttctctagaagagacacgtacatgcacacccccaccgtgtagcttgccgggaaactgagtcttcctgatttcgtgtggctgtctccaaggaggaaacgaactacgcatcccaagatgcatcgcgcataggcaatatggtcccgctactggacccatttcctacctgggaaatggagtcgaagctgactcaaaacgtaacggcccaattgtccttgagacttcattccccagcaagctcagcgtgtaacgtgcgctatggagccgaaagtcgcagagctgaagcagaagatcgaggacacgctatgtccttttggcttcgaggtttaccccttccaggtggcatggtacaatgaactcttgcctccagccttccacctaccgctgccaggacctaccctggccttcctggtactcagcacgcctgccatgtttgaccgggccctcaagcccttcttgcagagctgccacctccgaatgctgactgacccagtggaccagtgtgtggcctaccatctgggccgtgttagagagagcctcccagagctgcagatagaaatcattgctgactacgaggtgcaccccaaccgacgccccaagatcctggcccagacagcagcccatgtagctggggctgcttactactaccaacgacaagatgtggaggctgacccatgggggaaccagcgcatatcaggtgtgtgcatacacccccgatttgggggctggtttgccatccgaggggtagtgctgctgccagggatagaggtgccagatctgccacccagaaaacctcatgactgtgtacctacaagagctgaccgtatcgccctactcgaaggcttcaatttccactggcgtgattggacttaccgggatgctgtgacaccccaggagcgctactcagaagagcagaaggcctacttctccactccacctgcccaacgattggccctattgggcttggctcagccctcagagaagcctagttctccctccccggaccttccctttaccacacccgcccccaagaagcctgggaatcccagcagagcccggagctggctcagccccagggtctcaccacctgcatcccctggcccttgattttctcccatgtggaccctgatttatggtggtacttgctaggacttaattggctttggcaaagcaaaaggttttgagtacaagattactatttttgataatatagtagagatcttccatgaagataacaaggctcaaggaagttaggtttggccaagataaaggccagggaaccagaattcccatctgccttcaaatgagttttttttttttttttagacagagtcttactctgtcacctaggctggagtgcagtggcacagtctctactcactgcaacctctgcctcctgggttcaagcaattatctgcctcagcctcctgagtagctgggatgacaggtgcctgccactacacctggctaattttttgtatttttagtagagatggggtttcatcatattggccaggctggtctttaactcctgacctcgtgatccacccatcttggcctcccaaagtcctgggattacaggaatgagccaccgcacccagccaagactctatctgttcccatttctaagcagttccccaagatgttgttacagggcctaaggggcaaatatcctctaaagagtacctaccagcagggtgtggtggctcccgcctgtaatcccagcactctgggaggccgaggcaggtggatcatgaggtcgagtttgagaccagcctggccaatacagtgaaaccccgtctctactaaaaatgcaaagttagccgggcatggtagcgcaggcctgtagtcccagctactcaggaggctgaggcagtagaatcatttgaaccagggaggcagagattgcagtgagccgagattgcatggctgcactctagcctgggtgacagtgtgagactctgtctcaaaaaaaaaaaaaaaagtacctacctcaggtagggactgaataaacacgtgtaaggcactttggaaaaatacctggcatatatagtaagcagtatgttggccattaccaaaggccctgggaattctgtactgctgctcatgggtgtagtcggttctagaggggtgggcaggtgggagtagctgaggaagacaagtggctggaatggtatcacatgatacacagaagtatcctcagttctgaatctaccttggcctcaagggcccaggagaataacttttcccagctgacagcctctctgaggacaatgacatatgaatgaggatcaaaacgagctttggccaggcactgtggcgctcacctgtaatcccaccattttgggaggctgaggcggaggaccgcctgaggcaaggaattcagaaccactctgggcaacataatgacactaaaaaagactatctctaatcaaggctagaaccaagggaaggctaagaattgcccagtactgtgcaactacgaaagccctacccaaggccaccagccttgtcttcctctttcctctgtcagttcaaaaagaacagaaacctccagctcttttacatagcaggtaccaggcatttatcagaagaggccaagcttctggttcccatgcagccctttgaatagtgtgtctaaacaaaaataggtgtccaagtagtcacactgagactttaactggtaacccagcctgtggcgtcagtcgcagtgctctggccaacactatagcagggcttattcttctccctcatgtgtagtgaaacaaaatgtaacaccttgggttcattcagttccattccctatatctacctgtgtcaatataattccctgatttggaggcagctctcctcattttccccaaaacagggaaagcaaggagtaaattcctcttaaaatcaaaagctaataatatgcttcctaaaataaagactcatcaaggtctcagttcaagtttaatacaaactacaaaagattaatgggttgctctactaatacatcatacaaaccagtagcctgcccacaacgccaactcaggccattcctaccaaaggaagaaaggctggtctctccaccccctgtaggaaaggcctgccttgtaagacaccacaattcggctgaatctgaagtcttgtgttttactaatggaaaaaaaaaatacagaagaggttttgttctcatggctgcccaccgcagcctggcactaaaacagcccagcgctcacttctgcttggagaaatattctttgctcttttggacatcaggcttgatggtatcactgccaggtttccagccagctgggcacactgcaagagaaaggcaccactaattaataaccttctcaatggtatgcaccaccattctcctatggacaaaaccagttctgcacctgaacactcagataccaggaaacctacccctgcaatcagtcttagatcattcacccttttagtatgagctaaccattttacaaacatataatcatcaccacagccttaagatactatcatgcctaatttattcatgtagcacttgaaatttaaattttccacaaaaaaaggcaaagtttaaataatttgccaacactctctaatccttaaggggaaaaaaaagctaaataaacgacacacataggactatgtaaacccttaacactaaactgtttctgacagcccttcagagctctgaagacagcaaactcagtctgccttctcagcattcttctaactctaccaaactggatagcctgaaccttataaaggatcaagaacttaacagaagcccccgcttgtttcattaagtaactgccatctaccccttggtaagcaaaaggcagagtttgaaatttttcatagatttatacagaaagcacagccttcaaccttttcctgacaatgcctaagaatgtgcctcaggctagcctgaagaaaatgaggcaaggggactaatctcttatttttctttttttttttttttttttttttttttgagatggagtctccctctgttgcccaggctggagtacggtggcgcaatctccacctccgtctcactgcaacctcggtctcccgggttcaagcgattctcctgcatcagcctcccaaatagctaggattacaggcgcccaccaccacacctggctaatttttgagacagtctcacattgtcgcccaggctggagtgcagtggcgcgatctcagctcactgcaagctccacctccggggttcatgccattctcctgcctcagcctcccgagtagctgggactatacaaaaatagtggggcgtggtggtggacccctgtagtcctagctactcaggaggctgaggcaagagaatcacttgaacccaggaggtggaggctgcagtgagctgagatcacaccactgcactccagtctgggcgacaaaacaagactctgtctcaaaaaaaaaaagtgtttggcattcattggctcttaaatggtacctatttaagaggctgtacatgttccagtgggatgggaagcagcagagaccaacagagtctgaagaagcaagcttctgagttatgaaagcctgggttcaggagactaacctatatgtaggttcctaggaaagtccagttaaagggcctactttgccactgctgcctccttcttaatgctgaacctcatctcccacaagggggcagtctcagcaggtgtcagctgagccatgtgtcatctgtccaggctaactgcccacacatccttctgcaaagggtacctcttggttatcagtgctcactgatccctatataatcagactctaatccctgtaaaaagattacttggtgctagccaagctagcacctttgggtcttcccaaacatacaccactaatccagactctaataacttcatttcctttaaattacaagatcagagctgaaataggccttagaaagctagtctgggctgggcgcaatggctcaggggaggcggaggttgcagtgagccaagactgcgccactgcactccagcctgggcaacagagcaagactccatcttgcaaaaaataaataaataaataaaaatatgaactatatggattaacctcttctctcaataaagttatttaaaaaatggcatgctttatctctagaggtgattcccaaccattttgttttgccctaatacatctgtgagatcatcctacattcagtaagttagatctttgggagtgactgattctaaatgagcaggacagaagagaggagtatgtatactttgaataaaaagcctttatattctc

SEQ ID NO: 153425 - DNA, 1510 bp, Homo sapiens
  Payload ID: 10175
  Gene Symbol: MMACHC
  Gene Name: methylmalonic aciduria (cobalamin deficiency) cblC type, with homocystinuria
  ENST ID: ENST00000616135
  CDS Start-End: 164-841
gaaagtcgcagagctgaagcagaagatcgaggacacgctatgtccttttggcttcgaggtttaccccttccaggtggcatggtacaatgaactcttgcctccagccttccacctaccgctgccaggacctaccctggccttcctggtactcagcacgcctgccatgtttgaccgggccctcaagcccttcttgcagagctgccacctccgaatgctgactgacccagtggaccagtgtgtggcctaccatctgggccgtgttagagagagcctcccagagctgcagatagaaatcattgctgactacgaggtgcaccccaaccgacgccccaagatcctggcccagacagcagcccatgtagctggggctgcttactactaccaacgacaagatgtggaggctgacccatgggggaaccagcgcatatcaggtgtgtgcatacacccccgatttgggggctggtttgccatccgaggggtagtgctgctgccagggatagaggtgccagatctgccacccagaaaacctcatgactgtgtacctacaagagctgaccgtatcgccctactcgaaggcttcaatttccactggcgtgattggacttaccgggatgctgtgacaccccaggagcgctactcagaagagcagaaggcctacttctccactccacctgcccaacgattggccctattgggcttggctcagccctcagagaagcctagttctccctccccggaccttccctttaccacacccgcccccaagaagcctgggaatcccagcagagcccggagctggctcagccccagggtctcaccacctgcatcccctggcccttgattttctcccatgtggaccctgatttatggtggtacttgctaggacttaattggctttggcaaagcaaaaggttttgagtacaagattactatttttgataatatagtagagatcttccatgaagataacaagactatctctaatcaaggctagaaccaagggaaggctaagaattgcccagtactgtgcaactacgaaagccctacccaaggccaccagccttgtcttcctctttcctctgtcagttcaaaaagaacagaaacctccagctcttttacatagcaggtaccaggcatttatcagaagaggccaagcttctggttcccatgcagccctttgaatagtgtgtctaaacaaaaataggtgtccaagtagtcacactgagactttaactggtaacccagcctgtggcgtcagtcgcagtgctctggccaacactatagcagggcttattcttctccctcatgtgtagtgaaacaaaatgtaacaccttgggttcattcagttccattccctatatctacctgtgtcaatataattccctgatttggaggcagctctcctcattttccccaaaacagggaaagcaaggagtaaattcctcttaaaatcaaaagctaataatatgcttcctaaaataaagactcatcaaggtctcagttcaagttt

SEQ ID NO: 153426 - DNA, 1436 bp, Homo sapiens
  Payload ID: 10176
  Gene Symbol: MMADHC
  Gene Name: methylmalonic aciduria (cobalamin deficiency) cblD type, with homocystinuria
  Uniprot ID: Q9H3L0
  ENST ID: ENST00000303319
  CDS Start-End: 206-1096
gcgcgtgcgcatcatcgtttcgacgcgctcggaagcaacttcctttgcctgctcaccgccagcgtaggtgctaccaccgctgccgtcgccgccgccattttgatggcaggaagagtccggttctgggacagctggagacagtggtggtgactgaaataactttaccaaaggaaagctattttgcgaactatcttctccagcggagatggccaatgtgctttgtaacagagccagactggtttcctatctcccaggattttgctctttagttaaaagggttgtcaatcccaaagccttttcgactgcaggatcatcaggttcggatgagtctcatgtggctgctgcacctccagatatatgctctcgaacagtgtggcctgatgaaactatgggaccctttggacctcaagatcagaggttccagcttcctgggaacataggttttgattgtcacctcaatgggactgcttcacagaagaaaagcctggttcataaaactttgcctgatgttctagcagaacctttatcaagtgaaagacatgagtttgtgatggcacaatatgtgaatgaatttcagggtaatgatgcacctgttgaacaagaaattaacagtgcagaaacttactttgaaagtgccagagtagagtgtgcaatacagacatgtccagaattgctgcgaaaagattttgaatcactgtttccagaagtagctaatggcaaactaatgattctgactgtaacacaaaaaactaagaatgatatgactgtttggagtgaagaagtagaaattgaaagagaagtgctcttagaaaagttcatcaatggtgctaaggaaatttgctatgctcttcgagctgagggttattgggctgactttattgacccatcatctggtttggcattttttggaccatatacaaacaacactctttttgaaactgatgaacgctaccgacatttaggattctctgttgatgaccttggatgctgtaaagtgattcgtcatagtctctggggtacccatgtagttgtagggagtatcttcactaatgcaacaccagacagccatattatgaagaaattaagtggaaattagcagaaatatccattcatttgctgtactatttgtatgtaatatttgggttgatctataaacactgtcagactaaagtttttaaaatatatttatttctaagtatttatttcagcatttatgaatttacaacattggcaagtgatttgggattttaaaattgcaaatgttcatttattcatatcattgaatacacgttgaacacatccacattgtataggatgtggtaattagcttgtaaccagggtatgatctgctattgttatttctcctctttattggaaaaaggcctcagttttaattattttcttcccaaaataaatcacacatttggttacaataa

SEQ ID NO: 153427 - DNA, 1726 bp, Homo sapiens
  Payload ID: 10176
  Gene Symbol: MMADHC
  Gene Name: methylmalonic aciduria (cobalamin deficiency) cblD type, with homocystinuria
  Uniprot ID: Q9H3L0
  ENST ID: ENST00000428879
  CDS Start-End: 506-1396
tcggtattgcccgtattttcactgggtccctgtcgttgtccccagccatcctgtccgtctgtctttagtctcttttctgcttcctcatctttccgatcagcctgaagctttgcttggagctgttgttacgcagccccaacttctgttaaagcagccgcttcgatcctctggactgaattttggccacccagcccccattcccctcccggatctggtccgagttgtttttccgcggctgtaaaccggaagggctctgagctgcactgccggctccgggctgggggatctgtgcctggcatgggggcgagttctggcctccttagggtacggggagagcttggactttggtcctgacgtggtggacgacacaccttcgaagagtggacgttacctcagttgtctgttgttagagtttaatcgatcactcgtctgttttgttgtgttctttcccagaaataactttaccaaaggaaagctattttgcgaactatcttctccagcggagatggccaatgtgctttgtaacagagccagactggtttcctatctcccaggattttgctctttagttaaaagggttgtcaatcccaaagccttttcgactgcaggatcatcaggttcggatgagtctcatgtggctgctgcacctccagatatatgctctcgaacagtgtggcctgatgaaactatgggaccctttggacctcaagatcagaggttccagcttcctgggaacataggttttgattgtcacctcaatgggactgcttcacagaagaaaagcctggttcataaaactttgcctgatgttctagcagaacctttatcaagtgaaagacatgagtttgtgatggcacaatatgtgaatgaatttcagggtaatgatgcacctgttgaacaagaaattaacagtgcagaaacttactttgaaagtgccagagtagagtgtgcaatacagacatgtccagaattgctgcgaaaagattttgaatcactgtttccagaagtagctaatggcaaactaatgattctgactgtaacacaaaaaactaagaatgatatgactgtttggagtgaagaagtagaaattgaaagagaagtgctcttagaaaagttcatcaatggtgctaaggaaatttgctatgctcttcgagctgagggttattgggctgactttattgacccatcatctggtttggcattttttggaccatatacaaacaacactctttttgaaactgatgaacgctaccgacatttaggattctctgttgatgaccttggatgctgtaaagtgattcgtcatagtctctggggtacccatgtagttgtagggagtatcttcactaatgcaacaccagacagccatattatgaagaaattaagtggaaattagcagaaatatccattcatttgctgtactatttgtatgtaatatttgggttgatctataaacactgtcagactaaagtttttaaaatatatttatttctaagtatttatttcagcatttatgaatttacaacattggcaagtgatttgggattttaaaattgcaaatgttcatttattcatatcattgaatacacgttgaacacatccacattgtataggatgtggtaattagcttgtaaccagggtatgatctgctattgttatttctcctctttattggaaaaaggcctcagttttaattattttcttcccaaaataaatcacacatttg

SEQ ID NO: 153428 - DNA, 1462 bp, Homo sapiens
  Payload ID: 10176
  Gene Symbol: MMADHC
  Gene Name: methylmalonic aciduria (cobalamin deficiency) cblD type, with homocystinuria
  ENST ID: ENST00000422782
  CDS Start-End: 168-1160
cttcctttgcctgctcaccgccagcgtaggtgctaccaccgctgccgtcgccgccgccattttgatggcaggaagagtccggttctgggacagctggagacagtggtggtgactgaaataactttaccaaaggaaagctattttgcgaactatcttctccagcggagatggccaatgtgctttgtaacagagccagactggtttcctatctcccaggattttgctctttagttaaaagggttgtcaatcccaaagccttttcgactgcaggatcatcaggttcggatgagtctcatgtggctgctgcacctccagatatatgctctcgaacagtgtggcctgatgaaactatgggaccctttggacctcaagatcagaggttccagcttcctgggaacataggttttgattgtcacctcaatgggactgcttcacagaagaaaagcctggttcataaaactttgcctgatgttctagcagaacctttatcaagtgaaagacatgagtttgtgatggcacaatatgtgaatgaatttcagggtaatgatgcacctgttgaacaagaaattaacagtgcagaaacttactttgaaagtgccagagtagagtgtgcaatacagacatgtccagaattgctgcgaaaagattttgaatcactgtttccagaagtagctaatggcaaactaatgattctgactgtaacacaaaaaactaagaatgatatgactgtttggagtgaagaagtagaaattgaaagagaagtgctcttagaaaagacggagtctctctcgcccaggccggagtgctgtggcatgatctcagctcactgcaatctctgcctcccgggttcaagcaattcttctgcttcagcctcccgattcatcaatggtgctaaggaaatttgctatgctcttcgagctgagggttattgggctgactttattgacccatcatctggtttggcattttttggaccatatacaaacaacactctttttgaaactgatgaacgctaccgacatttaggattctctgttgatgaccttggatgctgtaaagtgattcgtcatagtctctggggtacccatgtagttgtagggagtatcttcactaatgcaacaccagacagccatattatgaagaaattaagtggaaattagcagaaatatccattcatttgctgtactatttgtatgtaatatttgggttgatctataaacactgtcagactaaagtttttaaaatatatttatttctaagtatttatttcagcatttatgaatttacaacattggcaagtgatttgggattttaaaattgcaaatgttcatttattcatatcattgaatacacgttgaacacatccacattgtataggatgtggtaattagcttgtaaccagggtatgatctgctattgttatttctcctctttattggaaaaaggcctcagttttaattat

SEQ ID NO: 153429 - DNA, 835 bp, Homo sapiens
  Payload ID: 10177
  Gene Symbol: MCEE
  Gene Name: methylmalonyl CoA epimerase
  Uniprot ID: Q96PE7
  ENST ID: ENST00000244217
  CDS Start-End: 19-549
ggcgggttgctttccaaaatggcgcgggtgctgaaggctgcagccgcgaatgccgtagggcttttttccagacttcaagctcccattccaacagtaagagcttcttccacatcacagcccttggatcaagtgacaggttctgtgtggaacctgggtcgactcaaccatgtagccatagcagtgccagatttggaaaaggctgcagcattttataagaatattctgggggcccaggtaagtgaagcggtccctcttcctgaacatggagtatctgttgtttttgtcaacctgggaaataccaagatggaactgcttcatccattgggacgtgacagtccaattgcaggttttctgcagaaaaacaaggctggaggaatgcatcacatctgcatcgaggtggataatattaatgcagctgtgatggatttgaaaaaaaagaagatccgcagtctaagtgaagaggtcaaaataggagcacatggaaaaccagtgatttttctccatcctaaagactgtggtggagtccttgtggaactggagcaagcttgatttatatttgcaagcaactaaattaattgacctgaaaaagcctatcaaatactatcaaaatgtactatgacattgagtccttcactgcttccatcatgtaaaagttcacagttaaagactgaattacagaaagattaaaatatatacatatataaatacataaatatgtatattatttagattaacaaacatatttgttaatttgaatttgaagaaaatcttgattactaattacttagggaacattattaaaatcatatagaaataaattattcctcttctacaa

SEQ ID NO: 153430 - DNA, 523 bp, Homo sapiens
  Payload ID: 10177
  Gene Symbol: MCEE
  Gene Name: methylmalonyl CoA epimerase
  ENST ID: ENST00000413592
  CDS Start-End: 1-237
ctgggtcgactcaaccatgtagccatagcagtgccagatttggaaaaggctgcagcattttataagaatattctgggggcccaggtggataatattaatgcagctgtgatggatttgaaaaaaaagaagatccgcagtctaagtgaagaggtcaaaataggagcacatggaaaaccagtgatttttctccatcctaaagactgtggtggagtccttgtggaactggagcaagcttgatttatatttgcaagcaactaaattaattgacctgaaaaagcctatcaaatactatcaaaatgtactatgacattgagtccttcactgcttccatcatgtaaaagttcacagttaaagactgaattacagaaagattaaaatatatacatatataaatacataaatatgtatattatttagattaacaaacatatttgttaatttgaatttgaagaaaatcttgattactaattacttagggaacattattaaaatcatatagaaataaattattcctcttctacaa

SEQ ID NO: 153431 - DNA, 836 bp, Homo sapiens
  Payload ID: 10177
  Gene Symbol: MCEE
  Gene Name: methylmalonyl CoA epimerase
  ENST ID: ENST00000494660
  CDS Start-End: 744-836
gcgggtgctgaaggctgcagccgcgaatgccgtaggtgaataccgggcaccggcgaccttcgccatgggacagggagcgtgggaacggcggtcgggggcggaggaggcctcggcgtggccaaagcaccttgatctaatgtcctcccccgggggcgcgttccacagcagctgctgtcacttaggcagagggtgccttccagaagcgccaccgcttagtagcggggattgccttgtgcatgagtcccatttccatccgagagctgtgcgccttgggctctgcaccttccagtatgtgggcgggagagtcgagggaacttgcccggcaggtcaggcagggcagggacagaagtaaatagaagcggatcggtaagttattttaccgcgcaccaataaagagactggggagaaaccagaaaggagagcacgttccgtaaaaacaacaactactagtcggccgaactccaagcgtgaccagctttctgttgggaacactcaaagggcttttttccagacttcaagctcccattccaacagtaagagcttcttccacatcacagcccttggatcaagtgacaggttctgtgtggaacctgggtcgactcaaccatgtagccatagcagtgccagatttggaaaaggctgcagcattttataagaatattctgggggcccaggtaagtgaagcggtccctcttcctgaacatggagtatctgttgtttttgtcaacctgggaaataccaagatggaactgcttcatccattgggacgtgacagtccaattgcaggttttctgcagaaaaacaaggctggaggaatgcatcacatctgcatcgag

SEQ ID NO: 153432 - DNA, 499 bp, Homo sapiens
  Payload ID: 10177
  Gene Symbol: MCEE
  Gene Name: methylmalonyl CoA epimerase
  ENST ID: ENST00000486135
  CDS Start-End: 407-499
gtggcgggttgctttccaaaatggcgcgggtgctgaaggctgcagccgcgaatgccgtagactggggagaaaccagaaaggagagcacgttccgtaaaaacaacaactactagtcggccgaactccaagcgtgaccagctttctgttgggaacactcaaagggcttttttccagacttcaagctcccattccaacagtaagagcttcttccacatcacagcccttggatcaagtgacaggttctgtgtggaacctgggtcgactcaaccatgtagccatagcagtgccagatttggaaaaggctgcagcattttataagaatattctgggggcccaggtaagtgaagcggtccctcttcctgaacatggagtatctgttgtttttgtcaacctgggaaataccaagatggaactgcttcatccattgggacgtgacagtccaattgcaggttttctgcagaaaaacaaggctggaggaatgcatcacatctgcatcgag

SEQ ID NO: 153433 - DNA, 3749 bp, Homo sapiens
  Payload ID: 10178
  Gene Symbol: MUT
  Gene Name: methylmalonyl CoA mutase
  Uniprot ID: P22033
  ENST ID: ENST00000274813
  CDS Start-End: 129-2381
cctggctgtgtggatgtctgacaggtgaggcgggggacgcagaagtgcagccgccctctcccacagcggagtccaaaacaggcctaccagtcagttcttatttctattgggtgtttccatgctccaccatgttaagagctaagaatcagctttttttactttcacctcattacctgaggcaggtaaaagaatcatcaggctccaggctcatacagcaacgacttctacaccagcaacagccccttcacccagaatgggctgccctggctaaaaagcagctgaaaggcaaaaacccagaagacctaatatggcacaccccggaagggatctctataaaacccttgtattccaagagagatactatggacttacctgaagaacttccaggagtgaagccattcacacgtggaccatatcctaccatgtatacctttaggccctggaccatccgccagtatgctggttttagtactgtggaagaaagcaataagttctataaggacaacattaaggctggtcagcagggattatcagttgcctttgatctggcgacacatcgtggctatgattcagacaaccctcgagttcgtggtgatgttggaatggctggagttgctattgacactgtggaagataccaaaattctttttgatggaattcctttagaaaaaatgtcagtttccatgactatgaatggagcagttattccagttcttgcaaattttatagtaactggagaagaacaaggtgtacctaaagagaagcttactggtaccatccaaaatgatatactaaaggaatttatggttcgaaatacatacatttttcctccagaaccatccatgaaaattattgctgacatatttgaatatacagcaaagcacatgccaaaatttaattcaatttcaattagtggataccatatgcaggaagcaggggctgatgccattctggagctggcctatactttagcagatggattggagtactctagaactggactccaggctggcctgacaattgatgaatttgcaccaaggttgtctttcttctggggaattggaatgaatttctatatggaaatagcaaagatgagagctggtagaagactctgggctcacttaatagagaaaatgtttcagcctaaaaactcaaaatctcttcttctaagagcacactgtcagacatctggatggtcacttactgagcaggatccctacaataatattgtccgtactgcaatagaagcaatggcagcagtatttggagggactcagtctttgcacacaaattcttttgatgaagctttgggtttgccaactgtgaaaagtgctcgaattgccaggaacacacaaatcatcattcaagaagaatctgggattcccaaagtggctgatccttggggaggttcttacatgatggaatgtctcacaaatgatgtttatgatgctgctttaaagctcattaatgaaattgaagaaatgggtggaatggccaaagctgtagctgagggaatacctaaacttcgaattgaagaatgtgctgcccgaagacaagctagaatagattctggttctgaagtaattgttggagtaaataagtaccagttggaaaaagaagacgctgtagaagttctggcaattgataatacttcagtgcgaaacaggcagattgaaaaacttaagaagatcaaatccagcagggatcaagctttggctgaacgttgtcttgctgcactaaccgaatgtgctgctagcggagatggaaatatcctggctcttgcagtggatgcatctcgggcaagatgtacagtgggagaaatcacagatgccctgaaaaaggtatttggtgaacataaagcgaatgatcgaatggtgagtggagcatatcgccaggaatttggagaaagtaaagagataacatctgctatcaagagggttcataaattcatggaacgtgaaggtcgcagacctcgtcttcttgtagcaaaaatgggacaagatggccatgacagaggagcaaaagttattgctacaggatttgctgatcttggttttgatgtggacataggccctcttttccagactcctcgtgaagtggcccagcaggctgtggatgcggatgtgcatgctgtgggcataagcaccctcgctgctggtcataaaaccctagttcctgaactcatcaaagaacttaactcccttggacggccagatattcttgtcatgtgtggaggggtgataccacctcaggattatgaatttctgtttgaagttggtgtttccaatgtatttggtcctgggactcgaattccaaaggctgccgttcaggtgcttgatgatattgagaagtgtttggaaaagaagcagcaatctgtataatatcctctttttgttttagcttttgtctaaaatattattttagttatgatcaaagaagagagtaaagctatgtcttcaatttaatttcaatacctgatttgtactttccttgaaagctttactttaaaataccttacttataggcctggtgtcatgctataagtatgtacatacagtttcacttcaaaaataaaaaaaaaatccctaaaaactctctatactctctataacaatactttatcaagaactctggacaatggtattatttttaaaaatcatggtgatgtatttattagaatgtttcttataaatctgtttactttttatattaagaattaaactgtacctaaaaaaactctgactattcccatttgtcagtttagcattacattgtcttgagcaccagaaaataaaatccatatattaataaaaacctatcttgaaaaactagtggagtgtatttacgtggcaaaagagattttgggaggagtcctcagccaaattctaccagaatcaccttaataaaagaagtattaaaatcaagcacagcaggttggaatatggggaatttgacagtatatttcttcaagtctgagtttactttcttcctgatcatgaccatctgaccttgttatttctgggcttggctcaagaccaaggagagtggatgttgatgaacattcctttaaataaaagtgcttaggttgtagttatggctttgtctagaatggtgatgtcaactgtgagtgtaggtctgtgatatagaaagaattcaactttccagatctagaaagatgctaccttgcatagatttgctccttaaacataaattgcaaaaataaaaatatcacagagaacacctgtactttgcttactgaaagatttgctcactaaagaaggaaagttgccatttacctgtttaacaaatctgcacatcctgcacatgttccccagaatgtaaaataaaaaaagtttaaataaaaaaggaaagttgtcctttattgttaacatgatccattacatgaatataacataaataattatcttttttaataaatttctattgtattagatcagagagcagtcttttggaaagtattatagatacattactgtagaatttacaaactcattgtaatacaatgtatttaattttcagaatatgattatctgaatggtattgtcatgattattgttcccattttcagatgaacactgacttcaagtccaatgatatattcactatgccattttattgacttttccttgtaaagcaatgcacactaatttagtaagtatttggtttctgtgatgtgttcagttgcgtgctgggtgacatgtgaaataaactcatccttgaggaattta

SEQ ID NO: 153434 - DNA, 3030 bp, Homo sapiens
  Payload ID: 10179
  Gene Symbol: MEPCE
  Gene Name: methylphosphate capping enzyme
  Uniprot ID: Q7L2J0
  ENST ID: ENST00000310512
  CDS Start-End: 389-2458
atttaaactcccagagccgttaagttggttcgtagtctgatgcgcgcgcaaccagggtggtggcggagtgcgcatgcgtggttcccgggcgaagggaacgcgcgctcaccgtgcgcgctcgcggccgggtggtagtggcggaggagaaaggggtcggcgcacgcgcggttgagtcctcgagtagttcgggtctcgcgggcctcttgttttggtctcgcgggctagtagggcgcacttggcggggaggcgcttgggcgcgagactaggcgtgaagagcagagctgcgcgcgcactcgggaaaggggggaagggagcagggtccaggcagggggggttaggccccctgatccccctcgttaccccgactggcacggaataaggggaggaaatgatcgagatggcggcggagaaggagccgtttctggtgccggccccgccgccgccgctcaaagatgagtcgggcggagggggcggccccacggtgccaccgcaccaagaggccgcctctggggagctccgcggcgggacggagcgtggtccgggtcgttgcgcgccatctgcggggtccccagccgctgcggtcggtcgggaaagccccggggccgcggccacctcctccagtggtccccaggcgcagcagcaccgagggggcggcccccaggcgcagtcgcatggggaggcccgcctgtcggatcccccggggcgagccgctcccccggacgtgggggaggagcgccggggagggggcgggacagagctgggtccccctgctcctcctcgaccccgcaatggctatcagccccaccggccacctggggggggcgggggcaagaggagaaatagctgtaatgtagggggaggcgggggaggcttcaaacatccggccttcaagaggcgcaggcgggtgaattcggactgtgactctgtgttaccctccaacttcctcctggggggcaatatctttgatcccctgaacctgaatagcctcctggatgaggaagtgagccgcactctcaacgcggagacccctaagtcatccccccttccggccaaagggcgagatccggtggagatcctcatccccaaagatattactgacccgctcagtctcaatacttgcactgatgagggccatgtagttcttgcttcgccactcaagactggtcggaagcggcatagacaccggggacagcaccaccagcagcagcaggcagccggagggagtgagagtcaccccgtgccgcccacagcccctctcacccccttactccacggggagggcgcctcacagcagccgcggcacaggggccagaaccgggatgccccccaaccctatgaactcaacacagccatcaactgcagggatgaagtggtgtctccccttccatctgctctgcagggtccctcaggctccctatcagcccctccagctgcctcagttatctctgcacccccatcttcctcctcccgacatcgcaaacgtcgcaggacttccagcaagtcggaggcaggggctaggggtggaggccagggttccaaggaaaagggccgagggagttggggaggccgccaccaccaccaccacccactgcctgcagcaggcttcaaaaagcaacagcgcaagttccagtatgggaattattgcaaatactatgggtaccgcaatccttcctgtgaggatgggcgccttcgggtgttgaagcctgagtggtttcggggccgggacgtcctagatctgggctgcaatgtgggccatctgaccctgagcattgcctgcaagtggggcccgtcccgcatggtgggcctggatatcgattcccggctcatccattctgcccgccaaaacatccgacactacctttccgaggagctgcgtctcccaccccagactttggaaggggacccgggggcagagggtgaggaagggaccaccaccgttcgaaagaggagctgcttcccagcctcgctgactgccagccggggtcccatcgctgccccccaagtgcccttggatggagcggacacatcagtcttccccaacaatgttgtcttcgtcacgggtaattatgtgctggatcgagatgacctggtggaggcccaaacacctgagtatgatgtggtgctctgcctcagcctcaccaagtgggtgcatctgaactggggagacgagggcctgaagcgcatgtttcgccggatctaccggcacctacgccctgggggcatcctggtcctagagccccaaccctggtcgtcgtatggcaagagaaagactcttacagaaacgatctacaagaactactaccgaatccaattgaagccagagcagttcagttcctacctgacatccccagacgtgggcttctccagctatgagcttgtggccacaccccacaacacctctaaaggcttccagcgtcctgtgtacctgttccacaaggcccgatcccccagccactaagtggccccctaaacagaaagtgtgaagaggctgccctcgctgctcataaggacctgggggaagaggaaagtgtcccaaggtctttcctttctgactccaaaaatagtttcctttcttggatctgcaaagaaagcttttcttccgtcgctgcctcagcctcctccctatgcctctggcacctgcgcagcaaggctggctgtgctggagtcaccatcatcttcctctcccccagcctcccaggctggatggcatggactgtttgctgacctctgttctcttagggcatgggaggtgggaggatatcaaattctctagccctttcctcctattctcccaaggagagagattcccatttctcctcggccattgtacctagctcttgtccctagctgcatttcagtggaccatggatagagggactgagggttagacggggaagactggcagggaggcacgcaggtactgtgaaaatccttccctttgccctcccccagtgggagagggggttgggttttcaatgtgagaacagcacaataaacttgatgtctagggcagtggcccccacacctgtc

SEQ ID NO: 153435 - DNA, 2261 bp, Homo sapiens
  Payload ID: 10179
  Gene Symbol: MEPCE
  Gene Name: methylphosphate capping enzyme
  Uniprot ID: Q7L2J0
  ENST ID: ENST00000414441
  CDS Start-End: 1036-1698
agtgagcgggcgtcgggagtgggcggatgcgttggggttcgggtcgtgggtgttgaggcggagaggaaggcgtggtgtggcgtctccaggtgattgcgattgggggaaggtagaggagccagagaacgactcagccgtttcgggggaagaggaagttggacaacatcggctgttttagtgctttttatttttccccaattcagcagagaatattttcaagggggcctcctggatgaggaagtgagccgcactctcaacgcggagacccctaagtcatccccccttccggccaaagggcgagatccggtggagatcctcatccccaaagatattactgacccgctcagtctcaatacttgcactgatgagggccatgtagttcttgcttcgccactcaagactggtcggaagcggcatagacaccggggacagcaccaccagcagcagcaggcagccggagggagtgagagtcaccccgtgccgcccacagcccctctcacccccttactccacggggagggcgcctcacagcagccgcggcacaggggccagaaccgggatgccccccaaccctatgaactcaacacagccatcaactgcagggatgaagtggtgtctccccttccatctgctctgcagggtccctcaggctccctatcagcccctccagctgcctcagttatctctgcacccccatcttcctcctcccgacatcgcaaacgtcgcaggacttccagcaagtcggaggcaggggctaggggtggaggccagggttccaaggaaaagggccgagggagttggggaggccgccaccaccaccaccacccactgcctgcagcaggcttcaaaaagcaacagcgcaagttccagtatgggaattattgcaaatactatgggtaccgcaatccttcctgtgaggatgggcgccttcgggtgttgaagcctgagtggtttcggggccgggacgtcctagatctgggctgcaatgtgggccatctgaccctgagcattgcctgcaagtggggcccgtcccgcatggtgggcctggatatcgattcccggctcatccattctgcccgccaaaacatccgacactacctttccgaggagctgcgtctcccaccccagactttggaaggggacccgggggcagagggtgaggaagggaccaccaccgttcgaaagaggagctgcttcccagcctcgctgactgccagccggggtcccatcgctgccccccaagtgcccttggatggagcggacacatcagtcttccccaacaatgttgtcttcgtcacgggtaattatgtgctggatcgagatgacctggtggaggcccaaacacctgagtatgatgtggtgctctgcctcagcctcaccaagtgggtgcatctgaactggggagacgagggcctgaagcgcatgtttcgccggatctaccggcacctacgccctgggggcatcctggtcctagagccccaaccctggtcgtcgtatggcaagagaaagactcttacagaaacgatctacaagaactactaccgaatccaattgaagccagagcagttcagttcctacctgacatccccagacgtgggcttctccagctatgagcttgtggccacaccccacaacacctctaaaggcttccagcgtcctgtgtacctgttccacaaggcccgatcccccagccactaagtggccccctaaacagaaagtgtgaagaggctgccctcgctgctcataaggacctgggggaagaggaaagtgtcccaaggtctttcctttctgactccaaaaatagtttcctttcttggatctgcaaagaaagcttttcttccgtcgctgcctcagcctcctccctatgcctctggcacctgcgcagcaaggctggctgtgctggagtcaccatcatcttcctctcccccagcctcccaggctggatggcatggactgtttgctgacctctgttctcttagggcatgggaggtgggaggatatcaaattctctagccctttcctcctattctcccaaggagagagattcccatttctcctcggccattgtacctagctcttgtccctagctgcatttcagtggaccatggatagagggactgagggttagacggggaagactggcagggaggcacgcaggtactgtgaaaatccttccctttgccctcccccagtgggagagggggttgggttttcaatgtgagaacagcacaataaacttgatgtctagggcagtggccccc

SEQ ID NO: 153436 - DNA, 2269 bp, Homo sapiens
  Payload ID: 10180
  Gene Symbol: MSMO1
  Gene Name: methylsterol monooxygenase 1
  Uniprot ID: Q15800
  ENST ID: ENST00000261507
  CDS Start-End: 174-1055
agctctcgcaggccaataacgacaggacgggccgcctggcccacccggctccacccccaagccaggcgaggcaggttccgaggttggaacacctggcgagtcctcggtgtcggtggccggcagtcatctcgcggccgttcagaattataaggctgtctgcagagatttgaaaaatggcaacaaatgaaagtgtcagcatctttagttcagcatccttggctgtggaatatgtagattcacttttacctgagaatcctctgcaagaaccatttaaaaatgcttggaactatatgttgaataattatacaaagttccagattgcaacatggggatcccttatagttcatgaagccctttatttcttattctgtttacctggatttttatttcaatttataccttatatgaaaaaatacaaaattcaaaaggataagccagagacatgggaaaaccaatggaagtgtttcaaagttcttctctttaatcacttctgtatccagctgcctttgatttgtggaacctattattttacagagtatttcaatattccttatgattgggaaagaatgccaagatggtattttcttttggcaagatgctttggttgtgcagtcattgaagatacttggcactattttctgcatagactcttacaccacaaaagaatatacaagtatattcataaagttcatcatgagtttcaggctccatttggaatggaagctgaatatgcacatcctttggagactctaattcttggaactggatttttcattggaatcgtgcttttgtgtgatcatgtaattcttctttgggcatgggtgaccattcgtttattagaaactattgatgtccatagtggttatgatattcctctcaaccctttaaatctgatccctttctatgctggttctcggcatcatgatttccaccacatgaacttcattggaaactatgcttcaacatttacatggtgggatcgaatttttggaacagactctcagtataatgcctataatgaaaagaggaagaagtttgagaaaaagactgaataaatatctcacgtaaaccttcctgaaagataaacgttttcctgaattcagaaactagtagctaacattgcttctggagagcagaaataagcatgtcttctggctactaagtgataaaaagaacattaacaacctttaattaccttcctagtgggaactttttctactttacctacaagttctatatatgtagaaatgaataaatatatatttaagtacagttttcatgaggaagttttaaaagaccatgttcctaagcttccaagaaggttttggatactagaagtattaatctatggcttttctcccagtaaaaccataggcctgaagttcacattgggtctttaaatcttttagatatatactggtcatttcagaaaattcttcatagtggtattggccttatatttaactttttttttattttttttttgagacaaagccacactctgtctccttggctggagtgtggtggcacagtctcagctcactgcaacctctgcctcccagttcaagcaattcttctgcctcagcctcccaagtagctgggattacaggcacccgccaccacgcccagctaatttttgtatttttgtagagatggggtttcacgatgttggccaggctggtctcaaacttctgacctcaagtgatctgcccaccttggcctcccaaagtgctgggattacaggtgtaagccactgcgcccggcctttttaactttaaacatgttttagaattcacctaaagatcaaaatatcatggattgaacctcatcaattgatagcagtgagtgactgaagcttccaaatcaagaaaagccggcaccaagaacttccattctaatctagagctgaccagtttgagctgattctctctttgaagagtccttcttgattgcagtgcagtactggcatttctgaatggatgtaagtggagtattttagtctaaaggcttttcaaattacttgaatttttttaaaaattgaggagctttatttctatttacccttccatttttgtatatcaaatttccattgtcattaaaaactgtatcttgaaactttgtgaactgacttgctgtatttgcactttgagctcttgaaataaatgtgatttttgtgtgattatctggtttccagttttaaacattaactgtcaccttttattcttaaacttgaaagtacagaaatcattaaattattaagttgtacaat

SEQ ID NO: 153437 - DNA, 1789 bp, Homo sapiens
  Payload ID: 10180
  Gene Symbol: MSMO1
  Gene Name: methylsterol monooxygenase 1
  Uniprot ID: Q15800
  ENST ID: ENST00000393766
  CDS Start-End: 218-706
aggcgaggcaggttccgaggttggaacacctggcgagtcctcggtgtcggtggccggcagtcatctcgcggccgttcaggataagccagagacatgggaaaaccaatggaagtgtttcaaagttcttctctttaatcacttctgtatccagctgcctttgatttgtggaacctattattttacagagtatttcaatattccttatgattgggaaagaatgccaagatggtattttcttttggcaagatgctttggttgtgcagtcattgaagatacttggcactattttctgcatagactcttacaccacaaaagaatatacaagtatattcataaagttcatcatgagtttcaggctccatttggaatggaagctgaatatgcacatcctttggagactctaattcttggaactggatttttcattggaatcgtgcttttgtgtgatcatgtaattcttctttgggcatgggtgaccattcgtttattagaaactattgatgtccatagtggttatgatattcctctcaaccctttaaatctgatccctttctatgctggttctcggcatcatgatttccaccacatgaacttcattggaaactatgcttcaacatttacatggtgggatcgaatttttggaacagactctcagtataatgcctataatgaaaagaggaagaagtttgagaaaaagactgaataaatatctcacgtaaaccttcctgaaagataaacgttttcctgaattcagaaactagtagctaacattgcttctggagagcagaaataagcatgtcttctggctactaagtgataaaaagaacattaacaacctttaattaccttcctagtgggaactttttctactttacctacaagttctatatatgtagaaatgaataaatatatatttaagtacagttttcatgaggaagttttaaaagaccatgttcctaagcttccaagaaggttttggatactagaagtattaatctatggcttttctcccagtaaaaccataggcctgaagttcacattgggtctttaaatcttttagatatatactggtcatttcagaaaattcttcatagtggtattggccttatatttaactttttttttattttttttttgagacaaagccacactctgtctccttggctggagtgtggtggcacagtctcagctcactgcaacctctgcctcccagttcaagcaattcttctgcctcagcctcccaagtagctgggattacaggcacccgccaccacgcccagctaatttttgtatttttgtagagatggggtttcacgatgttggccaggctggtctcaaacttctgacctcaagtgatctgcccaccttggcctcccaaagtgctgggattacaggtgtaagccactgcgcccggcctttttaactttaaacatgttttagaattcacctaaagatcaaaatatcatggattgaacctcatcaattgatagcagtgagtgactgaagcttccaaatcaagaaaagccggcaccaagaacttccattctaatctagagctgaccagtttgagctgattctctctttgaagagtccttcttgattgcagtgcagtactggcatttctgaatggatgtaagtggagtattttagtctaaaggcttttcaaattacttgaatttttttaaaaattgaggagctttatttctatttacccttccatttttgtatatcaaatttccattgtcattaaaaactgtatcttgaaactttgtgaactgacttgctgtat

SEQ ID NO: 153438 - DNA, 1026 bp, Homo sapiens
  Payload ID: 10180
  Gene Symbol: MSMO1
  Gene Name: methylsterol monooxygenase 1
  ENST ID: ENST00000504317
  CDS Start-End: 76-765
agtcctcggtgtcggtggccggcagtcatctcgcggccgttcagaattataaggctgtctgcagagatttgaaaaatggcaacaaatgaaagtgtcagcatctttagttcagcatccttggctgtggaatatgtagattcacttttacctgagaatcctctgcaagaaccatttaaaaatgcttggaactatatgttgaataattatacaaagttccagattgcaacatggggatcccttatagttcatgaagccctttatttcttattctgtttacctggatttttatttcaatttataccttatatgaaaaaatacaaaattcaaaaggataagccagagacatgggaaaaccaatggaagtgtttcaaagttcttctctttaatcacttctgtatccagctgcctttgatttgtggaacctattattttacagagtatttcaatattccttatgattgggaaagaatgccaagatggtattttcttttggcaagatgctttggttgtgcagtcattgaagatacttggcactattttctgcatagactcttacaccacaaaagaatatacaagtatattcataaagttcatcatgagtttcaggctccatttggaatggaagctgaatatgcacatcctttggagactctaattcttggaactggatttttcattggaatcgtgcttttgtgtgatcatgtaattcttctttgggcatgggtgaccattcgtttattagaaactattgatgtccataggtgagtattaatttctgttcaggtataaagcataatgaaatatatttattttcatggccataagattatcatatttctaaggagactaataggagaagttaatcttcttaatgttatattaagaaaacataactgttggataaaagtttaaataatagatgtttttacattctagcctatgctgttataatttttatagtgataatgtgttattagggcaagtatatattcaggaccagcaatttccttatccttctgtaataaa

SEQ ID NO: 153439 - DNA, 482 bp, Homo sapiens
  Payload ID: 10180
  Gene Symbol: MSMO1
  Gene Name: methylsterol monooxygenase 1
  ENST ID: ENST00000505270
  CDS Start-End: 228-482
gaaggtgggcctaggctaaggtacgtgctagaaaggatgaaaacggagtgaaattcttaagtgatggaactaggctagggcatgtttcttgccctttaaaatgtgttgtcttcgggagacaggacgtagaagatagttgcagcacagggtgataggctggcgaaagttatacaaaagcaggaaccactagaaggagaattataaggctgtctgcagagatttgaaaaatggcaacaaatgaaagtgtcagcatctttagttcagcatccttggctgtggaatatgtagattcacttttacctgagaatcctctgcaagaaccatttaaaaatgcttggaactatatgttgaataattatacaaagttccagattgcaacatggggatcccttatagttcatgaagccctttatttcttattctgtttacctggatttttatttcaatttataccttatatgaaaaaatacaaaattcaaaag

SEQ ID NO: 153440 - DNA, 973 bp, Homo sapiens
  Payload ID: 10180
  Gene Symbol: MSMO1
  Gene Name: methylsterol monooxygenase 1
  ENST ID: ENST00000507013
  CDS Start-End: 312-973
ccggctccacccccaagccaggcgaggcaggttccgaggttggaacacctggcgagtcctcggtgtcggtggccggcagtcatctcgcggccgttcaggtgagggggttggaggagtggctcatgagcgaggaagggggagcaggcgggctcccacccggtgctccgtgagatcgaggggagcgggttctgggtgcggatgcacgcgctgggcgggacgctggcagtggtacccgagacggggcggaaggagactggagtgaaggtgggcctaggctaagaattataaggctgtctgcagagatttgaaaaatggcaacaaatgaaagtgtcagcatctttagttcagcatccttggctgtggaatatgtagattcacttttacctgagaatcctctgcaagaaccatttaaaaatgcttggaactatatgttgaataattatacaaagttccagattgcaacatggggatcccttatagttcatgaagccctttatttcttattctgtttacctggatttttatttcaatttataccttatatgaaaaaatacaaaattcaaaaggataagccagagacatgggaaaaccaatggaagtgtttcaaagttcttctctttaatcacttctgtatccagctgcctttgatttgtggaacctattattttacagagtatttcaatattccttatgattgggaaagaatgccaagatggtattttcttttggcaagatgctttggttgtgcagtcattgaagatacttggcactattttctgcatagactcttacaccacaaaagaatatacaagtatattcataaagttcatcatgagtttcaggctccatttggaatggaagctgaatatgcacatcctttggagactctaattcttggaactggatttttcattggaatcgtgcttttgtgtgatcatgtaattcttctttgggcatgggtgaccattcgttt

SEQ ID NO: 153441 - DNA, 6122 bp, Homo sapiens
  Payload ID: 10181
  Gene Symbol: MTAP
  Gene Name: methylthioadenosine phosphorylase
  Uniprot ID: Q13126
  ENST ID: ENST00000380172
  CDS Start-End: 207-1058
gatttggggaaggggtggcgggggagatcccacacaagcagccaatccagctgtcccggggaggaagaggaggagtcaaggcccgcccctggtctccgcactgctcactcccgcgcagtgaggttggcacagccaccgctctgtggctcgcttggttcccttagtcccgagcgctcgcccactgcagattcctttcccgtgcagacatggcctctggcaccaccaccaccgccgtgaagattggaataattggtggaacaggcctggatgatccagaaattttagaaggaagaactgaaaaatatgtggatactccatttggcaagccatctgatgccttaattttggggaagataaaaaatgttgattgcgtcctccttgcaaggcatggaaggcagcacaccatcatgccttcaaaggtcaactaccaggcgaacatctgggctttgaaggaagagggctgtacacatgtcatagtgaccacagcttgtggctccttgagggaggagattcagcccggcgatattgtcattattgatcagttcattgacaggaccactatgagacctcagtccttctatgatggaagtcattcttgtgccagaggagtgtgccatattccaatggctgagccgttttgccccaaaacgagagaggttcttatagagactgctaagaagctaggactccggtgccactcaaaggggacaatggtcacaatcgagggacctcgttttagctcccgggcagaaagcttcatgttccgcacctggggggcggatgttatcaacatgaccacagttccagaggtggttcttgctaaggaggctggaatttgttacgcaagtatcgccatggcgacagattatgactgctggaaggagcacgaggaagcagtttcggtggaccgggtcttaaagaccctgaaagaaaacgctaataaagccaaaagcttactgctcactaccatacctcagatagggtccacagaatggtcagaaaccctccataacctgaagaatatggcccagttttctgttttattaccaagacattaaagtagcatggctgcccaggagaaaagaagacattctaattccagtcattttgggaattcctgcttaacttgaaaaaaatatgggaaagacatgcagctttcatgcccttgcctatcaaagagtatgttgtaagaaagacaagacattgtgtgtattagagactcctgaatgatttagacaacttcaaaatacagaagaaaagcaaatgactagtaaacatgtgggaaaaaatattacattttaagggggaaaaaaaaacccaccattctcttctccccctattaaatttgcaacaataaagggtggagggtaatctctactttcctatactgccaaagaatgtgaggaagaaatgggactctttggttatttattgatgcgactgtaaattggtacagtatttctggagggcaatttggtaaaatgcatcaaaagacttaaaaatacggacgtactttgtgctgggaactctacatctagcaatttctctttaaaaccatatcagagatgcatacaaagaattatatataaagaagggtgtttaataatgatagttataataataaataattgaaacaatctgaatcccttgcaattggaggtaaattatgtcttagttataattagattgtgaatcagccaactgaaaatcctttttgcatatttcaatgtcctaaaaagacacggttgctctatatatgaagtgaaaaaaggatatggtagcattttatagtactagttttgctttaaaatgctatgtaaatatacaaaaaaactagaaagaaatatatataaccttgttattgtatttgggggagggatactgggataatttttattttctttgaatctttctgtgtcttcacatttttctacagtgaatttaatcaaatagtaaagttgttgtaaaaataaaagtggatttagaaagatccagttcttgaaaacactgtttctggtaatgaagcagaatttaagttggtaatattaaggtgaatgtcatttaagggagttacatctttattctgctaaagaagaggatcattgatttctgtacagtcagaacagtacttgggtttgcaacagctttctgagaaaagctaggtgtttaatagtttaactgaaagtttaactatttaaaagactaaatgcacattttatggtatctgatattttaaaaagtaatgtttgattctcctttttatgagttaaattattttatacgagttggtaatttttgctttttaataaagtggaagcttgcttttttaactctttttttattgttattttatagaaatgctttttgttggccgggcacagttgctcatccatgtaatcccagcactgtgggaggccgagacgggtggatcacaaggtcaggagatcgagaccatcctggctaatgcgttgaaactccgtctctactaaaaatacaaaaaattagctgggcgtggtggtgggcacctgtagtcccagctactcaggaggctgaggcaggagaatggtgtgaacctgggaggtggagcttgcagtgagcagagcttgcagtgagacgagcttgtgccactgcactccagcctgggcaacagagtaagactcagtctcaaaaaaaaaaaaaagagtgaaatgctttttgtttgcttcagttttttatcatggggagatctttttcctcagaattgttttcttttcactgtaggctattacaggatacttcaggatcaagatacagaaccttttatttaaagagtttgtaaagtcaatgtgtttgtttgtgtctctgagattgacttcaagataataagctgctaattgtaaacaaaacagttaccctccagtattaatatgactcattagtgtgagccatttgggtcaagtatgattatgacccttggacttcctgatgtagtattaaatttcaactctggttatccattagcaatctgtagagaacttaatgaacctgaacccaggcttctctagctctggtaacgtgtgattgttttcactacaatatgatacatagatggtaccttacttttcctcattcttaataggtgtctaagaatgtcagggcaaaagtatgggcatttttcttgctatgttcagaaagtacagttctctccaacttgcagaggtacttttcttgattaaatagccttctctagcaacatcattttcagactaactaaatgaatgcagtatactcttttctttgttctcaatcattcactccttatgcaaagccaatataattttcctcataccttatgcttgaggatattgttgaagaacacttcctggaacacttctcacttgtgatgctgtactaattttttttttttaatttaagctagtatactaagtgaacaccatggtcagttgtgagcattttggtttccgcaaaggatggatggtgagcatcatgggaaagctgtagtttagtgacttagcccttagtgattaatagatttgcatgtacatagaagtctttgttggccttataatctgctgttatatttggcatggattttcatggttttgagaatgacatcctggccctgtggtccccgagggtcatggtccttgtgacctggcccctgttcactgcccccttcgctagcacgagttgctgtgcagggctggaggtagctaccatggcttgtttcaaggaaggaaactctggtacggtggcaccctcaggagtggaggacagtgaacttccttgaagagggagtgactaaggtgacctccaacctgccctgagccagctgccctgcaggtgccacgtgagcctgctctggcatccacaggatgctcctggagcctcttctctggctgctacctcagggcatggttgtggccccaccaacacctattttccaaataattattcattcttgtgacagtggcctgaacatgtttttaattttctcaacaagcatttagccagcacttatccagtgaaacaatttgataaggtttcaaggagtatctgatgggttaggaagtcacgaaatgaggagttcttgccacatttgcagagtccctccttgataaggtttggcggtgtccccacccaaatctcatgttgaattgtagttcccataatccccacatgttgtgggagggacccagtgggaggtaattaaatcatgggggtggttacccccacactgctgttctcatgatactgagttctcacaagtcctgtttgttttataaggggcttttcccccttttgctcaacacttcttcctgccatcatgtgaagaaggacgtgtttgtttccccttctgccacgattgtaagtttcctgaggccttcccagctatgtggaactgtgagttaattaaacctctttcctttataaattacccagtcatgggcagtcctttacagcagcatgagaatggactaatacactcctcaaatgttttgaagattgttgcaccttggaactaccagtgtgcacacaatctggctcaatgtatatattggcccagcaaggcaaagaactgaagttccaggatggaagaacctgtgttctcctcataatagtatagaataattcaagataggcaagaaggacagcagtaaatgaagaccatggaagaaaagaaggaatgccaaagatcgaggaaatctaccaagactagtagggtagtccagaagaagctgtttcagggcctgttgccagctatgcctttgagaacctcgggatcccaaagaatgaggggaatttcttcagaaagacaatctcggcatgcattatttctttgttttgaagattcactcatgttgcatgcatctgtagcttgtgccttttttattgcctagtagtattctgtcatatgcctatcttacaatttgattatctattcacctgttgatgaatgtttgaattttttccatttgaggaattttatgaataaagctgctataagcatgaaattacaagtctttttgtgaacatattttcacttgtgcaaatgcctatactcccaccagtaatttgtaagaattcttgacaaagcttggtattgtcagcgtttttaattttagccattctattgggtatattttgatatctcgtggttttgatttgcatttttctgattaaagatgttgaacttcttttcatgtgcttattggccattcacatatttcgtgaactatctgtacaaatatttttgtttattaaaaaattagattgttttgttttattattgaatagtaagaattgtttatatattctggatacactctttttcagatatgtgtgttgtgactattcttagtctttagcttgccttttcattttcttaattatgtctttcaaagaacaagtttttcattttgacgaagcctagtttatcaattttttttatggttggtgctttttgtgtgttccaagaaatctttgcctactcatttaattacctgtgtgcccttgtcaaaatcatttaattttgactactcacttaattaccttgcctactcatttaattacctgtgtgcccttgtcaaaatttactgtttatctgtgaatctggatgatctatttatgtcatttatctatgtgtctcttcttatgccagtaccccactgtcttgattattgtggctttatggtgtcttgaaattaagtattgttaagctttgcaatcttttccaagattgttttggctataggtcctttctttataaagtttatattaagcttctccatttttctttaagaaaaaatctgctggaatggcactgaatttttaggtcgatttgggaagaattgacaatattgaacctttcaatcgatggacatggtatgtttctgcatttatttgggccttttaaaatttatctcagcaatattttgtagttttagtgaagaagtcttgtatatatcttttgttaaatgtattcctaaatattttgtggaaatgttactgtaaatagtactttaatttcatttttaagtttattgctggtatacagaaatatgttttatttttgtatattgactttatattctgtaatcttattaaattcacttagttca

SEQ ID NO: 153442 - DNA, 2241 bp, Homo sapiens
  Payload ID: 10181
  Gene Symbol: MTAP
  Gene Name: methylthioadenosine phosphorylase
  ENST ID: ENST00000419385
  CDS Start-End: 93-245
gcagtgaggttggcacagccaccgctctgtggctcgcttggttcccttagtcccgagcgctcgcccactgcagattcctttcccgtgcagacatggcctctggcaccaccaccaccgccgtgaagattggaataattggtggaacaggcctggatgatccagaaattttagaaggaagaactgaaaaatatgtggatactccatttggcaaggttaatatccaacttgtggagacatccatctgatgccttaattttggggaagataaaaaatgttgattgcgtcctccttgcaaggcatggaaggcagcacaccatcatgccttcaaaggtcaactaccaggcgaacatctgggctttgaaggaagagggctgtacacatgtcatagtgaccacagcttgtggctccttgagggaggagattcagcccggcgatattgtcattattgatcagttcattgacaggaccactatgagacctcagtccttctatgatggaagtcattcttgtgccagaggagtgtgccatattccaatggctgagccgttttgccccaaaacgagagaggttcttatagagactgctaagaagctaggactccggtgccactcaaaggggacaatggtcacaatcgagggacctcgttttagctcccgggcagaaagcttcatgttccgcacctggggggcggatgttatcaacatgaccacagttccagaggtggttcttgctaaggaggctggaatttgttacgcaagtatcgccatggcgacagattatgactgctggaaggagcacgaggaagcagtttcggtggaccgggtcttaaagaccctgaaagaaaacgctaataaagccaaaagcttactgctcactaccatacctcagatagggtccacagaatggtcagaaaccctccataacctgaagaatatggcccagttttctgttttattaccaagacattaaagtagcatggctgcccaggagaaaagaagacattctaattccagtcattttgggaattcctgcttaacttgaaaaaaatatgggaaagacatgcagctttcatgcccttgcctatcaaagagtatgttgtaagaaagacaagacattgtgtgtattagagactcctgaatgatttagacaacttcaaaatacagaagaaaagcaaatgactagtaaacatgtgggaaaaaatattacattttaagggggaaaaaaaaacccaccattctcttctccccctattaaatttgcaacaataaagggtggagggtaatctctactttcctatactgccaaagaatgtgaggaagaaatgggactctttggttatttattgatgcgactgtaaattggtacagtatttctggagggcaatttggtaaaatgcatcaaaagacttaaaaatacggacgtactttgtgctgggaactctacatctagcaatttctctttaaaaccatatcagagatgcatacaaagaattatatataaagaagggtgtttaataatgatagttataataataaataattgaaacaatctgaatcccttgcaattggaggtaaattatgtcttagttataattagattgtgaatcagccaactgaaaatcctttttgcatatttcaatgtcctaaaaagacacggttgctctatatatgaagtgaaaaaaggatatggtagcattttatagtactagttttgctttaaaatgctatgtaaatatacaaaaaaactagaaagaaatatatataaccttgttattgtatttgggggagggatactgggataatttttattttctttgaatctttctgtgtcttcacatttttctacagtgaatttaatcaaatagtaaagttgttgtaaaaataaaagtggatttagaaagatccagttcttgaaaacactgtttctggtaatgaagcagaatttaagttggtaatattaaggtgaatgtcatttaagggagttacatctttattctgctaaagaagaggatcattgatttctgtacagtcagaacagtacttgggtttgcaacagctttctgagaaaagctaggtgtttaatagtttaactgaaagtttaactatttaaaagactaaatgcacattttatggtatctgatattttaaaaagtaatgtttgattctcctttttatgagttaaattattttatacgagttggtaatttttgctttttaataaagtggaagcttgcttttttaa

SEQ ID NO: 153443 - DNA, 1434 bp, Homo sapiens
  Payload ID: 10181
  Gene Symbol: MTAP
  Gene Name: methylthioadenosine phosphorylase
  ENST ID: ENST00000460874
  CDS Start-End: 226-1128
actgctcactcccgcgcagtgaggttggcacagccaccgctctgtggctcgcttggttcccttagtcccgagcgctcgcccactgcagattcctttcccgtgcagacatggcctctggcaccaccaccaccgccgtgaaggtgagatgagccctcccagccgcagcggttcgccctgccggatgccttctcgcccccgcgccgggggaccgcgcctccgggggccatgcgcccggcccgtgcgtcccttgccgccgcggggagggactggggcgcggcactcgggactcacttgccgcgcgaggagaggattggaataattggtggaacaggcctggatgatccagaaattttagaaggaagaactgaaaaatatgtggatactccatttggcaagccatctgatgccttaattttggggaagataaaaaatgttgattgcgtcctccttgcaaggcatggaaggcagcacaccatcatgccttcaaaggtcaactaccaggcgaacatctgggctttgaaggaagagggctgtacacatgtcatagtgaccacagcttgtggctccttgagggaggagattcagcccggcgatattgtcattattgatcagttcattgacaggaccactatgagacctcagtccttctatgatggaagtcattcttgtgccagaggagtgtgccatattccaatggctgagccgttttgccccaaaacgagagaggttcttatagagactgctaagaagctaggactccggtgccactcaaaggggacaatggtcacaatcgagggacctcgttttagctcccgggcagaaagcttcatgttccgcacctggggggcggatgttatcaacatgaccacagttccagaggtggttcttgctaaggaggctggaatttgttacgcaagtatcgccatggcgacagattatgactgctggaaggagcacgaggaagcagtttcggtggaccgggtcttaaagaccctgaaagaaaacgctaataaagccaaaagcttactgctcactaccatacctcagatagggtccacagaatggtcagaaaccctccataacctgaagaatatggcccagttttctgttttattaccaagacattaaagtagcatggctgcccaggagaaaagaagacattctaattccagtcattttgggaattcctgcttaacttgaaaaaaatatgggaaagacatgcagctttcatgcccttgcctatcaaagagtatgttgtaagaaagacaagacattgtgtgtattagagactcctgaatgatttagacaacttcaaaatacagaagaaaagcaaatgactagtaaacatgtgggaaaaaatattacattttaagggggaaaaaaaaacccaccattctcttctccccctattaaatttgcaacaataaagggtgg

SEQ ID NO: 153444 - DNA, 339 bp, Homo sapiens
  Payload ID: 10181
  Gene Symbol: MTAP
  Gene Name: methylthioadenosine phosphorylase
  ENST ID: ENST00000577563
  CDS Start-End: 1-339
gaaagcttcatgttccgcacctggggggcggatgttatcaacatgaccacagttccagaggtggttcttgctaaggaggctggaatttgttacgcaagtatcgccatggcgacagattatgactgctggaaggagcacgaggaagcaatgatcaagttccagatgatcctcagtgagggataccatcctttcaatattcaagagtcacccttctacagaggactcctagacttcccatcagtgggacatggcagaggtgaaatcctgcccctgtctcccttagacctggctggatactgcttccaacaacccatgcagccaccctgccctgacagctag

SEQ ID NO: 153445 - DNA, 7557 bp, Homo sapiens
  Payload ID: 10181
  Gene Symbol: MTAP
  Gene Name: methylthioadenosine phosphorylase
  Uniprot ID: Q13126
  ENST ID: ENST00000580900
  CDS Start-End: 101-1105
actcccgcgcagtgaggttggcacagccaccgctctgtggctcgcttggttcccttagtcccgagcgctcgcccactgcagattcctttcccgtgcagacatggcctctggcaccaccaccaccgccgtgaagattggaataattggtggaacaggcctggatgatccagaaattttagaaggaagaactgaaaaatatgtggatactccatttggcaagccatctgatgccttaattttggggaagataaaaaatgttgattgcgtcctccttgcaaggcatggaaggcagcacaccatcatgccttcaaaggtcaactaccaggcgaacatctgggctttgaaggaagagggctgtacacatgtcatagtgaccacagcttgtggctccttgagggaggagattcagcccggcgatattgtcattattgatcagttcattgacaggaccactatgagacctcagtccttctatgatggaagtcattcttgtgccagaggagtgtgccatattccaatggctgagccgttttgccccaaaacgagagaggttcttatagagactgctaagaagctaggactccggtgccactcaaaggggacaatggtcacaatcgagggacctcgttttagctcccgggcagaaagcttcatgttccgcacctggggggcggatgttatcaacatgaccacagttccagaggtggttcttgctaaggaggctggaatttgttacgcaagtatcgccatggcgacagattatgactgctggaaggagcacgaggaagcagtttcggtggaccgggtcttaaagaccctgaaagaaaacgctaataaagccaaaagcttactgctcactaccatacctcagatagggtccacagaatggtcagaaaccctccataacctgaagatgatcaagttccagatgatcctcagtgagggataccatcctttcaatattcaagagtcacccttctacagaggactcctagacttcccatcagtgggacatggcagaggtgaaatcctgcccctgtctcccttagacctggctggatactgcttccaacaacccatgcagccaccctgccctgacagctagcaagaggccaagacccacagaacaatcaccatcacacctctgtcagcaggaagcagttacagaagactgaccttcatccagtttcccaaagaattgggtcatggatttttgcgggggaaaatgttagagtaggtaattaggcagacatgagtaagggaggagagaccccctccaactaggaatgtcaggtgagcatcagatgatcatcaggtggttgttaaactctctctctaaaataataataggttgcaactggcagcagggaaagacaatctcccaatagatagaaaagtcctgaagctggtgatcagcagcttcctagtaagatctcaggatttgggcaagcaggctcaaacatgggcactaagaggcaaaatcgtggagtttaactggtatacagacttcctctaaaaacacatgactcatgcacatgtggacagcctgccccaaggaaaaatcaaaagaggagagatgcaaaaccccagaagcatgccaatatataaaaccccaagtctaaggtcaaacagggcacttggatttctcaagttgcccacttggccctcttctaagtgtactttatttcctttcattcctgctctaaaactttttaaatttcactcctgctcaaaaacttgcctcagtctttcactctgccttatgccccttggaagaattatttccttcaagatggcaaaaagcaagctgctgcagacccatacagatttgctgctgctaacaggaggataacttgagcccagaaggttaaggctgcggtgagccttgattatgccactgctctccagcctggcaacagaatgagactctatttttttttcttttaaaaagactttttacaaaaggcaaaatgataatggaactaaaaatgtacgttgactgacttaactccaactgcttcttccctcaattgaaaccacctttgcaaaaattataacagtgagaaaattatggcagtaggggtgatctgatcaagccaaaccccatcttgcctttagccttcaagctgcccataattattcctgggcttaggccaagctaactttgggagacacttggtctatagtttaaatgataatagtccttccttaaaattcaaccacctcagcaaagctgatgagaggccaccaggcaaggaggatagaggagtctaaattctgctaaggtgtagatataaacagtttccagccattattctggaggtcacaaaatgtgcaacttcttcaattactcctgcagataacatcagtattttagaacctaagattggccttttgagatgtcttttcaggtttttttgtgtgtctgactaccgatggctccacctggacccaccaaccactcctgtggccccatccagaagcaactcagcatgcataaggactatttcccacacccctatgattgcacccccaaccaattagcagcaaggacttattgcctaaaacagccccattcatcccccaaaccatccatgaaaaaccctagctttcaaatttccggggaagctgatttgagcaataataaaatacgtctcccatttagccaactctacatgtataaaactctttctctattgcaattcccctgccttgataaatgataaatcagctctatctgggcagcaggcaagaagaacccgttgagtccttacaatatccttctttctaccctcctctgcctaattactctgaatctactaactttttcactcagttatttttccactttgaagacaaaaagttagaaaaaaaaatgccttatgaaattagtccctcagaataaaccagctgggctttctttagccacctgtatgctttagtcaaaatctaagctcagaggcaatagtgaaaggctttcttatcccaaaggaaaactctcagaaatttgctgaagctatccacactgagtgtaggtatagaacatgctttgccctatttattcatgggcaccatcctgaactcagtaatctagcttttttcttttgaagctggatggggaagacacagatctagctgaattagttgccaaaatatgctatctggcataaagattattttgagagagttattttgagactctttgtaagagaaatttatatctacaaaggaagtctccatttataagcttgtctctctgcatcaggaagaaaagaaggactaaatcaccagacactcttaaccaatggagaaggagtttaagtaacaaaccttacctttgtttaaggtgctttttctggctctctgccattaagatctacattttccaccctgtctcctctaggacctgagggttatctctttgatatgcaaatgccagggagattactcaccagaagaagaagaagaaatagagctaattggaaattgagcaaataaaaaaatcttgttttttctcccagaaacagtgaaaagctttagccatcctttagataatcttaacttgttccatctgccagaaacacaatttggattcagaaattctttatgaactgtttttgtattattgtacctggcacatggctacagttttcaaatgaaaactgtgaaatctgcttctgtctgtattttatgtatgtctgtgtatgcatgtatgtgtaatatttttctacctctagagactatcctaaaattaacttataaagagctgtatttaattgccttaaagaaaaagcacttatacaaattaagtattttttaaactttcagaaaaataagacctagcgcaaatgttcttcaagttgatattgttaaaagaagaaacttcagccaaattaaacttaaagaagtttaattgagcaatgaatgattcacaaatcaggcagcctccagagttacagctgattcatggagactccagggatgcctcatggtcagaacaaatttatagacaaaaaaagggaagtgacatacagaaattagaagtgaagtacagaaagagctggactggttacaggttggtgtttgccttatttgaacacagtttgaacactcagcagtgtctaagtggttgaagtatggctactagaattggccaagactcggctattgttacaggaacgtactcctaaattaggttttcaatcttgtctacctgttaagttaggttacagttcatccacaaggactcaaatatagaagtacggagtccttctcaggctatcttcagttctctttaacagtatgatacgggataatcttcagtaaataaaaatttctttaagtttgttggattaactaaagcaggcatgtcttcagagttgtcaacattaaatataatacatacatacagtttttttctaccaggggttactaggcaaataagtttgttattgtaactagatgtttaagattataaaactgtcagtttaatctaagagcaaaagtgaaaatgtggtagctattttattaagtacagcggtaaagcaagtatatattaagtatagcagtaaagcaaaaaaacaaaaaaaaacaagtatttaacttttttttggtttttttttttgagacggagtctctctctgttgcccaggctggaatgcagtggcacaatctcagctcactgcaacctccacctcccgggttcaagcgattctcctacctcagcctcctgagtagctgggattacaggcgtgcaccaccatgcccggctaatttttgtatttttagtagagatggtgtttcaccatgttggtcaggctggtctcgagctcctgacctcatgatctgctcgcctcggcctcccaaagtgctgggattacaggcatgagccaccaagcccggccttaacttttttttaggttcttgcttttgtgatatttggctaacatacatatgctgtaaaaattgttaataggaaaatattaataatgagatgttgactagctttgtctgtctaatgaaatttcataagtcaattaaaattaagaacaattgaattatagaatagaattcaattgaattctattgaatacacttgctgaatacaacaattgaattgtaaatagaatagaaattataaatgaacttttcaatagtaattattttttaatacgggtacttaaaattgtgtcaacttcttaacaaaagaaatggaggcaaaattagtataaacagtttatttgggccaaatttgagaactgcaatgtgggagacacgtcttcaagttgctatgaatataaactccaattagcagcagttacaagcggttttttttttttaaagaaggggcagttctttagttgcatataaactattgattggctatacatttttttttaaccataaattccaggagcatgaacataatgggtgagggtcacatcccctgggcatggatttggggcaggatgtgacaaaaatctcatactcatgtctctctgggcctgataaattttgcatactttatatagttcagactcttctgagctacgtttctttctcttccttttggttgagtttttttttcttctgaaagtattgatgatcaacattttagatgtaagtttgtcccatgtcactggaagacttagttttagttagtctcatcccacattggaggaagagaggagagataaaatggcttaagaatgcagtgaagtctcaaggccaagttgattggcaacacaaagggacagggcaatggtatttcaggtcatctgcttacaaaggagctatggcatgttggatcatttctaagcatctagctatcattattttagtgtttttgttgattttggacatctagaagtgcaaagtataatcaatttgagaataaaagacatgatgcaaataaagacaattactaacaaaagccagatctgaaaaatgtttttatttccgaaggcgaccaaataaatatgttttctacttcttgtgctgatctaaagatcaatgtataggagatctccagtgatgagtttgtccactcaggcagagctgcctttttaaaataaaaattatgaatgcataagtcaatgtatttgaatttaactccacaagtattggttaacaatacagatatggtcgcttccaaggtgtttggagggagttttgtatttgatggcattccacattggaggccatgctatttgatgtcttcatctcctggaaccacactgtattgtttggacatatctatccagacagatgatgataaattttgcatatctcacatagttcagactgctctgggctacttttctttctcaatagcttctcattgttaacttatgcctgtagagttttgctaaactaaattagataatggacatttattaaatatttagatcatttccaaataacataaaatgctgaaacattaattgcttaacataagttaatctacttttggtttttattacaaaggaactaaatatatttacatctgttaaaaaacactttaaactgtactatgagaaagaatatacttctatagaaattataaaatggtatatttatagatttaccattttatggaataccccataaccgttcacaatttcttatttcctagttttcactagaaattgaagttactaagagttaacaattttaactaatatagagtagttaaaaagactaaaaataataagggagataactatatgcaaagaaagtaagacatgtttttggtaaggaaagccataaggtataaggatgtgcttttttttaaggaaaaggaagaataatttggtctagtttggaggttatttaaaggttgtttcagaatgaatgaaagataaaatctaaatggatacaaaaaggaagagagatgacacacacacaaaatgaatgactcttgtatggacaagttggctagaactgaatgtattataaggttttaaaaatgagtcttgaccaagcactgtggctcacgcctgtaatcccagcactttgggaggccaaggcgggcagatcatgaggtcaagagatcaagaccatggtgaaactccatctctactaaaaatacaaaaattagctgggcgtggtggtgcgcacctgtagtcccagctactagggaggctgaggcaggagaatcgcatgaacccaggaggcagaggttgcagtgaactgagatcacaccactgcactccagcctggcgacacagtgagactccatctcaaaaaaaaaaagagtcttaatatcaaaagtaaactgatgcaaaactagaatttggtcttctctgtgaaaatgacagttttctttttaaagagtattgctccagtttttaaaagtgattgtgaaaaattttcctttcccttgtaactaatcggcctacaaaatgaagattttgtgttttctcaaaataattctttgtgcttcgtgttgcctttttttggtctttaattacttaagaaaattgaatcttcccaacaaaagagctagttttgtttgttttgtttttacagttattaaactttctctatttgcctttg

SEQ ID NO: 153446 - DNA, 1309 bp, Homo sapiens
  Payload ID: 10181
  Gene Symbol: MTAP
  Gene Name: methylthioadenosine phosphorylase
  ENST ID: ENST00000580718
  CDS Start-End: 88-816
gaggttggcacagccaccgctctgtggctcgcttggttcccttagtcccgagcgctcgcccactgcagattcctttcccgtgcagacatggcctctggcaccaccaccaccgccgtgaagattggaataattggtggaacaggcctggatgatccagaaattttagaaggaagaactgaaaaatatgtggatactccatttggcaagccatctgatgccttaattttggggaagataaaaaatgttgattgcgtcctccttgcaaggcatggaaggcagcacaccatcatgccttcaaaggtcaactaccaggcgaacatctgggctttgaaggaagagggctgtacacatgtcatagtgaccacagcttgtggctccttgagggaggagattcagcccggcgatattgtcattattgatcagttcattgacaggaccactatgagacctcagtccttctatgatggaagtcattcttgtgccagaggagtgtgccatattccaatggctgagccgttttgccccaaaacgagagaggttcttatagagactgctaagaagctaggactccggtgccactcaaaggggacaatggtcacaatcgagggacctcgttttagctcccgggcagaaagcttcatgttccgcacctggggggcggatgttatcaacatgaccacagttccagaggtggttcttgctaaggaggctggaatttgttacgcaagtatcgccatggcgacagattatgactgctggaaggagcacgaggaagcatgctattgtttctctaggtttcggtggaccgggtcttaaagaccctgaaagaaaacgctaataaagccaaaagcttactgctcactaccatacctcagatagggtccacagaatggtcagaaaccctccataacctgaagaatatggcccagttttctgttttattaccaagacattaaagtagcatggctgcccaggagaaaagaagacattctaattccagtcattttgggaattcctgcttaacttgaaaaaaatatgggaaagacatgcagctttcatgcccttgcctatcaaagagtatgttgtaagaaagacaagacattgtgtgtattagagactcctgaatgatttagacaacttcaaaatacagaagaaaagcaaatgactagtaaacatgtgggaaaaaatattacattttaagggggaaaaaaaaacccaccattctcttctccccctattaaatttgcaacaataaagggtggagggtaatctctactttcctatactgccaaagaatgtgaggaagaaa

SEQ ID NO: 153447 - DNA, 1735 bp, Homo sapiens
  Payload ID: 10182
  Gene Symbol: MRI1
  Gene Name: methylthioribose-1-phosphate isomerase 1
  Uniprot ID: Q9BV20
  ENST ID: ENST00000040663
  CDS Start-End: 41-1150
ctagctccctctgagttgcgctgggcttggctgctgcaccatgaccctggaggcgatccgctactcgcggggctccctgcagatcctagaccagctgctgctgcccaagcagagccgctacgaggcggtgggctcggtgcaccaggcctgggaggccatccgcgccatgaaggtgcggggcgccccggccatagccctggtgggctgtctcagcctcgccgtggagctgcaggcgggcgccgggggaccgggactcgccgcgctcgtggccttcgtgcgcgacaagctgagcttcctcgtcaccgcccggcccaccgctgtcaacatggcccgcgccgcccgcgacctggctgatgttgcagcccgggaggccgaacgggagggcgctacggaagaggcggtccgggagagagtgatctgctgcaccgaggacatgctggagaaagacctcagagacaaccgaagcattggggacctaggagcccgccacctcctggagcgggtggcccccagcggtggcaaggtgactgtgctgacccactgtaacactggtgctctggccaccgctggctatggtacagccctaggtgtgattcgctcactgcacagcctgggccgcctggagcatgccttctgcacagagacccggccctacaaccagggagcccggctgacggcctttgagctggtctatgagcagatccccgccacccttatcaccgacagcatggtggctgctgccatggcccataggggcgtgtcagctgtggtcgtgggagctgaccgcgtggttgccaacggcgacacagccaacaaggtgggcacctaccagctggccattgtcgccaagcaccatggcattcccttctacgtggctgcccccagctcttcatgtgacctccgtctggagaccggcaaggagatcattattgaagagcgaccgggccaggagctgaccgatgttaatggggtccggattgcagcacctgggattggagtttggaatcctgccttcgatgtcaccccccacgacctcatcactggtggcatcatcacagaactgggggtctttgcccctgaggagctccggacagccctaaccaccaccatctcttccagggatggaaccctagatggaccccagatgtaaccaactcagctctccctagcctgcctctctaggtttttcaatacatttcttgaatggctacccaaaagctgaccgtccagcccctgaccacacttgttcctagtgcagggagctcagacagggccttccatctagagcccagcacctagagccaggctgcccagattcaaatcctgactccgccacttttcccactgtatgatcttgggcaagtcacttcacctctctgtgccttggtttcctcatttataaaatgtggataacaggccgggcgcagtggctcacacctgtaatcccagcactttgggaggccgaggcaggtggatcacaagatcaggagattgagaccatcctggctaacatggtgaaaccccatctctactaaaaatacaaaaaattagccgggtgtggtggtgggcacctgcagtcccagctacttgggaggctgaggcaggagaatggcgtgaaactgggaggcagagcttgcagtgagccgagatagcgccactgcactccagcctgggcaacagagcgagactccgtctcaaaaataaatataattaattaattatttaattaaaaaaa

SEQ ID NO: 153448 - DNA, 3027 bp, Homo sapiens
  Payload ID: 10182
  Gene Symbol: MRI1
  Gene Name: methylthioribose-1-phosphate isomerase 1
  Uniprot ID: Q9BV20
  ENST ID: ENST00000319545
  CDS Start-End: 58-1026
caagtgcgcgcggacccctagctccctctgagttgcgctgggcttggctgctgcaccatgaccctggaggcgatccgctactcgcggggctccctgcagatcctagaccagctgctgctgcccaagcagagccgctacgaggcggtgggctcggtgcaccaggcctgggaggccatccgcgccatgaaggtgcggggcgccccggccatagccctggtgggctgtctcagcctcgccgtggagctgcaggcgggcgccgggggaccgggactcgccgcgctcgtggccttcgtgcgcgacaagctgagcttcctcgtcaccgcccggcccaccgctgtcaacatggcccgcgccgcccgcgacctggctgatgttgcagcccgggaggccgaacgggagggcgctacggaagaggcggtccgggagagacgtgaaacggagctatgcgagcattgggaagagcataccaggcagagggaactgccactgcgagggcccctgggcgggactgtgctcgagacccggccctacaaccagggagcccggctgacggcctttgagctggtctatgagcagatccccgccacccttatcaccgacagcatggtggctgctgccatggcccataggggcgtgtcagctgtggtcgtgggagctgaccgcgtggttgccaacggcgacacagccaacaaggtgggcacctaccagctggccattgtcgccaagcaccatggcattcccttctacgtggctgcccccagctcttcatgtgacctccgtctggagaccggcaaggagatcattattgaagagcgaccgggccaggagctgaccgatgttaatggggtccggattgcagcacctgggattggagtttggaatcctgccttcgatgtcaccccccacgacctcatcactggtggcatcatcacagaactgggggtctttgcccctgaggagctccggacagccctaaccaccaccatctcttccagggatggaaccctagatggaccccagatgtaaccaactcagctctccctagcctgcctctctaggtttttcaatacatttcttgaatggctacccaaaagctgaccgtccagcccctgaccacacttgttcctagtgcagggagctcagacagggccttccatctagagcccagcacctagagccaggctgcccagattcaaatcctgactccgccacttttcccactgtatgatcttgggcaagtcacttcacctctctgtgccttggtttcctcatttataaaatgtggataacaggccgggcgcagtggctcacacctgtaatcccagcactttgggaggccgaggcaggtggatcacaagatcaggagattgagaccatcctggctaacatggtgaaaccccatctctactaaaaatacaaaaaattagccgggtgtggtggtgggcacctgcagtcccagctacttgggaggctgaggcaggagaatggcgtgaaactgggaggcagagcttgcagtgagccgagatagcgccactgcactccagcctgggcaacagagcgagactccgtctcaaaaataaatataattaattaattatttaattaaaaaaataaaaaataaatgtggataatactagtacctccctcttaaggtcagggctggagctagggtgacatctccagggcagaattttaagaggacaccaaaaaagctcagcaaccaagataaaaaatattttaaagcaatattttgttttgggttttttttttttgagatcaagtatcactcgttacccaggctggaatgtagaggcgagatctcagctcactgaaacctgtgcctccccggttcaagcgattctcctgccacagcctcctgagtagctgggattacaggcatgcgccaccatgcccagctaatttttctatttttagtagagacatgatttcaccatgttggccaggctggtctcgaactcctgactcaaatgatccccctgcctcagcctcccaaagtgctgggactacaggcatgagccactgtgcctgaccttacagcagtattttttaaaaatcaaaattaatgcaaaaatccatgatgaggccaggcttggtggctcatgcctgtaattccagcactttgggaggatcccttgagcccaggtgtttgagaccagtttgggtaacataggaagagcttgtctctacaaacaaaaatttaaaaacaatgagctgggcatggaactcacacctctagccccagctactcaggctgaagtgggaggatggcttgagcccaggagttcaaggatgcagtgtgctttgattgcactactgcacttcaccctaagcaacagagtgagaccccatctctttaaaaaaaaaaaaaaatccatgatgaacaaaacaagtatttgtttgagacggggtctcgctctgtcgcccaggctggagtacagtggtgccatctcagctcactgcaacctccgccttctgggttcaagcgactctcctgcctcagcctcccgagtagctgggattacaggagcctggcactatgcctggctaatttttgtatttttattggagacaccatgttagtcgtggctggtctccaactcctgacctcgggtgatccgcgccccgcggcctccgaaagtgctgggattacaagcgtgagccaccgtgcccggcctaaataaaattttgaagaggctagaaccccgcacttgtgccttgagcttactgacctcaacaccctggttccactaaaactttatttacaaaattatgctgccggtctgcaggatgtagtttaacaatttgattattttggatattaaaatattttttaagtcttgaaaatattgtttactattaccaaagtttttgaaccttcttaaattctgtaccagaggtgagtgccacaccctaacctagtctgagtttttatgtgtaaagatcataaaacgttgtaagttttctaaaacacataagctctcaataaacgttagcttatcattgtca

SEQ ID NO: 153449 - DNA, 1096 bp, Homo sapiens
  Payload ID: 10183
  Gene Symbol: METTL1
  Gene Name: methyltransferase like 1
  Uniprot ID: Q9UBP6
  ENST ID: ENST00000257848
  CDS Start-End: 37-504
cacgtggatttggtagagaaaccccggactgggatcatggcagccgagactcggaacgtggccggagcagaggccccaccgccccagaagcgctactaccggcaacgtgctcactccaaccccatggcggaccacacgctgcgctaccctgtgaagccagaggagatggactggtctgagctatacccagagttcttcgctccactcactcaaaatcagagccacgatgacccaaaggataagaaagaaaagagagctcaggcccaagtggagtttgcagacataggctgtggctatggtggcctgttagctgacaaagatgttcttcctcttccccgacccacatttcaagcggacaaagcacaagtggcgaatcatcagtcccaccctgctagcagaatatgcctacgtgctaagagttggggggctggtgtataccataaccgatgtgctggagctacacgactggatgtgcactcatttcgaagagcacccactgtttgagcgtgtgcctctggaggacctgagtgaagaccccgttgtgggacatctaggcacctcaactgaggaggggaagaaagttctacgtaatggagggaagaatttcccagccatcttccgaagaatacaagatcccgtcctccaggcagtgacctcccaaaccagcctgcctggtcactgactgcttactctaccttagctggacctcgtctcccagggattagagaaaagagcaggagtcctgggtcttcccagttgagactgctggagctgagacacagtactctcttaaagaaggtggggagctgcccagggcagaacccactggtgttcatgactacccctggctcctctcaccttgtccctccactgccaacagaaaacaaagcagctgactgagatggtcaaaggactttggaccataggggatctttggaaggctgtggggtcttgctcttccttagcactcctttctccttgtgagatctctcctcagctggaatgaggaatgtagtccatctaaactgcttgctaggctcaattaccacttctgtttgctttgtggatcctgggataacatgtatatgtgtacaca

SEQ ID NO: 153450 - DNA, 2066 bp, Homo sapiens
  Payload ID: 10183
  Gene Symbol: METTL1
  Gene Name: methyltransferase like 1
  Uniprot ID: Q9UBP6
  ENST ID: ENST00000324871
  CDS Start-End: 711-1541
aaagagcccgacctcccgcgggaacaccgattccgactcagattcgggatctgggccggggtccgccatccggcccgccaagggagtgcctgggcaccgcggccggcgctcagatcccggatccggagcggggtagaggctgggggccgcgagccgtcgtggtgtccctgtggaacgagccccgcctccctgagtttgccctccttcctccagttcgatttcctggaggtggaatgaggagctgcccctcccgccccggccccgagcgcacactcgacgaaacccacacgggaccacaagagtcagaccgggcggactggtccgagaccaggagtaaggggacaggagcgaggactgatgccactgtagaaggcgaggtctctagacccctctcacctgtggggtgcacaggtgcctgcaaccaggatggtaacccagaccaggcagaagcaagctaagagaaaacgttgggtccctgggcctggcctcgccctcccagttggaggctaacggtgcggaggttccctccagcactcgctccttacagccctccccacctagcccagcccagcccagcccagcccagctgaatttgctcttgggtctttaaggggcgggaactgccaccaacgcgcatggctgcgtcattaacttgcgcctctggcctgcgcctccacgtggatttggtagagaaaccccggactgggatcatggcagccgagactcggaacgtggccggagcagaggccccaccgccccagaagcgctactaccggcaacgtgctcactccaaccccatggcggaccacacgctgcgctaccctgtgaagccagaggagatggactggtctgagctatacccagagttcttcgctccactcactcaaaatcagagccacgatgacccaaaggataagaaagaaaagagagctcaggcccaagtggagtttgcagacataggctgtggctatggtggcctgttagtggaactgtcaccgctgttcccagacacacttattctgggtctggagatccgggtgaaggtctcagactatgtacaagaccggattcgggccctacgcgcagctcctgcaggtggcttccagaacatcgcctgtctccgtagcaatgccatgaagcaccttcctaacttcttctacaagggccagctgacaaagatgttcttcctcttccccgacccacatttcaagcggacaaagcacaagtggcgaatcatcagtcccaccctgctagcagaatatgcctacgtgctaagagttggggggctggtgtataccataaccgatgtgctggagctacacgactggatgtgcactcatttcgaagagcacccactgtttgagcgtgtgcctctggaggacctgagtgaagaccccgttgtgggacatctaggcacctcaactgaggaggggaagaaagttctacgtaatggagggaagaatttcccagccatcttccgaagaatacaagatcccgtcctccaggcagtgacctcccaaaccagcctgcctggtcactgactgcttactctaccttagctggacctcgtctcccagggattagagaaaagagcaggagtcctgggtcttcccagttgagactgctggagctgagacacagtactctcttaaagaaggtggggagctgcccagggcagaacccactggtgttcatgactacccctggctcctctcaccttgtccctccactgccaacagaaaacaaagcagctgactgagatggtcaaaggactttggaccataggggatctttggaaggctgtggggtcttgctcttccttagcactcctttctccttgtgagatctctcctcagctggaatgaggaatgtagtccatctaaactgcttgctaggctcaattaccacttctgtttgctttgtggatcctgggataacatgtatatgtgtacacatgcctattctgccatttctcaggaaagggtggagtatgtatcatatgccttctaccatcctcctgtcctctccctgcgtaagacttgacctggggaatctgtgttccctaa

SEQ ID NO: 153451 - DNA, 726 bp, Homo sapiens
  Payload ID: 10183
  Gene Symbol: METTL1
  Gene Name: methyltransferase like 1
  ENST ID: ENST00000547653
  CDS Start-End: 1-190
ccccgacccacatttcaagcggacaaagcacaagtggcgaatcatcagtcccaccctgctagcagaatatgcctacgtgctaagagttgggggtgattttgcctatgcaggggctggtgtataccataaccgatgtgctggagctacacgactggatgtgcactcatttcgaagagcacccactgtttgagcgtgtgcctctggaggacctgagtgaagaccccgttgtgggacatctaggcacctcaactgaggaggggaagaaagttctacgtaatggagggaagaatttcccagccatcttccgaagaatacaagatcccgtcctccaggcagtgacctcccaaaccagcctgcctggtcactgactgcttactctaccttagctggacctcgtctcccagggattagagaaaagagcaggagtcctgggtcttcccagttgagactgctggagctgagacacagtactctcttaaagaaggtggggagctgcccagggcagaacccactggtgttcatgactacccctggctcctctcaccttgtccctccactgccaacagaaaacaaagcagctgactgagatggtcaaaggactttggaccataggggatctttggaaggctgtggggtcttgctcttccttagcactcctttctccttgtgagatctctcctcagctggaatgaggaatgtagtccatctaaactgcttgctaggctc

SEQ ID NO: 153452 - DNA, 503 bp, Homo sapiens
  Payload ID: 10183
  Gene Symbol: METTL1
  Gene Name: methyltransferase like 1
  ENST ID: ENST00000551117
  CDS Start-End: 1-245
ccgagactcggaacgtggccggagcagaggccccaccgccccagaagcgctactaccggcaacgtgctcactccaaccccatggcggaccacacgctgcgctatggaactgtcaccgctgttcccagacacacttattctgggtctggagatccgggtgaaggtctcagactatgtacaagaccggattcgggccctacgcgcagctcctgcaggtggcttccagaacatcgcctgtctccgtagcaatgccatgaagcaccttcctaacttcttctacaagggccagctgacaaagatgttcttcctcttccccgacccacatttcaagcggacaaagcacaagtggcgaatcatcagtcccaccctgctagcagaatatgcctacgtgctaagagttggggggctggtgtataccataaccgatgtgctggagctacacgactggatgtgcactcatttcgaagagcacccactgtttgagcgtgtgcctctggaggacct

SEQ ID NO: 153453 - DNA, 717 bp, Homo sapiens
  Payload ID: 10183
  Gene Symbol: METTL1
  Gene Name: methyltransferase like 1
  ENST ID: ENST00000553125
  CDS Start-End: 34-144
gtggatttggtagagaaaccccggactgggatcatggcagccgagactcggaacgtggccggagcagaggccccaccgccccagaagcgctactaccggcaacgtgctcactccaaccccatggcggaccacacgctgcgctaagcacaaacacaaagtaggatcccagtgcattaggcagccagtctcgggagaaggggaacttgtgccccagaaagggcagttacccggccagggtcacatcaaccgccagaagtggagttgggcagccctgtgaagccagaggagatggactggtctgagctatacccagagttcttcgctccactcactcaaaatcagagccacgatgacccaaaggataagaaagaaaagagagctcaggcccaagtggagtttgcagacataggctgtggctatggtggcctgttagtggaactgtcaccgctgttcccagacacacttattctgggtctggagatccgggtgaaggtctcagactatgtacaagaccggattcgggccctacgcgcagctcctgcaggtggcttccagaacatcgcctgtctccgtagcaatgccatgaagcaccttcctaacttcttctacaagggccagctgacaaagatgttcttcctcttccccgacccacatttcaagcggacaaagcacaagtggcgaatcatcagtcccaccctgctagcagaatatgcctac

SEQ ID NO: 153454 - DNA, 371 bp, Homo sapiens
  Payload ID: 10183
  Gene Symbol: METTL1
  Gene Name: methyltransferase like 1
  ENST ID: ENST00000548504
  CDS Start-End: 1-371
cctacgcgcagctcctgcaggtggcttccagaacatcgcctgtctccgtagcaatgccatgaagcaccttcctaacttcttctacaagggccagcggacaaagcacaagtggcgaatcatcagtcccaccctgctagcagaatatgcctacgtgctaagagttggggggctggtgtataccataaccgatgtgctggagctacacgactggatgtgcactcatttcgaagagcacccactgtttgagcgtgtgcctctggaggacctgagtgaagaccccgttgtgggacatctaggcacctcaactgaggaggggaagaaagttctacgtaatggagggaagaatttcccagccatcttccgaagaatac

SEQ ID NO: 153455 - DNA, 1462 bp, Homo sapiens
  Payload ID: 10184
  Gene Symbol: METTL10
  Gene Name: methyltransferase like 10
  Uniprot ID: Q5JPI9
  ENST ID: ENST00000368836
  CDS Start-End: 38-913
atggcggccccaacggccgtccaggacgtggagcgaaatgagctcgggcgctgacggcggcggtggcgctgcggtggcggcgcggtcggacaagggcagtcccggggaggacggtttcgtcccgtcggcgctggggacccgcgagcattgggatgctgtctatgagagagaactgcaaactttccgagaatatggagatacaggtgaaatctggtttggagaagagagtatgaatcgactaataaggtggatgcagaaacacaagattccactggatgcttcagtgcttgatattggaactggaaatggtgttttcctggttgaacttgcaaaatttggtttctctaatattactggaattgattactctccttctgcaattcagctttctggaagtattatagaaaaagaaggtttatctaacattaagttaaaggtagaagactttttgaatctctccacacagctgtctggatttcatatttgtattgacaaagggacttttgatgccataagccttaatcctgacaatgcaattgagaagaggaagcaatatgtgaaatctctctccagggtgttgaaagtaaaaggcttttttctaataacgtcatgtaattggaccaaggaagagttgctaaatgaattcagtgaaggttggagtacagtggcaggattttggctcactgcagccttgacttcctgggctcaagcgatcttttccacttcagcctcccgagtaggtggaactacaggcacacatcatcatgcctggataatttttgtatttttagcagagacgaggttttgccatgttgtccaggctggtctggaactcctgggctcaagtgattctcccacctggcctcccaaagtgctgggattataccatgccaggccctcgttggcattttagatttgaacttctcgaagagctaccaacacccaagttcagctttggaggcagatctggaaacagtgtagcagcattggttttccaaaaaatgtgagactttttcttggacgaattcaggtagctacacagaatctacacagcaaagttaacctgacacagaaaatccttgtgcaaataaatgcttagtaagtacacaggatgcacatgttgaatagagtatactggattggtgaaagaaaataataataatgagcatctaagtggttgggttttagagatcaatcaagaataattttaattttcttttgtatttgaaatgtaaatagttttcttttcgattaaaaaaatttcctataactgctaaacagttaaaaactttaaagtagtaaatgagtttatagaaagcatgtattcttgatttttgtgccttggtaaagttgataactatttatgaatatttgaccaaattattccagcatcagaataataagcaaaataactttgttagtgttttgttagactgtttatgaaatataacaagaaatacta

SEQ ID NO: 153456 - DNA, 1013 bp, Homo sapiens
  Payload ID: 10184
  Gene Symbol: METTL10
  Gene Name: methyltransferase like 10
  ENST ID: ENST00000464099
  CDS Start-End: 36-350
ggcggccccaacggccgtccaggacgtggagcgaaatgagctcgggcgctgacggcggcggtggcgctgcggtggcggcgcggtcggacaagggcagtcccggggaggacggtttcgtcccgtcggcgctggggacccgcgagcattgggatgctgtctatgagagagaactgcaaactttccgagaatatggagatacaggtgaaatctggtttggagaagagagtatgaatcgactaataaggtggatgcagaaacacaagattccactggatgcttcagtgcttgatattggaactggaaatggtgttttcctggttgaacttgttggcaaaatttggtttctctaatattactggaattgattactctccttctgcaattcagctttctggaagtattatagaaaaagaaggtttatctaacattaagttaaaggtagaagactttttgaatctctccacacagctgtctggatttcatatttgtattgacaaagggacttttgatgccataagccttaatcctgacaatgcaattgagaagaggaagcaatatgtgaaatctctctccagggtgttgaaagtaaaaggcttttttctaataacgtcatgtaattggaccaaggaagagttgctaaatgaattcagtgaaggatttgaacttctcgaagagctaccaacacccaagttcagctttggaggcagatctggaaacagtgtagcagcattggttttccaaaaaatgtgagactttttcttggacgaattcaggtagctacacagaatctacacagcaaagttaacctgacacagaaaatccttgtgcaaataaatgcttagtaagtacacaggatgcacatgttgaatagagtatactggattggtgaaagaaaataataataatgagcatctaagtggttgggttttagagatcaatcaagaataattttaattttcttttgtatttgaaatgtaaatagttttcttttcgattaaaaaaatttcctataa

SEQ ID NO: 153457 - DNA, 3587 bp, Homo sapiens
  Payload ID: 10184
  Gene Symbol: METTL10
  Gene Name: methyltransferase like 10
  ENST ID: ENST00000466270
  CDS Start-End: 36-350
ggcggccccaacggccgtccaggacgtggagcgaaatgagctcgggcgctgacggcggcggtggcgctgcggtggcggcgcggtcggacaagggcagtcccggggaggacggtttcgtcccgtcggcgctggggacccgcgagcattgggatgctgtctatgagagagaactgcaaactttccgagaatatggagatacaggtgaaatctggtttggagaagagagtatgaatcgactaataaggtggatgcagaaacacaagattccactggatgcttcagtgcttgatattggaactggaaatggtgttttcctggttgaacttgttggcaaaatttggtttctctaatattactggaattgattactctccttctgcaattcagctttctggaagtattatagaaaaagaaggtttatctaacattaagttaaaggtagaagactttttgaatctctccacacagctgtctggatttcatatttgtattgacaaagggacttttgatgccataagccttaatcctgacaatgcaattgagaagaggaagcaatatgtgaaatctctctccagggtgttgaaagtaaaaggcttttttctaataacgtcatgtaattggaccaaggaagagttgctaaatgaattcagtgaaggttggagtacagtggcaggattttggctcactgcagccttgacttcctgggctcaagcgatcttttccacttcagcctcccgagtaggtggaactacaggcacacatcatcatgcctggataatttttgtatttttagcagagacgaggttttgccatgttgtccaggctggtctggaactcctgggctcaagtgattctcccacctggcctcccaaagtgctgggattataccatgccaggccctcgttggcattttagatttgaacttctcgaagagctaccaacacccaagttcagctttggaggcagatctggaaacagtgtagcagcattggttttccaaaaaatgtgagactttttcttggacgaattcaggtagctacacagaatctacacagcaaagttaacctgacacagaaaatccttgtgcaaataaatgcttagtaagtacacaggatgcacatgttgaatagagtatactggattggtgaaagaaaataataataatgagcatctaagtggttgggttttagagatcaatcaagaataattttaattttcttttgtatttgaaatgtaaatagttttcttttcgattaaaaaaatttcctataactgctaaacagttaaaaactttaaagtagtaaatgagtttatagaaagcatgtattcttgatttttgtgccttggtaaagttgataactatttatgaatatttgaccaaattattccagcatcagaataataagcaaaataactttgttagtgttttgttagactgtttatgaaatataacaagaaatactattttgtgttggatggcggttatttttaaacttaattaatacctgtgaaaaggcctcttacctttatgtatataattaaacaaaatcagagaaatgtatcagttgctcaagttatcaagcctgcattttgcagctatggtcttctacacactgtaagggtagtagaaggaaagagaactaaggaatgttattatttgctagcgctatgttaagttgtcttattaagtaattgagtcctttcaatgtcttcttgaggtatgtattgcttgttcttgtttctacgtataaggaaaatgaagctgagagaagtgaagtcacttttatgaggttcaacagtacaggatggagccaggatttttatctgggtctgtctgactttaaaacacatactcttctcctagcatattctgcctcacaggtgcttagtctttgcctttgtagcatttacagtacagctggagacccatgatgattacatataaagttcagttagaaaagatgggtagttactttattagtgttcatctgtggagtatcagaatagcagtcagccaactctgtctcatatcatccttcattacttttccccatctccctactcaaagacttgcctctattaagaattttgtcattcttctgtgaaagggtagtgtaagttatataagccctcagcgatacatgcacaaagatgttctagttaggggctaatttggcaagagaaacagtttattaatgtttttgaaaagataagtcatattcatacttaataccattttgtatttgtggtaatattttaatattggagctaaatacaaatttttgcataattttttgatgattttcagctttgtgggcctattgggttacataagtgactttttgtttggcaaatgttactcctgtattgagtaagtctaacattacgtcccttttctttttggggaggggtagccagaggagtgagtttttcatttagatcaacattgatcaaccattaagacaagatagttgaagacatgtatgtggactgtcaacaaaaataacattttttgaaaagcttttattttcaacatgtaaaaagtgagaaattacttcaaaatatatgcaatttaaattttttagaagattgtgttgattttaccaagacaggagatcttaaactgtagaaacttttatagtttttgagatcgggtctttgttttttttcacattaatattctttgatttcaaatataacatagataagtactcttagaattttgagttaagtatatgctattttaatgtgctaatcctacaaactaggctttctgtgtgactagactgagatgttgagtttgattcacaaaaagcttagaatggttctttgttgaaaagcttttcgagtcactatttggggcatgttagtgccatttgcaaaggtgaaggttttctttttttttttttttttaaccatagagcttttgataaggttaggaaaaggaagttgtcatctcttcttattactctaatcctgctggaagctagcttcttagggactaaaaccagaacaaatggaaggtccaaaaatgctaataagaaattagtattttcacataataccaaactgtaaaaaccaggccagcaagtgtcaccaggttcctgaaacaaaccataaatacattatttaacttagtattgttaaattgtataaatatgtgggtaactgtgacagaaattatgcacttataaaaagcagtaagttacatagtgaatgctgttttctgtggataagaagctggaattgtgatttcatttaatcgaaagacgcttactttgaggaaacttgtttgaaatgcaaacgcgatttctctgtggagccttcacggaattgctgcttttcactatgattattgctgcataacaggccacttctgtgtgtaggaagtgcgtgtgcaagtccaaagggaattgaggcctgaatgggtgggttatcccaattaacaaatacaaagttttcagtacattttgttttaagccaggtgcacaagttagagttgctttttgggactggcatttatgtatgtgagaatcaaacctgatatcactcttggcagcctgactaaagccatttaaaaataagta

SEQ ID NO: 153458 - DNA, 524 bp, Homo sapiens
  Payload ID: 10184
  Gene Symbol: METTL10
  Gene Name: methyltransferase like 10
  ENST ID: ENST00000495711
  CDS Start-End: 1-95
gatttgaacttctcgaagagctaccaacacccaagttcagctttggaggcagatctggaaacagtgtagcagcattggttttccaaaaaatgtgagactttttcttggacgaattcaggtagctacacagaatctacacagcaaagttaacctgacacagaaaatccttgtgcaaataaatgcttacttactttaccagaactcttccctccagtgagttgcaagcgtgacatttgctgtgttttcagcacctgccaacttggaaagcagggtttgtgttcaggacttaggctcacaacccatactttgtggtgcacaatgctggcccagctggcatgctttcgtacctcaatggtgctagacagtcagttacaaagctgtgtggcttcacatgcgctgatctcaatagtcactcctcttcaagctgctttcaactcttattttgtatcaaaggagtgggattggtattattaaactcattgctgaggttatttttcagtgaaaataaattgttttatttagtt

SEQ ID NO: 153459 - DNA, 1459 bp, Homo sapiens
  Payload ID: 10184
  Gene Symbol: METTL10
  Gene Name: methyltransferase like 10
  ENST ID: ENST00000612459
  CDS Start-End: 38-613
atggcggccccaacggccgtccaggacgtggagcgaaatgagctcgggcgctgacggcggcggtggcgctgcggtggcggcgcggtcggacaagggcagtcccggggaggacggtttcgtcccgtcggcgctggggacccgcgagcattgggatgctgtctatgagagagaactgcaaactttccgagaatatggagatacaggtgaaatctggtttggagaagagagtatgaatcgactaataaggtggatgcagaaacacaagattccactggatgcttcagtgcttgatattggaactggaaatggtgttttcctggttgaacttgcaaaatttggtttctctaatattactggaattgattactctccttctgcaattcagctttctggaagtattatagaaaaagaaggtttatctaacattaagttaaaggtagaagactttttgaatctctccacacagctgtctggatttcatatttgtattgacaaagggacttttgatgccataagccttaatcctgacaatgcaattgagaagaggaagcaatatgtgaaatctctctccagggtgttgaaagtaaaaggcttttctaataacgtcatgtaattggaccaaggaagagttgctaaatgaattcagtgaaggttggagtacagtggcaggattttggctcactgcagccttgacttcctgggctcaagcgatcttttccacttcagcctcccgagtaggtggaactacaggcacacatcatcatgcctggataatttttgtatttttagcagagacgaggttttgccatgttgtccaggctggtctggaactcctgggctcaagtgattctcccacctggcctcccaaagtgctgggattataccatgccaggccctcgttggcattttagatttgaacttctcgaagagctaccaacacccaagttcagctttggaggcagatctggaaacagtgtagcagcattggttttccaaaaaatgtgagactttttcttggacgaattcaggtagctacacagaatctacacagcaaagttaacctgacacagaaaatccttgtgcaaataaatgcttagtaagtacacaggatgcacatgttgaatagagtatactggattggtgaaagaaaataataataatgagcatctaagtggttgggttttagagatcaatcaagaataattttaattttcttttgtatttgaaatgtaaatagttttcttttcgattaaaaaaatttcctataactgctaaacagttaaaaactttaaagtagtaaatgagtttatagaaagcatgtattcttgatttttgtgccttggtaaagttgataactatttatgaatatttgaccaaattattccagcatcagaataataagcaaaataactttgttagtgttttgttagactgtttatgaaatataacaagaaatact

SEQ ID NO: 153460 - DNA, 992 bp, Homo sapiens
  Payload ID: 10185
  Gene Symbol: METTL11B
  Gene Name: methyltransferase like 11B
  Uniprot ID: Q5VVY1
  ENST ID: ENST00000439373
  CDS Start-End: 108-959
ggtttaaaatgacagtctcaagttcatttagaaagagaaggctaattcaaagaaacagcaaggcaagcttcctttctctgtaggaatcattattatccccctttgtcatggcccaccggggagcccattttgcctttagatcccgctggcagaagaccgacgatgaactctgtagacatagcatgtcttttatccttcacaaagccattcgcaatgacttctttcagagctatctctacctgctggaaaaaattcccctggtgaaattgtacgctttaacaagccaagtcatcaatggtgagatgcagttctatgccagagctaaacttttctaccaagaagtaccagccacagaagagggtatgatgggaaatttcattgaactgtccagcccagacatccaggcctctcagaaatttcttaggaaatttgttggggggcctgggagagctggaacagactgcgccttggactgcggctccgggataggaagggtcagcaaacacgtcttattgcctgttttcaacagtgtggagctggtggatatgatggaatcctttctccttgaagcccagaactacctgcaggtcaaaggtgacaaagtagaaagctaccactgctacagcctgcaggaattcacaccccccttcaggagatatgatgtcatctggattcagtgggtctctgggcacctgactgataaggaccttcttgcatttctttcccggtgccgagatggcctgaaagaaaatggcatcatcatattgaaggacaatgtggcccgggagggctgtatccttgatctctctgacagcagtgtgactcgggacatggacatcctccggagcctaataaggaagagtgggctggtggtgctgggccaggagaagcaggatggcttcccagagcagtgcatccccgtgtggatgttcgcactgcacagcgacagacactcctgaaaaagcagtgggaatgaacgactggactgggca

SEQ ID NO: 153461 - DNA, 2037 bp, Homo sapiens
  Payload ID: 10186
  Gene Symbol: METTL12
  Gene Name: methyltransferase like 12
  Uniprot ID: A8MUP2
  ENST ID: ENST00000532971
  CDS Start-End: 258-980
ggcctttcggagggtggtgagctagtctgcggacgctgtataccctcctccacttcccgctgcagccaataaaggccgttcctaccatagtctgtgtccgcgttcttttttccgggactgcagagttcggggaagctgtacgccgcctttcgctacgcggaatttgcagatcttcccctggacctcaggcctctccggctggagtagggtggacgcttcacataagcttctctggtcgaacttacccgaatctccagatggccgcgctgcgtcgaatgctccacttgccgagcctgatgatggggacgtgccgcccctttgcgggctcactggctgatagttgcctggcggaccgctgtctctgggatcggctgcatgcccagcctcgtttgggcactgtccccaccttcgactggttctttggatacgacgaagtccaggggctcctactgccattgctgcaggaggcacaggctgccagtcctctgcgagtgctggatgtgggctgtgggacttccagcctatgtacaggcctctacaccaaatctccacacccagtggatgtgctgggggtggacttttctcctgtggctgtggcccacatgaatagcctcctggagggtggcccaggccaaacacctctatgccctggacaccctgcctcaagcctccacttcatgcacgccgatgctcagaacctgggggctgtggcttcttcaggctctttccaactactgctggacaaaggcacatgggatgctgttgcccggggaggtctgcctagggcttaccagcttctatcagaatgcttgagggttctaaaccctcaggggaccctgattcagttctcagatgaggaccctgatgtgcgactgccctgcctggaacaagggtcctatggctggactgtgactgtgcaggagctaggcccgttcaggggcatcacctactttgcttacttgattcaaggctctcattaaagacattttagtagtcctgaccctagtatttctgtgggcaaggagagggctgaagaactgtctttgcaagctatctggctgcaaagtgagaatttgagtcctggcttccacatttactagctgggtgccatattgctgaatgtttctgttccccagtttactcatctgcagagtgagaataacttggagttacggagattacatacaatgatgtgcgcaatatttagcacaaaatgaatgctgaaaagagaaggtacaattgggtcattccccagtttcaactaactggagctcctaaaagcagcagacaggaactgaatcaaaacccctgcgctgactgacttgtataatctagtggcctaacctgtaagcctcatttttgtcacctgtaaaaggagattgtaagaggatgggtataaggagcttcataaacctggatgagatatttgagggggagggaacaatacttaccctcaaagctattaggaggcaggagatgggaatattccacaaagccacttctacaaacacgggagcctgttgagtcccagaagggacagtggttggtggcttccagacatgctgtgtcctcaagaatccaacaagcatcttcttcatcctggtcctgcccccagctgagtccagcgttaaatgttcttaaaggacttctagggtcctgtgggctccaagcccagcctgggatggaggaagagaggggacaaaaatattactgatatattatcaaattacaaaactaggccaggcatgctggctcatacctataatcacagcactttgggaggccaaggtgggcagattgcttgagccctggcaataaagtgacacccctaactctacaaaaacaaatgagcccgggatagtggcacaggcatgtagttccaactactcaggaggctgagctgggaggactgcttgaaccctgggaggtcaaagctgcaatgggccatgataagctgctgcacttgagctaaaaattaatttctgtggtattttttgcttataaaaaaatagagcaattatatcactaagagcctaa

SEQ ID NO: 153462 - DNA, 3327 bp, Homo sapiens
  Payload ID: 10187
  Gene Symbol: METTL13
  Gene Name: methyltransferase like 13
  Uniprot ID: Q8N6R0
  ENST ID: ENST00000361735
  CDS Start-End: 267-2366
gtgtgaggggctcttcacgtggggaaggaacagcaggcgcggaggagggggcaagcgtgtgtgagattcagtggtccatgcgtgcgtttgtcgtgtaagggtcattcctggggtttggagtgggggaacaaatcaatgtggctgtttttccgtggaaagaattcccactgcagtgtcccggagcctgcgtgtggtgggcaagctcctcaaatggtatctcacagggaataggggagtcttgaaaacgcagcttcggcagtaggaacatgaacctcttacctaaaagttccagggagtttggctccgttgactattgggagaagttcttccagcagcgaggaaagaaagctttcgagtggtatggaacctacctggaactgtgcggggtgctacataaatatatcaagcccagggaaaaggtgctggtgattgggtgtggcaactcagaactgagtgagcaactgtatgatgtgggctatcgggatatagtgaacatcgacatcagtgaggttgtcatcaagcaaatgaaggaatgtaatgccacccgacggccccagatgagcttcttgaagatggacatgacgcagatggagtttcctgatgcctcgttccaggtggtgttggacaagggcaccctggatgctgtcctgacagatgaggaagagaagaccttacaacaggtggacaggatgctggctgaggttggccgtgtcctgcaggtgggcggtcgctatctctgcatctccctggctcaggctcacatcctgaagaaagcagtgggccacttctcccgggaggggtggatggtgagggtgcaccaagtggccaacagccaggaccaggtgttggaagcagagcctcagttctccttgcctgtctttgccttcatcatgaccaagttcaggccagtccctggctctgcccttcagatctttgagctgtgtgctcaggagcagcgcaagcctgtgcggctggagagtgccgagcggctggccgaggcggtgcaggagcgacagcagtatgcctggctgtgcagccagctgcgccgcaaggccaggctggggagtgtgtctctggacttgtgcgatggggacacgggggagccacgctacaccctccacgtggtggacagccccactgtgaaaccatcgcgggacaatcattttgcgattttcatcatccctcagggccgggagaccgagtggctctttggcatggatgagggccggaaacagctggcggccagtgctggcttcaggaggttgattacagtggcccttcaccgaggtcagcagtatgaaagcatggaccacatccaagctgagctgtcggctagagtcatggagctggccccagctgggatgcccacccagcagcaggtcccctttctgtctgtgggtggggacattggggtccggaccgttcagcaccaagactgcagccccttgagcggtgactatgtcattgaggatgtgcaaggggatgacaagcgatacttccgtcgactgatcttcctcagcaacaggaatgtggtgcagtccgaagccaggttgctgaaggatgtgtctcacaaagcccagaagaagcggaaaaaggacaggaagaagcagcggcctgctgatgcggaggacctccctgcagccccggggcagtccattgataagagttacctgtgttgtgaacaccacaaagccatgatcgctggccttgccctgctgagaaacccagagctactcctagagatcccactggcattgttggtggtaggcctgggcgggggcagcctccccctctttgtccacgatcattttccaaagtcctgcattgatgctgtggagatcgatccctccatgttggaagtggccacccagtggtttggcttctcccagagtgaccgaatgaaggtccacattgcagatggcctggactatatcgccagcttggcaggaggaggagaagcacggccttgctacgatgtcataatgtttgatgttgacagtaaggacccaacactgggaatgagttgtccgcccccagcatttgtggagcaatcttttctacagaaggttaaaagcatcttgactcctgaaggtgtttttattctcaaccttgtgtgccgagacttggggctaaaagactcagtgctggctgggctcaaggcagtgttccccctcctatatgtccggcgaattgagggtgaagtgaatgagatcctgttctgtcagctgcaccctgagcaaaaacttgccacaccagagctcctagaaacagcccaggctttggagcggaccctgaggaagcctgggaggggttgggatgacacgtatgtcttgtcagatatgctcaagacggtgaaaattgtgtgactgcttaggccaagcagccctcctgcctagactgaccttggactcccagcctgccagagaatgaagaaatacaacgcacagtacttttgaagcttcgtatttttcttggtttcacactcagctacatgtgacctccagcttggtgaggttgcctgaagattagggaaaataaaaatgtccttcccatcttgtcctcttcagtaccacttgggttggtttgtctttgcttcctacaccacgtccttgagtggagttccctgctgaagcccctagcacacactgcatgccttaacaagtgtgtgcaagcccctcagaactcaagacatccaaattttattgcgtctctacttatactggtttgcttttgatttattcctctattagttctataggagtgatctcaagtgagatagcagagcaagatgccaaaagaccataaatagagtaaggtttctatagatgtgagacagatttgagagagcatttactctgtctccctgtggatgaaactgctgctgaaatggttccaatttttaggaatctgcttacccacttcattatttgacagctttccttggtgacccaaaccttgtagcctaagccatttgtctttttctcagtggagggagtgtatggacctggccccatggctttgcatgttagagacctggcagactaaagtctctagtgtttgtttgctcacatttgctgagtgacagctatgtgccagactgcataaagggtggtggcagaagtgaaaatgtttaagaatgaccaaaaacattagtaatgaaagttaatgtgttccaggcattcttctaagtggtttacatgcactgtctcatttaatctgagataaaggatacttaagcccaaactatatctaaacccaaatctcacttggctggaaacatcaatcttaaccatttattcagaaccattaaaccaatgattccaagac

SEQ ID NO: 153463 - DNA, 3022 bp, Homo sapiens
  Payload ID: 10187
  Gene Symbol: METTL13
  Gene Name: methyltransferase like 13
  Uniprot ID: Q8N6R0
  ENST ID: ENST00000362019
  CDS Start-End: 220-2061
ggaaatctagttcgggaaaagtgtgaggggctcttcacgtggggaaggaacagcaggcgcggaggagggggcaagcgtgtgtgagattcagtggtccatgcgtgcgtttgtcgtgtgctggtgattgggtgtggcaactcagaactgagtgagcaactgtatgatgtgggctatcgggatatagtgaacatcgacatcagtgaggttgtcatcaagcaaatgaaggaatgtaatgccacccgacggccccagatgagcttcttgaagatggacatgacgcagatggagtttcctgatgcctcgttccaggtggtgttggacaagggcaccctggatgctgtcctgacagatgaggaagagaagaccttacaacaggtggacaggatgctggctgaggttggccgtgtcctgcaggtgggcggtcgctatctctgcatctccctggctcaggctcacatcctgaagaaagcagtgggccacttctcccgggaggggtggatggtgagggtgcaccaagtggccaacagccaggaccaggtgttggaagcagagcctcagttctccttgcctgtctttgccttcatcatgaccaagttcaggccagtccctggctctgcccttcagatctttgagctgtgtgctcaggagcagcgcaagcctgtgcggctggagagtgccgagcggctggccgaggcggtgcaggagcgacagcagtatgcctggctgtgcagccagctgcgccgcaaggccaggctggggagtgtgtctctggacttgtgcgatggggacacgggggagccacgctacaccctccacgtggtggacagccccactgtgaaaccatcgcgggacaatcattttgcgattttcatcatccctcagggccgggagaccgagtggctctttggcatggatgagggccggaaacagctggcggccagtgctggcttcaggaggttgattacagtggcccttcaccgaggtcagcagtatgaaagcatggaccacatccaagctgagctgtcggctagagtcatggagctggccccagctgggatgcccacccagcagcaggtcccctttctgtctgtgggtggggacattggggtccggaccgttcagcaccaagactgcagccccttgagcggtgactatgtcattgaggatgtgcaaggggatgacaagcgatacttccgtcgactgatcttcctcagcaacaggaatgtggtgcagtccgaagccaggttgctgaaggatgtgtctcacaaagcccagaagaagcggaaaaaggacaggaagaagcagcggcctgctgatgcggaggacctccctgcagccccggggcagtccattgataagagttacctgtgttgtgaacaccacaaagccatgatcgctggccttgccctgctgagaaacccagagctactcctagagatcccactggcattgttggtggtaggcctgggcgggggcagcctccccctctttgtccacgatcattttccaaagtcctgcattgatgctgtggagatcgatccctccatgttggaagtggccacccagtggtttggcttctcccagagtgaccgaatgaaggtccacattgcagatggcctggactatatcgccagcttggcaggaggaggagaagcacggccttgctacgatgtcataatgtttgatgttgacagtaaggacccaacactgggaatgagttgtccgcccccagcatttgtggagcaatcttttctacagaaggttaaaagcatcttgactcctgaaggtgtttttattctcaaccttgtgtgccgagacttggggctaaaagactcagtgctggctgggctcaaggcagtgttccccctcctatatgtccggcgaattgagggtgaagtgaatgagatcctgttctgtcagctgcaccctgagcaaaaacttgccacaccagagctcctagaaacagcccaggctttggagcggaccctgaggaagcctgggaggggttgggatgacacgtatgtcttgtcagatatgctcaagacggtgaaaattgtgtgactgcttaggccaagcagccctcctgcctagactgaccttggactcccagcctgccagagaatgaagaaatacaacgcacagtacttttgaagcttcgtatttttcttggtttcacactcagctacatgtgacctccagcttggtgaggttgcctgaagattagggaaaataaaaatgtccttcccatcttgtcctcttcagtaccacttgggttggtttgtctttgcttcctacaccacgtccttgagtggagttccctgctgaagcccctagcacacactgcatgccttaacaagtgtgtgcaagcccctcagaactcaagacatccaaattttattgcgtctctacttatactggtttgcttttgatttattcctctattagttctataggagtgatctcaagtgagatagcagagcaagatgccaaaagaccataaatagagtaaggtttctatagatgtgagacagatttgagagagcatttactctgtctccctgtggatgaaactgctgctgaaatggttccaatttttaggaatctgcttacccacttcattatttgacagctttccttggtgacccaaaccttgtagcctaagccatttgtctttttctcagtggagggagtgtatggacctggccccatggctttgcatgttagagacctggcagactaaagtctctagtgtttgtttgctcacatttgctgagtgacagctatgtgccagactgcataaagggtggtggcagaagtgaaaatgtttaagaatgaccaaaaacattagtaatgaaagttaatgtgttccaggcattcttctaagtggtttacatgcactgtctcatttaatctgagataaaggatacttaagcccaaactatatctaaacccaaatctcacttggctggaaacatcaatcttaaccatttattcagaaccattaaaccaatgattccaagac

SEQ ID NO: 153464 - DNA, 2865 bp, Homo sapiens
  Payload ID: 10187
  Gene Symbol: METTL13
  Gene Name: methyltransferase like 13
  Uniprot ID: Q8N6R0
  ENST ID: ENST00000367737
  CDS Start-End: 273-1904
ggaaaagtgtgaggggctcttcacgtggggaaggaacagcaggcgcggaggagggggcaagcgtgtgtgagattcagtggtccatgcgtgcgtttgtcgtgtaagggtcattcctggggtttggagtgggggaacaaatcaatgtggctgtttttccgtggaaagaattcccactgcagtgtcccggagcctgcgtgtggtgggcaagctcctcaaatggtatctcacagggaataggggagtcttgaaaacgcagcttcggcagtaggaacatgaacctcttacctaaaagttccagggagtttggctccgttgactattgggagaagttcttccagcagcgaggaaagaaagctttcgagtggtatggaacctacctggaactgtgcggggtgctacataaatatatcaagcccagggaaaaggtgctggtgattgggtgtggcaactcagaactgagtgagcaactgtatgatgtgggctatcgggatatagtgaacatcgacatcagtgaggttgtcatcaagcaaatgaaggaatgtaatgccacccgacggccccagatgagcttcttgaagatggacatgacgcagatggagtttcctgatgcctcgttccaggtggtgttggacaagggcaccctggatgctgtcctgacagatgaggaagagaagaccttacaacaggtggacaggatgctggctgaggttggccgtgtcctgcagggccgggagaccgagtggctctttggcatggatgagggccggaaacagctggcggccagtgctggcttcaggaggttgattacagtggcccttcaccgaggtcagcagtatgaaagcatggaccacatccaagctgagctgtcggctagagtcatggagctggccccagctgggatgcccacccagcagcaggtcccctttctgtctgtgggtggggacattggggtccggaccgttcagcaccaagactgcagccccttgagcggtgactatgtcattgaggatgtgcaaggggatgacaagcgatacttccgtcgactgatcttcctcagcaacaggaatgtggtgcagtccgaagccaggttgctgaaggatgtgtctcacaaagcccagaagaagcggaaaaaggacaggaagaagcagcggcctgctgatgcggaggacctccctgcagccccggggcagtccattgataagagttacctgtgttgtgaacaccacaaagccatgatcgctggccttgccctgctgagaaacccagagctactcctagagatcccactggcattgttggtggtaggcctgggcgggggcagcctccccctctttgtccacgatcattttccaaagtcctgcattgatgctgtggagatcgatccctccatgttggaagtggccacccagtggtttggcttctcccagagtgaccgaatgaaggtccacattgcagatggcctggactatatcgccagcttggcaggaggaggagaagcacggccttgctacgatgtcataatgtttgatgttgacagtaaggacccaacactgggaatgagttgtccgcccccagcatttgtggagcaatcttttctacagaaggttaaaagcatcttgactcctgaaggtgtttttattctcaaccttgtgtgccgagacttggggctaaaagactcagtgctggctgggctcaaggcagtgttccccctcctatatgtccggcgaattgagggtgaagtgaatgagatcctgttctgtcagctgcaccctgagcaaaaacttgccacaccagagctcctagaaacagcccaggctttggagcggaccctgaggaagcctgggaggggttgggatgacacgtatgtcttgtcagatatgctcaagacggtgaaaattgtgtgactgcttaggccaagcagccctcctgcctagactgaccttggactcccagcctgccagagaatgaagaaatacaacgcacagtacttttgaagcttcgtatttttcttggtttcacactcagctacatgtgacctccagcttggtgaggttgcctgaagattagggaaaataaaaatgtccttcccatcttgtcctcttcagtaccacttgggttggtttgtctttgcttcctacaccacgtccttgagtggagttccctgctgaagcccctagcacacactgcatgccttaacaagtgtgtgcaagcccctcagaactcaagacatccaaattttattgcgtctctacttatactggtttgcttttgatttattcctctattagttctataggagtgatctcaagtgagatagcagagcaagatgccaaaagaccataaatagagtaaggtttctatagatgtgagacagatttgagagagcatttactctgtctccctgtggatgaaactgctgctgaaatggttccaatttttaggaatctgcttacccacttcattatttgacagctttccttggtgacccaaaccttgtagcctaagccatttgtctttttctcagtggagggagtgtatggacctggccccatggctttgcatgttagagacctggcagactaaagtctctagtgtttgtttgctcacatttgctgagtgacagctatgtgccagactgcataaagggtggtggcagaagtgaaaatgtttaagaatgaccaaaaacattagtaatgaaagttaatgtgttccaggcattcttctaagtggtttacatgcactgtctcatttaatctgagataaaggatacttaagcccaaactatatctaaacccaaatctcacttggctggaaacatcaatcttaaccatttattcagaaccattaaaccaatgattccaagac

SEQ ID NO: 153465 - DNA, 6669 bp, Homo sapiens
  Payload ID: 10188
  Gene Symbol: METTL14
  Gene Name: methyltransferase like 14
  Uniprot ID: Q9HCE5
  ENST ID: ENST00000388822
  CDS Start-End: 168-1538
gcgagccaattccggccgcgccggaagtctctactgaggaaagctatgaggatactctgttcgtaagctcccggtgaattttgttccacagactcggaagaaaggttggataagagttcactggagattgacaagtactcgggatagtgaaaagccggagttggaacatggatagccgcttgcaggagatccgggagcggcagaagttacggcgacagctcctcgcgcagcagttgggagctgaaagtgccgacagcattggtgccgtgttaaatagcaaagatgagcagagagaaattgctgaaacaagagaaacttgcagggcttcctatgatacctctgctccaaatgcaaaacgtaagtatctggatgaaggagagacagatgaagacaaaatggaagaatataaggatgaactagaaatgcaacaggatgaagaaaatttgccatatgaagaagagatttacaaagattctagtacttttcttaagggaacacagagcttaaatccccataatgattactgccaacattttgtagacactggacatagacctcagaatttcatcagggatgtaggtttagctgacagatttgaagaatatcctaaactgagggagctcatcaggctaaaggatgagttaatagctaaatctaacactcctcccatgtacttacaagccgatatagaagcctttgacatcagagaactaacacccaaatttgatgtgattcttctggaaccccctttagaagaatattacagagaaactggcatcactgctaatgaaaaatgctggacttgggatgatattatgaagttagaaattgatgagattgcagcacctcgatcatttatttttctctggtgtggttctggggaggggttggaccttggaagagtgtgtttacgaaaatggggttacagaagatgtgaagatatttgttggattaaaaccaataaaaacaatcctgggaagactaagactttagatccaaaggctgtctttcagagaacaaaggaacactgcctcatggggatcaaaggaactgtgaagcgtagcacagacggggacttcattcatgctaatgttgacattgacttaattatcacagaagaacctgaaattggcaatatagaaaaacctgtagaaatttttcatataattgagcatttttgtcttggtagaagacgccttcatctatttggaagagatagtacaattcgaccaggctggctcacagttggaccaacgcttacaaatagcaactacaatgcagaaacatatgcatcctatttcagtgctcctaattcctacttgactggttgtacagaagaaattgagagacttcgaccaaaatcgcctcctcccaaatctaaatctgaccgaggaggtggagctcccagaggtggaggaagaggtggaacttctgctggccgtggacgagaaagaaatagatctaacttccgaggagaaagaggtggctttagagggggccgtggaggagcacacagaggtggctttccacctcgataattgttgaagacattgaacctattcatcctcctctaaccttctttattgtaattaaatttcaagtgggagacttaactttagaactcacttccagcttgcactttgctttaatttctctgagctgcaagaatgtcttagcgagccttgcttgcagttgtcacacacactgtctggtttttttcaggataaatgaatgattctgccttttgttatgtgcgtgaacagaatggaacaactcaagtagcttcatcttcagagactgaatttattctgatagacttcagctaattacaaaggattttgctaatttttgggaataaataatggaaaaagatccagtctgtggtatcatgctagtgctgacagggccttgatagaatagagttggaaaagatggtaagcttttgtcagggttttaacattttcttgatgaaacaataaaaagaggtaagcttttttcttctttttttttaagttttaaataaactcagatataatttgaatactgaagaaattaagagactttgaacaaaaactcttcccaaatctaaatttgataggggaggtggagattccaggggtgggtgaaagaagagatagaacttagcaggcagacttaaaaaaaaaaaaaaagtttatcatcataatctcaattttgtggctatgactcctaatcacgcttcctaagaagcaaaggaggacaaatattcatgtgctagatagcactgtggtgtggacttgaacttggattgaccttaaattttatattcctcaaataaaagagaggcagcgacaagatacctcattatcagatgcttggtttatacattttgggactaaaatacttggtgatgaaatgacatacacctttaaacttgttatggagatagtttaatgtaaaaccaactacggaaaaccctcaacttaaggatacagcttggaaattggaactgcaattgccttttattaaaaccatatggtgtgatgtttgtttttaaaattatataagactttatgctgtcacttctcttgctgtactgtaattcatgttttaaatgaatttgataatgaaattatactattatcattcttgatgaatacttttcttatttttatgatttttctaatgaaactttaaacttttgagatttgagagtctgttttctataagtagaattactgttgttacaaaatgaaaaaggactgacctaaaatcagtctcttcttttggtctgtgatggattttaatggccgttctgtgctcatatatacctaagatgagattatattacatccaccaaagactcagtttgaagataaggaatgagtgatagaagaaataaggctgagatccttaaaagcctaattaatttaactcgcttaacccattagtactatctagtacaagacccctttttttttgctgaaattatggtatattttcaacttcactaattacaaattatctagatttagaactctatatgtcagcattgacctgggaatgaagtcaggatagagaaattccacttgcctgtgatgggtccttagaagtatcagctaaggagtgaccctgtcctatacacagggctctctattacgttccataccctgggcctacccaaggtgacattcctgctgtttacatggcataggcacctgtgagatcagtgtcacaatttcatcttagaaagaggtaggtatggctgctttgtcggttgaaagttaaggggagccatgatctaccatatttaggaaaaagttatttaaaaaagagcagatggtggaaaaagaatgtaagacccagaatttatccctttgacaatgaatctggcctttttaatagcaggatggaattgattcactagtttttgctaactttcactttcagtaaaggttgaggtgttgtttttgcaatgactgtgtattcattgaggaaaggtttccaatgaaatttcattactctgacctcttctaatttttggtcttctttatatttacatgtcttacattccacaaaattatttagaaatgctgggcatggtggctcatgcctgtaatcccagcactttgtgaggccgatgtgggtggatcacttgaggtcaggagtttgagaccagcctgaccaatatggagaaatcccatctctactaaaaatacaaaattagctgggcgtggtggcatgtgcacgcctgtaatccccgctactcgggaggctgtggcaggagaattgcctgaacccaggaggcggaggttgcagtgagccgagattgtgccactgcactccagcctgggcgacagagtgagactctgtctcaaaaaaaaaaaaaaaaattgtatagaaataaatttttagttgctttatgcactaattccttactggggatagaagctaattattgtgaaataacctagtttagaagttagaagatcagcatgtctgagtttttacagaattataattcatggtattccaaaccaactgttgttatttatttccagtgagaaccattttcccactgaccttcctcctttcagaggatggggattaggaggcccaaagtactgattgagtaggaatacttttttactcttcttcactgtggagaaagaagagggcaggtagttgatgatgtcaggagaacagattttatggtgtggaataccatacctaaacacaaatgaatcagattagaccacagaattgtgatgatggcagtcagaatgtaatacggtcatcatgaaacagcacagtgtgagaggtcaaggtgtcaacctgggaagtgagaatcaagcaggagtgtggcatggcaaccaactcacagatccagagttgagagggatcactactgcagcagttctgctctgttactctggtaagtagtagagccactttatgagcccttatttcctatctcccttattctgaggccaggtcagtgatatgctatagtttcatttaagttaatggagtataaagatgggatacttgggagctatattgtgcatcagggtgtcacagctgctactaggagttactccttttcatgtcttttaaaatactttctacccatcttaattgctaaattatctttcagttagttacagcgcttaatttaaaacctgtactgttttcatcctgaatttagaacataagatttagcctttgaagtatagtttcagactttactaatttgtttaatataatccttattaacatgacaaaatgaaagccctgttgggacttagtctaaacagtagtctttgatctgaaagtgtctcatattttgtgatctattagaaacataaacctttgcttatgcagaaggtctttcttagaacaatcctgtaatcttagggttcatgtgtgactagcattatcctctctttgatgttgggtaatagaggctgaacttttcttgtgtatatatagttagttttgaggccataaatctaggacttctcaaaagattagaacatttatccagtaaactgactccattgaagacttcatttctggaaataccacattgcttctgctctcaataactctatcatttactcgtataaatattgctagctgtaatgcacagagaaaaactacctcattcaatctagataattgggacatccttttccagtaaaccctttttccactactggataaaatattaaaatgatcagtttgagtgtatgttagagttcatgtttctgtaactaaaggtgctaataaactgaaatcagataaggtaggtttttccaaaaatacttctaaataattgacaacctagaagtcaacaatgtaaaatgcatatgggactctatattaatagagaagcaggccaagaactttttaatgggataattgtcttctttaggcacattgtttgcatattaacgacatggaaatattttcactcatttactttcatccatctatctgtgctttttctcactttgatgagttctctcaactcctttctaagaaaagcagagcagagcagcatagagtgcgttagtaaatggccactgactcttggtctcaggccatagcaactatagagagaagagtggggctggagacctcataccctgggtaaagtggacatcacttgtcagctccagctaattgtcaccacagagagaagagggtaagtctgagatgttcatgtgcatttccctacattttagaggttgacaaaatagtttgtgacttttgcttacatttgcattcatagaactaaaaaaaatttaacttggctaacaaaataccacatgcatattttcttttttatttttattttttgagacagagtctctgttacccaggctggggggcagtgataagatcttggctcactgcaacctccgcctccagggttgaagcgattcttctgcctcagcctcctgagtagctggaattacaggtgcccaccaccacacccagctaattttagtattcttagtagagacaggatttcaccatgttggccaggctggtctcaaactcccgacctcaactgatccacccaccctggcctcccaaagtgtcaggattacaggcgtgagcctctgcaactggccaacatgcatatttaaattatgcatgcattgtagctgtatactgtgtgaccacatttacttaaaaaagaggaaaaaaggttacttgcttgagacaggaaactatcacctttgaaagcatattaagtagttggcttactttggaacacacagtagactgaaaatgtgaactaatactttaaaattgccgtataatgatgtcattgcaagccattcatctatccaatgggggaaaatgtggaggtctaggcttgtgttgtcacaaaatacaccttttagataatccttacctgtacagatttttataactgttgttatcataagagaatggctacatcattatcctgccttttctgggtgtttattttgttgtttttgaaagtggacaaaacctcaaagcacaattttgttctgatatatccagtttagtagtttatgctggttaaatgatcaaagtaattgcttaaatgtcttgtggaattagctgtcactttatagtttatgtattgtggtgggtaccttaataataaaaagatttttaatgtaataa

SEQ ID NO: 153466 - DNA, 927 bp, Homo sapiens
  Payload ID: 10188
  Gene Symbol: METTL14
  Gene Name: methyltransferase like 14
  ENST ID: ENST00000506780
  CDS Start-End: 1-413
acatcagagaactaacacccaaatttgatgtgattcttctggaaccccctttagaagaatattacagagaaactggcatcactgctaatgaaaaatgctggacttgggatgatattatgaagttagaaattgatgagattgcagcacctcgatcatttatttttctctggtgtggttctggggaggggttggaccttggaagagtgtgtttacgaaaatggggttacagaagatgtgaagatatttgttggattaaaaccaataaaaacaatcctgggaagactaagactttagatccaaaggctgtctttcagagaacaaaggctggctcacagttggaccaacgcttacaaatagcaactacaatgcagaaacatatgcatcctatttcagtgctcctaattcctacttgactggttgtacagaagaaattgagagacttcgaccaaaatcgcctcctcccaaatctaaatctgaccgaggaggtggagctcccagaggtggaggaagaggtggaacttctgctggccgtggacgagaaagaaatagatctaacttccgaggagaaagaggtggctttagagggggccgtggaggagcacacagaggtggctttccacctcgataattgttgaagacattgaacctattcatcctcctctaaccttctttattgtaattaaatttcaagtgggagacttaactttagaactcacttccagcttgcactttgctttaatttctctgagctgcaagaatgtcttagcgagccttgcttgcagttgtcacacacactgtctggtttttttcaggataaatgaatgattctgccttttgttatgtgcgtgaacagaatggaacaactcaagtagcttcatcttcagagactgaatttattctgatagacttcagctaattacaaaggat

SEQ ID NO: 153467 - DNA, 485 bp, Homo sapiens
  Payload ID: 10188
  Gene Symbol: METTL14
  Gene Name: methyltransferase like 14
  ENST ID: ENST00000508801
  CDS Start-End: 121-485
gaggatactctgttcgtaagctcccggtgaattttgttccacagactcggaagaaaggttggataagagttcactggagattgacaagtactcgggatagtgaaaagccggagttggaacatggatagccgcttgcaggagatccgggagcggcagaagttacggcgacagctcctcgcgcagcagatttgtggaatatggctaaaaccgtggaaacttggagtcagatttgttcctttgttccttatcccgctggcattacgatcttgggcaaatcaagtatcctttctaagtcttcttttcgccaacttcttttatcgtattatcttcaaaaatttgggagctgaaagtgccgacagcattggtgccgtgttaaatagcaaagatgagcagagagaaattgctgaaacaagagaaacttgcagggcttcctatgatacctctgctccaaatgcaaaacgtaagtatctggatgaaggagagac

SEQ ID NO: 153468 - DNA, 522 bp, Homo sapiens
  Payload ID: 10188
  Gene Symbol: METTL14
  Gene Name: methyltransferase like 14
  ENST ID: ENST00000626212
  CDS Start-End: 136-330
actgaggaaagctatgaggatactctgttcgtaagctcccggtgaattttgttccacagactcggaagaaaggttggataagagttcactggagattgacaagtactcgggatagtgaaaagccggagttggaacatggatagccgcttgcaggagatccgggagcggcagaagttacggcgacagctcctcgcgcagcagttgggagctgaaagtgccgacagcattggtgccgtgttaaatagcaaagatgagcagagagaaattgctgaaacaagagaaacttgcagggcttcctatgatacctctgctccaaatgcaaaacgatgaactagaaatgcaacaggatgaagaaaatttgccatatgaagaagagatttacaaagattctagtacttttcttaagggaacacagagcttaaatccccataatgattactgccaacattttgtagacactggacatagacctcagaatttcatcagggatgtaggtttagctgacagatttgaagaatatcc

SEQ ID NO: 153469 - DNA, 6625 bp, Homo sapiens
  Payload ID: 10188
  Gene Symbol: METTL14
  Gene Name: methyltransferase like 14
  ENST ID: ENST00000628452
  CDS Start-End: 123-392
atgaggatactctgttcgtaagctcccggtgaattttgttccacagactcggaagaaaggttggataagagttcactggagattgacaagtactcgggatagtgaaaagccggagttggaacatggatagccgcttgcaggagatccgggagcggcagaagttacggcgacagctcctcgcgcagcagttgggagctgaaagtgccgacagcattggtgccgtgttaaatagcaaagatgagcagagagaaattgctgaaacaagagaaacttgcagggcttcctatgatacctctgctccaaatgcaaaacgtaagtatctggatgaaggagagacagatgaagacaaaatggaagaatataaggcaagtagagaaaatgcaacaggatgaagaaaatttgccatatgaagaagagatttacaaagattctagtacttttcttaagggaacacagagcttaaatccccataatgattactgccaacattttgtagacactggacatagacctcagaatttcatcagggatgtaggtttagctgacagatttgaagaatatcctaaactgagggagctcatcaggctaaaggatgagttaatagctaaatctaacactcctcccatgtacttacaagccgatatagaagcctttgacatcagagaactaacacccaaatttgatgtgattcttctggaaccccctttagaagaatattacagagaaactggcatcactgctaatgaaaaatgctggacttgggatgatattatgaagttagaaattgatgagattgcagcacctcgatcatttatttttctctggtgtggttctggggaggggttggaccttggaagagtgtgtttacgaaaatggggttacagaagatgtgaagatatttgttggattaaaaccaataaaaacaatcctgggaagactaagactttagatccaaaggctgtctttcagagaacaaaggaacactgcctcatggggatcaaaggaactgtgaagcgtagcacagacggggacttcattcatgctaatgttgacattgacttaattatcacagaagaacctgaaattggcaatatagaaaaacctgtagaaatttttcatataattgagcatttttgtcttggtagaagacgccttcatctatttggaagagatagtacaattcgaccaggctggctcacagttggaccaacgcttacaaatagcaactacaatgcagaaacatatgcatcctatttcagtgctcctaattcctacttgactggttgtacagaagaaattgagagacttcgaccaaaatcgcctcctcccaaatctaaatctgaccgaggaggtggagctcccagaggtggaggaagaggtggaacttctgctggccgtggacgagaaagaaatagatctaacttccgaggagaaagaggtggctttagagggggccgtggaggagcacacagaggtggctttccacctcgataattgttgaagacattgaacctattcatcctcctctaaccttctttattgtaattaaatttcaagtgggagacttaactttagaactcacttccagcttgcactttgctttaatttctctgagctgcaagaatgtcttagcgagccttgcttgcagttgtcacacacactgtctggtttttttcaggataaatgaatgattctgccttttgttatgtgcgtgaacagaatggaacaactcaagtagcttcatcttcagagactgaatttattctgatagacttcagctaattacaaaggattttgctaatttttgggaataaataatggaaaaagatccagtctgtggtatcatgctagtgctgacagggccttgatagaatagagttggaaaagatggtaagcttttgtcagggttttaacattttcttgatgaaacaataaaaagaggtaagcttttttcttctttttttttaagttttaaataaactcagatataatttgaatactgaagaaattaagagactttgaacaaaaactcttcccaaatctaaatttgataggggaggtggagattccaggggtgggtgaaagaagagatagaacttagcaggcagacttaaaaaaaaaaaaaaagtttatcatcataatctcaattttgtggctatgactcctaatcacgcttcctaagaagcaaaggaggacaaatattcatgtgctagatagcactgtggtgtggacttgaacttggattgaccttaaattttatattcctcaaataaaagagaggcagcgacaagatacctcattatcagatgcttggtttatacattttgggactaaaatacttggtgatgaaatgacatacacctttaaacttgttatggagatagtttaatgtaaaaccaactacggaaaaccctcaacttaaggatacagcttggaaattggaactgcaattgccttttattaaaaccatatggtgtgatgtttgtttttaaaattatataagactttatgctgtcacttctcttgctgtactgtaattcatgttttaaatgaatttgataatgaaattatactattatcattcttgatgaatacttttcttatttttatgatttttctaatgaaactttaaacttttgagatttgagagtctgttttctataagtagaattactgttgttacaaaatgaaaaaggactgacctaaaatcagtctcttcttttggtctgtgatggattttaatggccgttctgtgctcatatatacctaagatgagattatattacatccaccaaagactcagtttgaagataaggaatgagtgatagaagaaataaggctgagatccttaaaagcctaattaatttaactcgcttaacccattagtactatctagtacaagacccctttttttttgctgaaattatggtatattttcaacttcactaattacaaattatctagatttagaactctatatgtcagcattgacctgggaatgaagtcaggatagagaaattccacttgcctgtgatgggtccttagaagtatcagctaaggagtgaccctgtcctatacacagggctctctattacgttccataccctgggcctacccaaggtgacattcctgctgtttacatggcataggcacctgtgagatcagtgtcacaatttcatcttagaaagaggtaggtatggctgctttgtcggttgaaagttaaggggagccatgatctaccatatttaggaaaaagttatttaaaaaagagcagatggtggaaaaagaatgtaagacccagaatttatccctttgacaatgaatctggcctttttaatagcaggatggaattgattcactagtttttgctaactttcactttcagtaaaggttgaggtgttgtttttgcaatgactgtgtattcattgaggaaaggtttccaatgaaatttcattactctgacctcttctaatttttggtcttctttatatttacatgtcttacattccacaaaattatttagaaatgctgggcatggtggctcatgcctgtaatcccagcactttgtgaggccgatgtgggtggatcacttgaggtcaggagtttgagaccagcctgaccaatatggagaaatcccatctctactaaaaatacaaaattagctgggcgtggtggcatgtgcacgcctgtaatccccgctactcgggaggctgtggcaggagaattgcctgaacccaggaggcggaggttgcagtgagccgagattgtgccactgcactccagcctgggcgacagagtgagactctgtctcaaaaaaaaaaaaaaaaattgtatagaaataaatttttagttgctttatgcactaattccttactggggatagaagctaattattgtgaaataacctagtttagaagttagaagatcagcatgtctgagtttttacagaattataattcatggtattccaaaccaactgttgttatttatttccagtgagaaccattttcccactgaccttcctcctttcagaggatggggattaggaggcccaaagtactgattgagtaggaatacttttttactcttcttcactgtggagaaagaagagggcaggtagttgatgatgtcaggagaacagattttatggtgtggaataccatacctaaacacaaatgaatcagattagaccacagaattgtgatgatggcagtcagaatgtaatacggtcatcatgaaacagcacagtgtgagaggtcaaggtgtcaacctgggaagtgagaatcaagcaggagtgtggcatggcaaccaactcacagatccagagttgagagggatcactactgcagcagttctgctctgttactctggtaagtagtagagccactttatgagcccttatttcctatctcccttattctgaggccaggtcagtgatatgctatagtttcatttaagttaatggagtataaagatgggatacttgggagctatattgtgcatcagggtgtcacagctgctactaggagttactccttttcatgtcttttaaaatactttctacccatcttaattgctaaattatctttcagttagttacagcgcttaatttaaaacctgtactgttttcatcctgaatttagaacataagatttagcctttgaagtatagtttcagactttactaatttgtttaatataatccttattaacatgacaaaatgaaagccctgttgggacttagtctaaacagtagtctttgatctgaaagtgtctcatattttgtgatctattagaaacataaacctttgcttatgcagaaggtctttcttagaacaatcctgtaatcttagggttcatgtgtgactagcattatcctctctttgatgttgggtaatagaggctgaacttttcttgtgtatatatagttagttttgaggccataaatctaggacttctcaaaagattagaacatttatccagtaaactgactccattgaagacttcatttctggaaataccacattgcttctgctctcaataactctatcatttactcgtataaatattgctagctgtaatgcacagagaaaaactacctcattcaatctagataattgggacatccttttccagtaaaccctttttccactactggataaaatattaaaatgatcagtttgagtgtatgttagagttcatgtttctgtaactaaaggtgctaataaactgaaatcagataaggtaggtttttccaaaaatacttctaaataattgacaacctagaagtcaacaatgtaaaatgcatatgggactctatattaatagagaagcaggccaagaactttttaatgggataattgtcttctttaggcacattgtttgcatattaacgacatggaaatattttcactcatttactttcatccatctatctgtgctttttctcactttgatgagttctctcaactcctttctaagaaaagcagagcagagcagcatagagtgcgttagtaaatggccactgactcttggtctcaggccatagcaactatagagagaagagtggggctggagacctcataccctgggtaaagtggacatcacttgtcagctccagctaattgtcaccacagagagaagagggtaagtctgagatgttcatgtgcatttccctacattttagaggttgacaaaatagtttgtgacttttgcttacatttgcattcatagaactaaaaaaaatttaacttggctaacaaaataccacatgcatattttcttttttatttttattttttgagacagagtctctgttacccaggctggggggcagtgataagatcttggctcactgcaacctccgcctccagggttgaagcgattcttctgcctcagcctcctgagtagctggaattacaggtgcccaccaccacacccagctaattttagtattcttagtagagacaggatttcaccatgttggccaggctggtctcaaactcccgacctcaactgatccacccaccctggcctcccaaagtgtcaggattacaggcgtgagcctctgcaactggccaacatgcatatttaaattatgcatgcattgtagctgtatactgtgtgaccacatttacttaaaaaagaggaaaaaaggttacttgcttgagacaggaaactatcacctttgaaagcatattaagtagttggcttactttggaacacacagtagactgaaaatgtgaactaatactttaaaattgccgtataatgatgtcattgcaagccattcatctatccaatgggggaaaatgtggaggtctaggcttgtgttgtcacaaaatacaccttttagataatccttacctgtacagatttttataactgttgttatcataagagaatggctacatcattatcctgccttttctgggtgtttattttgttgtttttgaaagtggacaaaacctcaaagcacaattttgttctgatatatccagtttagtagtttatgctggttaaatgatcaaagtaattgcttaaatgtcttgtggaattagctgtcactttatagtttatgtattgtggtgggtaccttaataataaaaagatttttaatgtaataa

SEQ ID NO: 153470 - DNA, 4068 bp, Homo sapiens
  Payload ID: 10189
  Gene Symbol: METTL15
  Gene Name: methyltransferase like 15
  Uniprot ID: A6NJ78
  ENST ID: ENST00000303459
  CDS Start-End: 108-929
ctagacgcgcggcgcattcaggttctcctggaccgtagtggtagtcgctggcccgagttagaggccagctgagaagtcttcgtgcttcagatttgtttacctacaaaatgcttcggtatccatatttttgtagaatgtataaagaatgcctttcatgttggttggaatctggcatacctaatttaggtgtctggccaaacagaatacatactacagcagaaaaatatagagaatatgaagcccgggagcaaacagatcaaactcaagcccaggagttacacagatctcaagatagagattttgaaactatggctaaattacatattccagtaatggtggatgaagttgttcattgtttgtcaccacaaaaaggacagatttttctagatatgacatttggttcgggagggcacacaaaagccattctgcagaaggagtcagatattgttctctatgccttggacagagacccaacagcttatgcattagctgaacatctttcagagttgtatcctaaacaaatccgagctatgctgggccagttcagccaggcagaagccttattaatgaaagctggagtgcagccaggaacttttgatggagttcttatggatcttgggtgttcctccatgcaacttgatactcctgaaagaggtttttcccttcggaaagatggccctttggacatgagaatggatggtggcaggtaccctgacatgcccactgctgctgatgttgtgaatgctttagatcaacaggcacttgcatctatcctaagaacatacggggaggagaagcatgccaagaaaatcgcttcagcaattgttcaggcacgcagcatctaccccatcaccagaacccagcagcttgccagcatcgttgcagaatactctgaaacatatttcccagtggcccaaactctttattaggaaaatggacgaattgaatagcaaatggagcatttcctccctctgctatttatacacggaaagacttactacagcgatctacccatattgccaccaagactttccaggctcttcgcatatttgtgaacaatgagctcaatgaactctacacgggactgaagacagctcagaagtttctgagacctggtggtcgtcttgttgccctctccttccattcactagaggatcgcatcgtcaaaagatttttgcttggaataagcatgacagaaagatttaacctaagtgttagacaacaagtgatgaaaacatctcaattgggttcagatcacgaaaacacggaagaagtctctatgagaagagctcctttaatgtgggaattgatacacaagaaggtacttagtccacaagatcaggatgtacaagataaccccagagggcgctcagccaagcttagagcagctatcaaattataagttatcatcatcttattcttcaaatttttttctcacaatttctctaatctttactcatgttatgtccctgaatgtcttggtataggtttaagtgtgggacagtctgaaaattgatagcatttagcatttcttttttctcaaaaagaaactgtaggaaatacatgacagagaaagttacactcagggagcagcagcacctccagactggaaaaatatgttaatctttgcatcatattggactcttgaaggcaatccttcctctggccaggaaattttttaaaaaataatactgtgttgtgtttatctaaatacgtaaactcaagctaccaaagagaaagatgttgtaatcatatctgcatgtcctaaattttgaatttagatattccaatttgcatcagtctttctgtggctcaaataatgatgattatggaatgaattttaatgtccctacttgtgaataattagctttctcaaatgtaggctttttacaaattttaaattttaaaatattagtttaaatgtgtgttatactgataaaatttcatctttcaaattatagtctattattttaaagggatttttcagtatgatatgggccattttgttcatctatcgcaaagtaaaaatgtaaaatccttacagagaattgtttcacaaaacttatatttcatgtcaattgtatttattttaataatagctcacaatgcctttagtaagtaataaagtctcttattagaatcttgtattttttaattgagctaatcaaaataattcagccaagtctatttgaaatagaaaactgtctatttaatatagtaaaatcaatgctcccttaatgttgttacaaagatatggtaactgtaatatgggtaaaagtttattcaagaaaagagtacttggtagaagattctttaacaaattgaggagattgattcataattcacatgtcaattttttatagtaatatgtacttctaatttattatttatacttaaattgtgacctgaaagatgagttggagataattagtcaaagggcacatggagtatggaagggggcatgttgattaaccatacatagaaataaatattctcttagttatccttgaaatcatatttatactattaatttgctcagtgcacttttttcaaatacagaaaaaagattctccattatagttacaaattttaggttggtgaatccaagtgaatgaaatatcagcataactatgtgggcaaaatagatagaattaaatgcatgaattttcctcagacttattttatctgcctctgtaatatttaactttagtacccaggcttgttcactacttctgctttacaggctttatttaaatctgaacaatcctacagggaaatcagaattaggaaaaaaatctggagaacaatatggttgaaatagaaacaagagaatgcacctaggttaattccctgaatcctacttgaacattgtataaatttctctttgcatataatacatatttgtgaatgagacatattcccaaaaaattcttatctctgtatgtgattggaaaagaaaagatcacatttgtatattcaacaatctttcacctatttcataagtcattttttcaccctgtatagtatgggaattattttttatgttaaatagaaactgaatgtactgggttgaatggtgtcctctccaaaattcatgtacttcctggagcctcagtatgtgaccttatttggaaatactgtggttgtggttgtaagtagctaagatgaggtcatactggagcagggcaggcccttaatccaatatgactggtgttccttataagagaagatagggcgggcatggtggctcacgcctgtaatcccagcactgtgggaggccaagccaggcaaatcgcttgaggctgaggagttcaagaccagcctggccaacatggcgaaaacccatctctactaaaaataaaattagccatgcgtggtgcttgtaatgtcagctacccaggagtctgaggcacaagaatcactcgaacctgggaggtggaggttgcgagatcacaccactgcactccagtgtgagcaacagaacgagactctgtctcaaaaaaaaaaaaaaaaaggaagaaagagaagatagagacacaggggagaatgccacatgaagctggaggcagagattggagtgatacattgtgggaaccctcagaagataggaaaaaagcatggaatagattctccctcagagttccagtagttgccaaccctgctaacatggttttgcacatctagcatccagaacagtgagaatgtatttctgctgttttaaggtacccagttcatggtaatttgttacagcaatcctaggaagctaatactctgacagaaaaaaatcttggataatatgcatgagaaaaatccttcaataaacacaaaattggtttcaaaatgttttcatgtaaaaataaattaacttttctgtaattagattgtgttttatagtaattcttgcctgcttcttagtctttgttgtaggatgcataataaaatacatgaatgagttttaaatggttagctttggagaatggttttgggaagttcctacagtacacagaaataaaagctaatgttactatgaatgcgcattacttttctaataaaatgtttctgaatctc

SEQ ID NO: 153471 - DNA, 4242 bp, Homo sapiens
  Payload ID: 10189
  Gene Symbol: METTL15
  Gene Name: methyltransferase like 15
  Uniprot ID: A6NJ78
  ENST ID: ENST00000407364
  CDS Start-End: 353-1576
gggcggggctaggccggagctgctggtgggaggcagccacttgagatcaccaggcctcctgtagaccggcgggtgcagggcccggtcccagagttaagggaaagtcgtttggaaaccccaggccaacaggaccctttggcagctgaggctggaaacagcggaaccaaaggcagacggtcctcagttgcttgggcggacgtggacccaatctgtccgtccttacaagtttcccccaggggcaggacctagacgcgcggcgcattcaggttctcctggaccgtagtggtagtcgctggcccgagttagaggccagctgagaagtcttcgtgcttcagatttgtttacctacaaaatgcttcggtatccatatttttgtagaatgtataaagaatgcctttcatgttggttggaatctggcatacctaatttaggtgtctggccaaacagaatacatactacagcagaaaaatatagagaatatgaagcccgggagcaaacagatcaaactcaagcccaggagttacacagatctcaagatagagattttgaaactatggctaaattacatattccagtaatggtggatgaagttgttcattgtttgtcaccacaaaaaggacagatttttctagatatgacatttggttcgggagggcacacaaaagccattctgcagaaggagtcagatattgttctctatgccttggacagagacccaacagcttatgcattagctgaacatctttcagagttgtatcctaaacaaatccgagctatgctgggccagttcagccaggcagaagccttattaatgaaagctggagtgcagccaggaacttttgatggagttcttatggatcttgggtgttcctccatgcaacttgatactcctgaaagaggtttttcccttcggaaagatggccctttggacatgagaatggatggtggcaggtaccctgacatgcccactgctgctgatgttgtgaatgctttagatcaacaggcacttgcatctatcctaagaacatacggggaggagaagcatgccaagaaaatcgcttcagcaattgttcaggcacgcagcatctaccccatcaccagaacccagcagcttgccagcatcgttgcaggagcatttcctccctctgctatttatacacggaaagacttactacagcgatctacccatattgccaccaagactttccaggctcttcgcatatttgtgaacaatgagctcaatgaactctacacgggactgaagacagctcagaagtttctgagacctggtggtcgtcttgttgccctctccttccattcactagaggatcgcatcgtcaaaagatttttgcttggaataagcatgacagaaagatttaacctaagtgttagacaacaagtgatgaaaacatctcaattgggttcagatcacgaaaacacggaagaagtctctatgagaagagctcctttaatgtgggaattgatacacaagaaggtacttagtccacaagatcaggatgtacaagataaccccagagggcgctcagccaagcttagagcagctatcaaattataagttatcatcatcttattcttcaaatttttttctcacaatttctctaatctttactcatgttatgtccctgaatgtcttggtataggtttaagtgtgggacagtctgaaaattgatagcatttagcatttcttttttctcaaaaagaaactgtaggaaatacatgacagagaaagttacactcagggagcagcagcacctccagactggaaaaatatgttaatctttgcatcatattggactcttgaaggcaatccttcctctggccaggaaattttttaaaaaataatactgtgttgtgtttatctaaatacgtaaactcaagctaccaaagagaaagatgttgtaatcatatctgcatgtcctaaattttgaatttagatattccaatttgcatcagtctttctgtggctcaaataatgatgattatggaatgaattttaatgtccctacttgtgaataattagctttctcaaatgtaggctttttacaaattttaaattttaaaatattagtttaaatgtgtgttatactgataaaatttcatctttcaaattatagtctattattttaaagggatttttcagtatgatatgggccattttgttcatctatcgcaaagtaaaaatgtaaaatccttacagagaattgtttcacaaaacttatatttcatgtcaattgtatttattttaataatagctcacaatgcctttagtaagtaataaagtctcttattagaatcttgtattttttaattgagctaatcaaaataattcagccaagtctatttgaaatagaaaactgtctatttaatatagtaaaatcaatgctcccttaatgttgttacaaagatatggtaactgtaatatgggtaaaagtttattcaagaaaagagtacttggtagaagattctttaacaaattgaggagattgattcataattcacatgtcaattttttatagtaatatgtacttctaatttattatttatacttaaattgtgacctgaaagatgagttggagataattagtcaaagggcacatggagtatggaagggggcatgttgattaaccatacatagaaataaatattctcttagttatccttgaaatcatatttatactattaatttgctcagtgcacttttttcaaatacagaaaaaagattctccattatagttacaaattttaggttggtgaatccaagtgaatgaaatatcagcataactatgtgggcaaaatagatagaattaaatgcatgaattttcctcagacttattttatctgcctctgtaatatttaactttagtacccaggcttgttcactacttctgctttacaggctttatttaaatctgaacaatcctacagggaaatcagaattaggaaaaaaatctggagaacaatatggttgaaatagaaacaagagaatgcacctaggttaattccctgaatcctacttgaacattgtataaatttctctttgcatataatacatatttgtgaatgagacatattcccaaaaaattcttatctctgtatgtgattggaaaagaaaagatcacatttgtatattcaacaatctttcacctatttcataagtcattttttcaccctgtatagtatgggaattattttttatgttaaatagaaactgaatgtactgggttgaatggtgtcctctccaaaattcatgtacttcctggagcctcagtatgtgaccttatttggaaatactgtggttgtggttgtaagtagctaagatgaggtcatactggagcagggcaggcccttaatccaatatgactggtgttccttataagagaagatagggcgggcatggtggctcacgcctgtaatcccagcactgtgggaggccaagccaggcaaatcgcttgaggctgaggagttcaagaccagcctggccaacatggcgaaaacccatctctactaaaaataaaattagccatgcgtggtgcttgtaatgtcagctacccaggagtctgaggcacaagaatcactcgaacctgggaggtggaggttgcgagatcacaccactgcactccagtgtgagcaacagaacgagactctgtctcaaaaaaaaaaaaaaaaaggaagaaagagaagatagagacacaggggagaatgccacatgaagctggaggcagagattggagtgatacattgtgggaaccctcagaagataggaaaaaagcatggaatagattctccctcagagttccagtagttgccaaccctgctaacatggttttgcacatctagcatccagaacagtgagaatgtatttctgctgttttaaggtacccagttcatggtaatttgttacagcaatcctaggaagctaatactctgacagaaaaaaatcttggataatatgcatgagaaaaatccttcaataaacacaaaattggtttcaaaatgttttcatgtaaaaataaattaacttttctgtaattagattgtgttttatagtaattcttgcctgcttcttagtctttgttgtaggatgcataataaaatacatgaatgagttttaaatggttagctttggagaatggttttgggaagttcctacagtacacagaaataaaagctaatgttactatgaatgcgcattacttttctaataaaatgtttctgaatctc

SEQ ID NO: 153472 - DNA, 4304 bp, Homo sapiens
  Payload ID: 10189
  Gene Symbol: METTL15
  Gene Name: methyltransferase like 15
  Uniprot ID: A6NJ78
  ENST ID: ENST00000406787
  CDS Start-End: 459-1298
ggcagcttggcgccaagaagctcagcctggctgcgcaggggaagctctttgcttgctcgtcaccgtggcaacgcgcgcggccgtttccggaggcggtggccaaagtgggcggggctaggccggagctgctggtgggaggcagccacttgagatcaccaggcctcctgtagaccggcgggtgcagggcccggtcccagagttaagggaaagtcgtttggaaaccccaggccaacaggaccctttggcagctgaggctggaaacagcggaaccaaaggcagacggtcctcagttgcttgggcggacgtggacccaatctgtccgtccttacaagtttcccccaggggcaggacctagacgcgcggcgcattcaggttctcctggaccgtagtggtagtcgctggcccgagttagaggccagctgagaagtcttcgtgcttcagatttgtttacctacaaaatgcttcggtatccatatttttgtagaatgtataaagaatgcctttcatgttggttggaatctggcatacctaatttaggtgtctggccaaacagaatacatactacagcagaaaaatatagagaatatgaagcccgggagcaaacagatcaaactcaagcccaggagttacacagatctcaagatagagattttgaaactatggctaaattacatattccagtaatggtggatgaagttgttcattgtttgtcaccacaaaaaggacagatttttctagatatgacatttggttcgggagggcacacaaaagccattctgcagaaggagtcagatattgttctctatgccttggacagagacccaacagcttatgcattagctgaacatctttcagagttgtatcctaaacaaatccgagctatgctgggccagttcagccaggcagaagccttattaatgaaagctggagtgcagccaggaacttttgatggagttcttatggatcttgggtgttcctccatgcaacttgatactcctgaaagaggtttttcccttcggaaagatggccctttggacatgagaatggatggtggcagatcaacaggcacttgcatctatcctaagaacatacggggaggagaagcatgccaagaaaatcgcttcagcaattgttcaggcacgcagcatctaccccatcaccagaacccagcagcttgccagcatcgttgcaggagcatttcctccctctgctatttatacacggaaagacttactacagcgatctacccatattgccaccaagactttccaggctcttcgcatatttgtgaacaatgagctcaatgaactctacacgggactgaagacagctcagaagtttctgagacctggtggtcgtcttgttgccctctccttccattcactagaggatcgcatcgtcaaaagatttttgcttggaataagcatgacagaaagatttaacctaagtgttagacaacaagtgatgaaaacatctcaattgggttcagatcacgaaaacacggaagaagtctctatgagaagagctcctttaatgtgggaattgatacacaagaaggtacttagtccacaagatcaggatgtacaagataaccccagagggcgctcagccaagcttagagcagctatcaaattataagttatcatcatcttattcttcaaatttttttctcacaatttctctaatctttactcatgttatgtccctgaatgtcttggtataggtttaagtgtgggacagtctgaaaattgatagcatttagcatttcttttttctcaaaaagaaactgtaggaaatacatgacagagaaagttacactcagggagcagcagcacctccagactggaaaaatatgttaatctttgcatcatattggactcttgaaggcaatccttcctctggccaggaaattttttaaaaaataatactgtgttgtgtttatctaaatacgtaaactcaagctaccaaagagaaagatgttgtaatcatatctgcatgtcctaaattttgaatttagatattccaatttgcatcagtctttctgtggctcaaataatgatgattatggaatgaattttaatgtccctacttgtgaataattagctttctcaaatgtaggctttttacaaattttaaattttaaaatattagtttaaatgtgtgttatactgataaaatttcatctttcaaattatagtctattattttaaagggatttttcagtatgatatgggccattttgttcatctatcgcaaagtaaaaatgtaaaatccttacagagaattgtttcacaaaacttatatttcatgtcaattgtatttattttaataatagctcacaatgcctttagtaagtaataaagtctcttattagaatcttgtattttttaattgagctaatcaaaataattcagccaagtctatttgaaatagaaaactgtctatttaatatagtaaaatcaatgctcccttaatgttgttacaaagatatggtaactgtaatatgggtaaaagtttattcaagaaaagagtacttggtagaagattctttaacaaattgaggagattgattcataattcacatgtcaattttttatagtaatatgtacttctaatttattatttatacttaaattgtgacctgaaagatgagttggagataattagtcaaagggcacatggagtatggaagggggcatgttgattaaccatacatagaaataaatattctcttagttatccttgaaatcatatttatactattaatttgctcagtgcacttttttcaaatacagaaaaaagattctccattatagttacaaattttaggttggtgaatccaagtgaatgaaatatcagcataactatgtgggcaaaatagatagaattaaatgcatgaattttcctcagacttattttatctgcctctgtaatatttaactttagtacccaggcttgttcactacttctgctttacaggctttatttaaatctgaacaatcctacagggaaatcagaattaggaaaaaaatctggagaacaatatggttgaaatagaaacaagagaatgcacctaggttaattccctgaatcctacttgaacattgtataaatttctctttgcatataatacatatttgtgaatgagacatattcccaaaaaattcttatctctgtatgtgattggaaaagaaaagatcacatttgtatattcaacaatctttcacctatttcataagtcattttttcaccctgtatagtatgggaattattttttatgttaaatagaaactgaatgtactgggttgaatggtgtcctctccaaaattcatgtacttcctggagcctcagtatgtgaccttatttggaaatactgtggttgtggttgtaagtagctaagatgaggtcatactggagcagggcaggcccttaatccaatatgactggtgttccttataagagaagatagggcgggcatggtggctcacgcctgtaatcccagcactgtgggaggccaagccaggcaaatcgcttgaggctgaggagttcaagaccagcctggccaacatggcgaaaacccatctctactaaaaataaaattagccatgcgtggtgcttgtaatgtcagctacccaggagtctgaggcacaagaatcactcgaacctgggaggtggaggttgcgagatcacaccactgcactccagtgtgagcaacagaacgagactctgtctcaaaaaaaaaaaaaaaaaggaagaaagagaagatagagacacaggggagaatgccacatgaagctggaggcagagattggagtgatacattgtgggaaccctcagaagataggaaaaaagcatggaatagattctccctcagagttccagtagttgccaaccctgctaacatggttttgcacatctagcatccagaacagtgagaatgtatttctgctgttttaaggtacccagttcatggtaatttgttacagcaatcctaggaagctaatactctgacagaaaaaaatcttggataatatgcatgagaaaaatccttcaataaacacaaaattggtttcaaaatgttttcatgtaaaaataaattaacttttctgtaattagattgtgttttatagtaattcttgcctgcttcttagtctttgttgtaggatgcataataaaatacatgaatgagttttaaatggttagctttggagaatggttttgggaagttcctacagtacacagaaataaaagctaatgttactatgaatgcgcattacttttctaataaaatgtttctgaatctc

SEQ ID NO: 153473 - DNA, 795 bp, Homo sapiens
  Payload ID: 10189
  Gene Symbol: METTL15
  Gene Name: methyltransferase like 15
  ENST ID: ENST00000403099
  CDS Start-End: 387-668
gcgcgcggccgtttccggaggcggtggccaaagtgggcggggctaggccggagctgctggtgggaggcagccacttgagatcaccaggcctcctgtagaccggcgggtgcagggcccggtcccagagttaagggaaagtcgtttggaaaccccaggccaacaggaccctttggcagctgaggctggaaacagcggaaccaaaggcagacggtcctcagttgcttgggcggacgtggacccaatctgtccgtccttacaagtttcccccaggggcaggacctagacgcgcggcgcattcaggttctcctggaccgtagtggtagtcgctggcccgagttagaggccagctgagaagtcttcgtgcttcagatttgtttacctacaaaatgcttcggtatccatatttttgtagaatgtataaagaatgcctttcatgttggttggaatctggcatacctaatttaggtgtctggccaaacagaatacatactacagcagaaaaatatagagaatatgaagcccgggagcaaacagatcaaactcaagcccaggagttacacagatctcaagatagagattttgaaactatggctaaattacatattccagtaatggtggatgaagttgttcattgtttgtcaccacaaaaaggacagcaaaagaagtaaactgtggatatttaatatattcataaagatggagaatttcccacttgagtgtattctattctgaattttggaaccaagctagctgattttacacgtttgattttatgattacatatggaaaaaaatc

SEQ ID NO: 153474 - DNA, 831 bp, Homo sapiens
  Payload ID: 10189
  Gene Symbol: METTL15
  Gene Name: methyltransferase like 15
  Uniprot ID: A6NJ78
  ENST ID: ENST00000437814
  CDS Start-End: 105-404
gacgcgcggcgcattcaggttctcctggaccgtagtggtagtcgctggcccgagttagaggccagctgagaagtcttcgtgcttcagatttgtttacctacaaaatgcttcggtatccatatttttgtagaatgtataaagaatgcctttcatgttggttggaatctggcatacctaatttaggtgtctggccaaacagaatacatactacagcagaaaaatatagagaatatgaagcccgggagcaaacagatcaaactcaagcccaggagttacacagatctcaagatagagattttgaaactatggctaaattacatattccagtaatggtggatgaagttgttcattgtttgtcaccacaaaaaggacagagtcttggtgtgaggagtgtgggaatatgaatcctacagcaaaagaagtaaactgtggatatttaatatattcataaagatggagaatttcccacttgagtgtattctattctgaattttggaaccaagctagctgattttacacgtttgattttatgattacatatggaaaaaaatcaaaaccgcaatgttacaggtctctcacacctttcactgtacttctgtaataaagggaattagaataatttattggttaaataaggtaactataaaccaatttttaacaaatttgattttgagttacgatgattgcgtattccaggtacaacttaaattgctgtaactgttttgttaagttcttttttggataaaaaatcttctaaaatcttatttttctgaaatgtaaacttaccttatagtatatgcatcttaattaaactgttcttgatcgacttaa

SEQ ID NO: 153475 - DNA, 1868 bp, Homo sapiens
  Payload ID: 10189
  Gene Symbol: METTL15
  Gene Name: methyltransferase like 15
  ENST ID: ENST00000451385
  CDS Start-End: 377-871
gtttccggaggcggtggccaaagtgggcggggctaggccggagctgctggtgggaggcagccacttgagatcaccaggcctcctgtagaccggcgggtgcagggcccggtcccagagttaagggaaagtcgtttggaaaccccaggccaacaggaccctttggcagctgaggctggaaacagcggaaccaaaggcagacggtcctcagttgcttgggcggacgtggacccaatctgtccgtccttacaagtttcccccaggggcaggacctagacgcgcggcgcattcaggttctcctggaccgtagtggtagtcgctggcccgagttagaggccagctgagaagtcttcgtgcttcagatttgtttacctacaaaatgcttcggtatccatatttttgtagaatgtataaagaatgcctttcatgttggttggaatctggcatacctaatttaggtgtctggccaaacagaatacatactacagcagaaaaatatagagaatatgaagcccgggagcaaacagatcaaactcaagcccaggagttacacagatctcaagatagagattttgaaactatggctaaattacatattccagtaatggtggatgaagttgttcattgtttgtcaccacaaaaaggacagattttgttcatgtgtattgtcttatttgcatatcccaatttcctggtgatgtggactaggatggtgtatttatttccatttacacacgaggaaactgaggctcagagaaatttttctagatatgacatttggttcgggagggcacacaaaagccattctgcagaaggagtcagatattgttctctatgccttggacagagacccaacagcttatgcattagctgaacatctttcagagttgtatcctaaacaaatccgagctatgctgggccagttcagccaggcagaagccttattaatgaaagctggagtgcagccaggaacttttgatggagttcttatggatcttgggtgttcctccatgcaacttgatactcctgaaagaggtttttcccttcggaaagatggccctttggacatgagaatggatggtggcaggtaccctgacatgcccactgctgctgatgttgtgaatgctttagatcaacaggcacttgcatctatcctaagaacatacggggaggagaagcatgccaagaaaatcgcttcagcaattgttcaggcacgcagcatctaccccatcaccagaacccagcagcttgccagcatcgttgcaggagcatttcctccctctgctatttatacacggaaagacttactacagcgatctacccatattgccaccaagactttccaggctcttcgcatatttgtgaacaatgagctcaatgaactctacacgggactgaagacagctcagaagtttctgagacctggtggtcgtcttgttgccctctccttccattcactagaggatcgcatcgtcaaaagatttttgcttggaataagcatgacagaaagatttaacctaagtgttagacaacaagtgatgaaaacatctcaattgggttcagatcacgaaaacacggaagaagtctctatgagaagagctcctttaatgtgggaattgatacacaagaaggctttatttaaatctgaacaatcctacagggaaatcagaattaggaaaaaaatctggagaacaatatggttgaaatagaaacaagagaatgcacctaggttaattccctgaatcctacttgaacattgtataaatttctctttgcatataatacatatttgtgaatgagacatattcccaaaaaattcttatctctgtatgtgattggaaaagaaaagatcacatttgtatattcaacaa

SEQ ID NO: 153476 - DNA, 718 bp, Homo sapiens
  Payload ID: 10189
  Gene Symbol: METTL15
  Gene Name: methyltransferase like 15
  ENST ID: ENST00000634762
  CDS Start-End: 105-428
gacgcgcggcgcattcaggttctcctggaccgtagtggtagtcgctggcccgagttagaggccagctgagaagtcttcgtgcttcagatttgtttacctacaaaatgcttcggtatccatatttttgtagaatgtataaagaatgcctttcatgttggttggaatctggcatacctaatttaggtgtctggccaaacagaatacatactacagcagaaaaatatagagaatatgaagcccgggagcaaacagatcaaactcaagcccaggagttacacagatctcaagatagagattttgaaactatggctaaattacatattccagtaatggtggatgaagttgttcattgtttgtcaccacaaaaaggacagcaactgctgttgcgaaaaagtggacgaagacctctcttaactgcttcctgctgacaggaggcgctgttttggaaaagcggcagttaggactcctcctgagactctccaggatgttagaactggctttggcctgtggaacacctcgtcttgtgcattctatttcctgaataaagggtcttctttgttttccctgcaacgagtggtcttttgctcctcatttctgtggtcctttacccattctcccaacccaatggcatttcaaaactatttaaaatttaaaaaaattattaatataattgcttacattattactctgtgatttaataaactgagttagataaact

SEQ ID NO: 153477 - DNA, 1178 bp, Homo sapiens
  Payload ID: 10189
  Gene Symbol: METTL15
  Gene Name: methyltransferase like 15
  ENST ID: ENST00000634627
  CDS Start-End: 108-932
ctagacgcgcggcgcattcaggttctcctggaccgtagtggtagtcgctggcccgagttagaggccagctgagaagtcttcgtgcttcagatttgtttacctacaaaatgcttcggtatccatatttttgtagaatgtataaagaatgcctttcatgttggttggaatctggcatacctaatttaggtgtctggccaaacagaatacatactacagcagaaaaatatagagaatatgaagcccgggagcaaacagatcaaactcaagcccaggagttacacagatctcaagatagagattttgaaactatggctaaattacatattccagtaatggtggatgaagttgttcattgtttgtcaccacaaaaaggacagatttttctagatatgacatttggttcgggagggcacacaaaagccattctgcagaaggagtcagatattgttctctatgccttggacagagacccaacagcttatgcattagctgaacatctttcagagttgtatcctaaacaaatccgagctatgctgggccagttcagccaggcagaagccttattaatgaaagctggagtgcagccaggaacttttgatggagttcttatggatcttgggtgttcctccatgcaacttgatactcctgaaagaggtttttcccttcggaaagatggccctttggacatgagaatggatggtggcaggtaccctgacatgcccactgctgctgatgttgtgaatgctttagatcaacaggcacttgcatctatcctaagaacatacggggaggagaagcatgccaagaaaatcgcttcagcaattgttcaggcacgcagcatctaccccatcaccagaacccagcagcttgccagcatcgttgcaggttgcactggagaatctaaactcttttggagatgtcccaaggcctaacctgcacctcttcacagcataggcattttcccccaataaactacttattctcccaacttcatctcagtgtcagcttcctagaagacccaaacaacgtggatggccttcaaagaaaaatggagggaaaaatggaaagcttttccactaagatcagatacaagacagggatgcctgctttcaccacttccattcaacatagtactggaaatactggcaagaaaaattacacaagaaaaagaaataaaa

SEQ ID NO: 153478 - DNA, 1182 bp, Homo sapiens
  Payload ID: 10189
  Gene Symbol: METTL15
  Gene Name: methyltransferase like 15
  ENST ID: ENST00000634721
  CDS Start-End: 105-554
gacgcgcggcgcattcaggttctcctggaccgtagtggtagtcgctggcccgagttagaggccagctgagaagtcttcgtgcttcagatttgtttacctacaaaatgcttcggtatccatatttttgtagaatgtataaagaatgcctttcatgttggttggaatctggcatacctaatttaggtgtctggccaaacagaatacatactacagcagaaaaatatagagaatatgaagcccgggagcaaacagatcaaactcaagcccaggagttacacagatctcaagatagagattttgaaactatggctaaattacatattccagtaatggtggatgaagttgttcattgtttgtcaccacaaaaaggacagaattctgtcaggcttcatggtctttttcccatgtgctcatctttctgcacctgttaccagaacttcattctacagcagccctgcttttgctgtcatttgaaatcggttccaaatttttcctcttgtaactctctccccatgctgttactcggttatctaattttgcatagatctttctaataagatgcttcttcttactgatctctctctctctctctctctctgtgtgtgtgtgtgtgtttgtctggagaatacacaatcaaatgtatttcctcaccttcaatgacttaggtaaaataatgttatctatttaattttcccccagaatcaattgccccaaaatggcttataccctgagaacttaatatacttttttttaaatatctttaactaaaatttagtgagctatttttattgttgttaattttttaagtcctttttttctgtagcctggaagctttttctttgatcattaaagtaggaacctcaatttgaaaacttgccacaactgaacatatgtcccctcttgtattagaaagagttataattttaatacatttttcaaattatgatttatgtctctttaggagagattctgtttgttttttaaagagccaagccaaaattttttcttactttataattaatgggattacatttatgttttaacttaaatctgaattttagaggtaattgtaattcagaagaaaatgcaaacatcaaaatatcacatgtatagctctttaaatatgaacattaattatctttggagattgattattgccaaaataaaatcactatatctctt

SEQ ID NO: 153479 - DNA, 1419 bp, Homo sapiens
  Payload ID: 10189
  Gene Symbol: METTL15
  Gene Name: methyltransferase like 15
  ENST ID: ENST00000532947
  CDS Start-End: 254-526
gaaagtcgtttggaaaccccaggccaacaggaccctttggcagctgaggctggaaacagcggaaccaaaggcagacggtcctcagttgcttgggcggacgtggacccaatctgtccgtccttacaagtttcccccaggggcaggacctagacgcgcggcgcattcaggttctcctggaccgtagtggtagtcgctggcccgagttagaggccagctgagaagtcttcgtgcttcagatttgtttacctacaaaatgcttcggtatccatatttttgtagaatgtataaagaatgcctttcatgttggttggaatctggcatacctaatttaggtgtctggccaaacagaatacatactacagcagaaaaatatagagaatatgaagcccgggagcaaacagatcaaactcaagcccaggagttacacagatctcaagatagagattttgaaactatggctaaattacatattccagtaatggtggatgaagttgttcattgtttgtcaccacaaaaaggacagtaaacaaatccgagctatgctgggccagttcagccaggcagaagccttattaatgaaagctggagtgcagccaggaacttttgatggagttcttatggatcttgggtgttcctccatgcaacttgatactcctgaaagaggtttttcccttcggaaagatggccctttggacatgagaatggatggtggcaggttgcactggagaatctaaactcttttggagatgtcccaaggcctaacctgcacctcttcacagcataggcattttcccccaataaactacttattctcccaacttcatctcagtgtcagcttcctagaagacccaaacaacgtggatggccttcaaagaaaaatggaggctgcacatgttcttcggaaaaagatctaaaagcatcaccttttgctttgtctgctggtgcttaagtttgaatatgtcatcccactgcctttggccttcatagcttctggcccaggaaagggaagaattacatgaagacacatggagaggggagccaaggggagaggttcagaagaaacaaagcctgctgatatcttgatcttggggtctaacctccagaacggtgatgaaatgtctgttatttaagccattcggtctgtggtattggtgacaacagtctaagcagactaatgcaagccctgacacagactttatgcaatttaattctcttttctcagtcatgattttctcctctgtaataagctctaattatcagtgatgaaaattaaatgtgtaaatgtgtacattattgtttaaagacaagtaaagaaaaccaacacccttgtttttgtttaacggatctacctatttttaggaaatgtttaagcagatgtggattttttttttaacacaataaaatactatccttttctca

SEQ ID NO: 153480 - DNA, 1353 bp, Homo sapiens
  Payload ID: 10189
  Gene Symbol: METTL15
  Gene Name: methyltransferase like 15
  ENST ID: ENST00000634973
  CDS Start-End: 108-932
ctagacgcgcggcgcattcaggttctcctggaccgtagtggtagtcgctggcccgagttagaggccagctgagaagtcttcgtgcttcagatttgtttacctacaaaatgcttcggtatccatatttttgtagaatgtataaagaatgcctttcatgttggttggaatctggcatacctaatttaggtgtctggccaaacagaatacatactacagcagaaaaatatagagaatatgaagcccgggagcaaacagatcaaactcaagcccaggagttacacagatctcaagatagagattttgaaactatggctaaattacatattccagtaatggtggatgaagttgttcattgtttgtcaccacaaaaaggacagatttttctagatatgacatttggttcgggagggcacacaaaagccattctgcagaaggagtcagatattgttctctatgccttggacagagacccaacagcttatgcattagctgaacatctttcagagttgtatcctaaacaaatccgagctatgctgggccagttcagccaggcagaagccttattaatgaaagctggagtgcagccaggaacttttgatggagttcttatggatcttgggtgttcctccatgcaacttgatactcctgaaagaggtttttcccttcggaaagatggccctttggacatgagaatggatggtggcaggtaccctgacatgcccactgctgctgatgttgtgaatgctttagatcaacaggcacttgcatctatcctaagaacatacggggaggagaagcatgccaagaaaatcgcttcagcaattgttcaggcacgcagcatctaccccatcaccagaacccagcagcttgccagcatcgttgcaggttgcactggagaatctaaactcttttggagatgtcccaaggcctaacctgcacctcttcacagcataggcattttcccccaataaactacttattctcccaacttcatctcagtgtcagcttcctagaagacccaaacaacgtggatggccttcaaagaaaaatggagggtttttatggaggacacaaacaaatggaaaaacattccatgctcatgtatagaaagaatcaatattgtgaaaatggacatactgcccaagtaatttatagattcagtgctattcccctcaagctaccattgactttcttcacagaattagaaaaagctactttaaatttcatatggaaccaaaaaagggcccatatagccaagaccatactaagcaaaaagaacaaagctgaaggcatcacactacctgacttcaaactatcctacaaggctacagtaaccaaaacagcataatactg

SEQ ID NO: 153481 - DNA, 5711 bp, Homo sapiens
  Payload ID: 10190
  Gene Symbol: METTL16
  Gene Name: methyltransferase like 16
  Uniprot ID: Q86W50
  ENST ID: ENST00000263092
  CDS Start-End: 129-1817
aagatggcggcgcgctgggagcgtatcatctgcgtttctaggagcttcgctatgcggctgctttaagattctagggttgtacaggcccacgccagacacgacgtctggcaggaacctcggcctcagagatggctctgagtaaatcaatgcatgcaagaaatagatacaaggacaaacctcctgactttgcatatctggcatccaaatatccagattttaagcagcatgttcagataaatctgaatggaagagtgagccttaattttaaagaccccgaagcagtcagagctctgacgtgtactctcctaagggaagattttggactttctattgatattccattggagagactaattcccacagttcccttgagactcaactatattcactgggtagaagatctgatcggtcaccaggattctgacaaaagtactctccgaagaggaattgacataggcacgggggcatcttgcatctaccccttacttggagcaaccttgaatggctggtatttcctcgcaacagaagtggatgatatgtgtttcaactatgcaaagaaaaatgtggaacagaataacttatctgatctcataaaagtggtgaaagtgccacagaagacactcctgatggatgctcttaaagaagaatctgagataatctatgacttttgcatgtgcaaccctcccttttttgccaatcaattggaagccaagggagtaaactcacgaaatcctcgaagacctccgcctagttctgttaatacaggaggcatcacagagatcatggcagaaggaggtgaattagagtttgttaaaaggatcatccatgacagtctacaacttaaaaaaagattaagatggtatagctgcatgctgggaaagaaatgcagcctggcgcctctgaaggaggagcttcgcatacaaggggttcccaaagtaacgtacactgaattctgtcaaggtcggacaatgagatgggccttagcttggagtttttatgatgatgtcacagtaccatcaccaccaagtaagcgaagaaaattagagaaaccgagaaaacccataacattcgtggtgctggcgtccgtgatgaaggaattatccctcaaagcatcacctctgcgctcggagacggcggaaggcatagtcgttgtcacgacatggattgaaaaaattctcactgatttgaaggtccagcataaacgagttccctgtggaaaagaggaagtcagccttttcctaacggccatagaaaactcctggattcatttaaggagaaagaaaagagagcgtgtgagacagctgagagaagttccccgagctcctgaggacgtcattcaggccttggaagagaaaaagcccacccccaaagagtctggcaatagccaagaactggccaggggcccccaggagaggaccccctgtgggcctgctctgcgggaaggcgaggctgccgctgtggagggcccgtgcccgagccaggagtccctgtcccaggaggaaaacccggaacccacggaggatgaaaggagtgaggaaaagggaggggtggaggttttggaaagttgtcaaggctctagcaacggagcccaggaccaagaggcttctgagcagttcggcagcccagtggctgaaagggggaaacgtctcccaggagtggccggacagtacctgtttaagtgtttgataaacgttaagaaggaggtggacgatgccttagtggagatgcactgggttgagggccagaacagggatctgatgaaccagctttgcacctacatacgtaaccaaattttcaggcttgttgcagttaactagaaacctcctgcacagttggaaacgtgttgatagtaacttgctttggagtggcctgtggggtggcaagaggaatcctaccagcggcccattagtagcacgatgtggaattatcttcgaaaacaaaaacctatgaatctgtcccccacctccccccgcctccttcccgctttttgagttacagggagtcgtagtgtggtcatttacaaggaggaattgtggtcatcagtaacaacagaaagccctcagtaaactcccgagggattgcaagctggctcaagctggcccctcagctctggactgcctctgcaaggtcagaagggttgtttgtggagtctgggctgggcagcactgcctagaatatcatgctgtctctgtcacccaagggtgtttcttgaggaggggtggctctctctgcctccagctggaggccctggtaccctgttctaggtcactcttcaagatggggcctaccttgcatcaatcccacaaagggagctgtatggtgggtggtggggaatctgggagagaaaccttagtaatgctgggaaggagcagcagagtctggggaccacccggtaaatggcacattcctgacacctggctgttttgatgttgcttatttcagaagcagaattaggtaagcaaaactccccggtgtgactgaggcacacagaaggcacccatacccccacctccagcctgttgacagtaccattttgtagcagttttactactgtgtgatttttgtttggacatctgaagtagagcttgttttgtttttaaataagaatattcacaaattaaaaaccagcggtcctatttgaatcctggggttagctgagtgagcggctgatgatagaaatgagaaatagaacaaaatagtatgtgccgtaggtagcttaagaaagtctcagatattttgttgctgatcaaatactgtttttttgtggcttcacttgtaatcccccctgtacttacctactcacattggagagttctgaggccggagtaactgtgtccttgaaacacgtttctaattggaatgccagggttcagtagccgtccccccggaaaggggtgaccttttgctgtgcttgatgttgcatcagcagcctagggttctgtttagactaaaatcttggccagagctccttgccatctgctaagaagactggggctgagtagttaagccagccttctgagaggtggctgttggtcaggacgggaagctggtgaccttggcatgtcttggcagcagctagatcaggccctcggcagagacacaggaagcggaactgctgtgccttaacttggctgtggagctggagctggagaaggcagcatactgaccagtggctttttgattgattgtttgttatgaggtggagttttactcttgttgtctaggctggagtgccgtggtgcgatcttagctcactgcaacccccgcctcccgggttcaagcgattctcctgcctcagcctcccaagtagctgggattacaggcacgcgccaccacgcctggctaattttgtgtttttggtagagatgggatttcaccatgttggccaggctaatctcgaactcatgatctcgggtgatccgcccaccttggcctcccaaagtgctgggattacagccgtgagccactactcccagcctctgaccagtgttcttaacctggtccgtggacctccagagagtccatgtacctcctagagttacttctaaaagctctgtgagcatgtgtgtgtgtgtgtgtgtgtgtgtgtattttttttcctggagagagggttcccagaaccctcagacacagacaaaggggtcaataacccactaaggattaagaatcattattctagtccaagcattcatgtgtcaggctgcaaaaaacaatacccagggtcacacagagccaagactcaattcaggaccgtggattcccctggtctagaaattttctgctgtgccagcccacaccaccccactgtccttacctcgagtgaatattacatttgagtcatttgctgggcccaaacctagtttccttggtataattttaggataattgtttaagtggcaactattcattcagtaagtagtaagtacttattgtttgcttgtttcattatgaaagagtggcacatgctcattaaagatttggaaaaatgaaagtcaaaacaacaaaatcaccccgagtcccaaccttctgtaacataaccactcttggcattggcgtgttcctttctagtctctctgtagacggggtgtgtgagtgtgtgggtttaactttggttgtcctcatgctgcgtattcagttttgtattctggtcctttgttcatttaacatcttacaagtatttgtccatgttgtaacagtagtgtattagcttacactccttgcctgttcaaaatgtctttcaggcacagcactggcctttaagcctgtgtcgtagggatttccagagaatgctctgtgtattgaagcacagaaggtgtttctgtgtctcagtgtgtttctgtccctaggtttaaggcttcatgtcatggaggagattttatagatgtcaagctaatgaccttagagttttaaaaaatccgtgaccgtggccaggcgcagtggctcacgcctgtaatcccagcactgtgaggctgagatgggcgcatcgcatgaggtcgggagtttgagaccagcctggccaacatggcgaaaccccgtctctactcaaaatacaaaaattagccgggcatgatagcacgtgcctgtaatcccagctactcgggaggctgaggcaggagactcgcttgaacctgggaggtggaggttgcagtgagccgagaatgccactgcactacagcctgggcgacaaagtgggactgtctcaaaaaaaaaaaaaaaaaaaaaaaaaaaggaacccatgagcaggccagctttcagtctggagccgagtgccttctgtgcatttggatgtttccatttccttccctgagaagattttcttaggctacctagtgagagaacattgaaaatatttttaaaggacatctaagcattgttttggtcatgcatatgctttataattgtgtgttgtttcatagcatatacctctggtacaggtgggcaagtttttctttgaagaaatgggttattgactcatatgtcataaccttgagtgttactctcccggtgtccagaggtcacattcatgttgcggggttggtatgaaattaaatcttggtgatgtgaccctacattctcttctggtccctagaatcggcttctggtctcctgataactgaagtggagacagaagttgagcctgttgcccaggcaaactaaagctgcttttgttcttcggaatctgctttgcctccgtcagcctgcttccttccccacacatgctggccgcactgtccccactccagacctctgctgtgtgtcctgggcagggccgcgttttggcagtaccctttcaactcatcctaagcttcgtgtagattactttagtatatattttttataaaacataaagcctttcctctcgatggaaatcaaagcttaccatgtgagcactcgaacttctaagttgtgacaggaataacaaaactgcaaggagtggaaaagatggaaaagcctgtgggaaatccgaggccttttgaaagaagggagctgatgacttcacgaccagctcctggagcccctcctttctgctgaagccgcggcatttccctccgtggccacacgagggcacccttggcccttttatcaaagcgccttcacttccccgtgggaatggagacaagtctgtccacggtgttttcttgaaatacccagttgctacccagatttgtatttttatgtaaacaaatacattttcacagaaataaaatttg

SEQ ID NO: 153482 - DNA, 1602 bp, Homo sapiens
  Payload ID: 10190
  Gene Symbol: METTL16
  Gene Name: methyltransferase like 16
  ENST ID: ENST00000574752
  CDS Start-End: 78-584
atgcggctgctttaagattctagggttgtacaggcccacgccagacacgacgtctggcaggaacctcggcctcagagatggctctgagtaaatcaatgcatgcaagaaatagatacaaggacaaacctcctgactttgcatatctggcatccaaatatccagattttaagcagcatgttcagataaatctgaatggaagagtgagccttaattttaaagaccccgaagcagtcagagctctgacgtgtactctcctaagggaagattttggactttctattgatattccattggagagactaattcccacagttcccttgagactcaactatattcactgggtagaagatctgatcggtcaccaggattctgacaaaagtactctccgaagaggaattgacataggcacgggggcatcttgcatctaccccttacttggagcaaccttgaatggctggtatttcctcgcaacagaagtggatgatatgtgtttcaactatgcaaagaaaaatgtggaacagaataacttatctgatctcataaaagggagtaaactcacgaaatcctcgaagacctccgcctagttctgttaatacaggaggcatcacagagatcatggcagaaggaggtgaattagagtttgttaaaaggatcatccatgacagtctacaacttaaaaaaagattaagatggtatagctgcatgctgggaaagaaatgcagcctggcgcctctgaaggaggagcttcgcatacaaggggttcccaaagtaacgtacactgaattctgtcaaggtcggacaatgagatgggccttagcttggagtttttatgatgatgtcacagtaccatgctgctataggtaaaggaaaaccacctctgagctggccagactgaatgattttccgggcagtgacagaacagcatctgttgcttctcacagttccctcccaggtgtggttggcttcttgttgcctggagattcccagctgaagtgtctgcacacactgcccagcagtcaccaccaagtaagcgaagaaaattagagaaaccgagaaaacccataacattcgtggtgctggcgtccgtgatgaaggaattatccctcaaagcatcacctctgcgctcggagacggcggaaggcatagtcgttgtcacgacatggattgaaaaaattctcactgatttgaaggtccagcataaacgagttccctgtggaaaagaggaagtcagccttttcctaacggccatagaaaactcctggattcatttaaggagaaagaaaagagagcgtgtgagacagctgagagaagttccccgagctcctgaggacgtcattcaggccttggaagagaaaaagcccacccccaaagagtctggcaatagccaagaactggccaggggcccccaggagaggaccccctgtgggcctgctctgcgggaaggcgaggctgccgctgtggagggcccgtgcccgagccaggagtccctgtcccaggaggaaaacccggaacccacggaggatgaaaggagtgaggaaaagggaggggtggaggttttggaaagttgtcaaggctctagcaacggagcccaggaccaagagg

SEQ ID NO: 153483 - DNA, 1944 bp, Homo sapiens
  Payload ID: 10190
  Gene Symbol: METTL16
  Gene Name: methyltransferase like 16
  ENST ID: ENST00000576556
  CDS Start-End: 131-496
acaagatggcggcgcgctgggagcgtatcatctgcgtttctaggagcttcgctatgcggctgctttaagattctagggttgtacaggcccacgccagacacgacgtctggcaggaacctcggcctcagagatggctctgagtaaatcaatgcatgcaagaaatagatacaaggacaaacctcctgactttgcatatctggcatccaaatatccagattttaagcagcatgttcagataaatctgaatggaagagtgagccttaattttaaagaccccgaagcagtcagagctctgacgtgtactctcctaagggaagattttggactttctattgatattccattggagagactaattcccacagttcccttgagactcaactatattcactgggtagaagatctgatcggtcaccaggattctgacaaaagtactctccgaagaggaattgacatagggagtaaactcacgaaatcctcgaagacctccgcctagttctgttaatacaggaggcatcacagagatcatggcagaaggaggtgaattagagtttgttaaaaggatcatccatgacagtctacaacttaaaaaaagattaagatggtatagctgcatgctgggaaagaaatgcagcctggcgcctctgaaggaggagcttcgcatacaaggggttcccaaagtaacgtacactgaattctgtcaaggtcggacaatgagatgggccttagcttggagtttttatgatgatgtcacagtaccatcaccaccaagtaagcgaagaaaattagagaaaccgagaaaacccataacattcgtggtgctggcgtccgtgatgaaggaattatccctcaaagcatcacctctgcgctcggagacggcggaaggcatagtcgttgtcacgacatggattgaaaaaattctcactgatttgaaggtccagcataaacgagttccctgtggaaaagaggaagtcagccttttcctaacggccatagaaaactcctggattcatttaaggagaaagaaaagagagcgtgtgagacagctgagagaagttccccgagctcctgaggacgtcattcaggccttggaagagaaaaagcccacccccaaagagtctggcaatagccaagaactggccaggggcccccaggagaggaccccctgtgggcctgctctgcgggaaggcgaggctgccgctgtggagggcccgtgcccgagccaggagtccctgtcccaggaggaaaacccggaacccacggaggatgaaaggagtgaggaaaagggaggggtggaggttttggaaagttgtcaaggctctagcaacggagcccaggaccaagaggcttctgagcagttcggcagcccagtggctgaaagggggaaacgtctcccaggagtggccggacagtacctgtttaagtgtttgataaacgttaagaaggaggtggacgatgccttagtggagatgcactgggttgagggccagaacagggatctgatgaaccagctttgcacctacatacgtaaccaaattttcaggcttgttgcagttaactagaaacctcctgcacagttggaaacgtgttgatagtaacttgctttggagtggcctgtggggtggcaagaggaatcctaccagcggcccattagtagcacgatgtggaattatcttcgaaaacaaaaacctatgaatctgtcccccacctccccccgcctccttcccgctttttgagttacagggagtcgtagtgtggtcatttacaaggaggaattgtggtcatcagtaacaacagaaagccctcagtaaactcccgagggattgcaagctggctcaagctggcccctcagctctggactgcctctgcaaggtcagaagggttgtttgtggagtctgggctgggcagcactgcctagaatatcatgctgtctctgtcacccaa

SEQ ID NO: 153484 - DNA, 575 bp, Homo sapiens
  Payload ID: 10190
  Gene Symbol: METTL16
  Gene Name: methyltransferase like 16
  ENST ID: ENST00000576976
  CDS Start-End: 132-575
cacaagatggcggcgcgctgggagcgtatcatctgcgtttctaggagcttcgctatgcggctgctttaagattctagggttgtacaggcccacgccagacacgacgtctggcaggaacctcggcctcagagatggctctgagtaaatcaatgcatgcaagaaatagatacaaggacaaacctcctgactttgcatatctggcatccaaatatccagattttaagcagcatgttcagataaatctgaatggaagagtgagccttaattttaaagaccccgaagcagtcagagctctgacgtgtactctcctaagggaagattttggactttctattgatattccattggagagactaattcccacagttcccttgagactcaactatattcactgggtagaagatctgatcggtcaccaggattctgacaaaagtactctccgaagaggaattgacatagtggtgaaagtgccacagaagacactcctgatggatgctcttaaagaagaatctgagataatctatgacttttgcatgtgcaaccctcccttttttgccaatcaattggaagccaag

SEQ ID NO: 153485 - DNA, 624 bp, Homo sapiens
  Payload ID: 10190
  Gene Symbol: METTL16
  Gene Name: methyltransferase like 16
  ENST ID: ENST00000571298
  CDS Start-End: 1-304
ccttaattttaaagaccccgaagcagtcagagctctgacgtgtactctcctaagggaagattttggactttctattgatattccattggagagactaattcccacagttcccttgagactcaactatattcactgggtagaagatctgatcggtcaccaggattctgacaaaagtactctccgaagaggaattgacataggtatccaaggacgtgcttgtccagtagcactggggccaggataccctcgggcaaaaatggcacgggggcatcttgcatctaccccttacttggagcaaccttgaatggctggtatttcctcgcaacagaagtggatgatatgtgtttcaactatgcaaagaaaaatgtggaacagaataacttatctgatctcataaaagggagtaaactcacgaaatcctcgaagacctccgcctagttctgttaatacaggaggcatcacagagatcatggcagaaggaggtgaattagagtttgttaaaaggatcatccatgacagtctacaacttaaaaaaagattaaggctggagtgcaatggtgtgatctcagctcactgcaacccccgcttcctggattcaagcgattatcctgcctccgcctcgag

SEQ ID NO: 153486 - DNA, 1749 bp, Homo sapiens
  Payload ID: 10191
  Gene Symbol: METTL17
  Gene Name: methyltransferase like 17
  Uniprot ID: Q9H7H0
  ENST ID: ENST00000339374
  CDS Start-End: 234-1604
ctcttgatttctggggccggtgaccaggcccaacgcagccttcaagtcggcccaaacacggtttctgcctcaaggattatttatataaccattgcttattggctgctggcaaacactcgctcttctcgttggctgaaactgtcgggagaagttctgcgaaggctgctccttgcggcgttgggactgagggtcacaggcacctgtatttccgtttccggttcgcctccggagccatggcggcggcactgaagtgtctactgacattaggaagatggtgccccggccttggagtggctccccaggcccgggcgctcgccgccttagtacccggagtgacccaggtagataacaagtccggtttcctgcagaagaggcctcatcgccagcaccctggcatcctaaagctgccgcacgtgcggctgccacaggcactggctaacggtgcccagttattgctacttgggagcgctgggcccactatggagaatcaggtgcaaacactgaccagttatctctggagcagacatttgcctgtagagccagaggagttgcaaagacgggctaggcatcttgagaaaaaattcctggaaaacccagacttatctcagacagaggagaaacttcgtggagcagtgctacacgcactacgtaaaactacctaccattggcaagaactgagctacactgagggactgagcctggtgtatatggcagcaagactggatggtggctttgcagcagtctccagagcattccatgagatccgggctcgaaatccagcatttcagccacaaactttgatggactttggctcaggtactggttctgtcacctgggctgctcacagtatttggggccagagcctacgtgaatatatgtgtgtggacagatcagctgccatgttggttttggcagaaaaactactgaaaggtggttcagaatctggggagccttatattccaggtgtctttttcagacagtttctacctgtatcacccaaggtgcagtttgatgtagtagtgtcagctttttccttaagtgaactgcccagcaaggctgaccgcactgaggtagttcaaaccttatggcgtaagacaggtcatttcctggtactggtggagaatggaacaaaagctgggcacagccttctcatggatgccagggatctggtccttaagggaaaagagaagtcacctttggaccctcgacctggttttgtctttgccccgtgtccccatgaactcccttgtccccagttgaccaacctggcctgtagcttctcacaggcgtaccatcccatccccttcagctggaacaagaaaccaaaggaagaaaagttctctatggtgatccttgctcgggggtctccagaggaggctcatcgctggccccgtatcactcagcctgtccttaaacggcctcgccatgtgcattgtcacttgtgctgtccagatgggcacatgcagcatgctgtgctcacagcccgccggcacggcagggatttgtatcgttgtgcccgtgtcagctcctggggagatcttttacctgtgcttactccgtctgcgtttcctccatctacggctcaggatccctctgagagttgatgaggatgtgtaacaagtattttcttctatcgtgcctgccagggctgaagctgcctggtatccaggaggggaatgctggtatccccatatgtctgtgtttgtttgagatttttaataataaataataaatttttgaagaatggaa

SEQ ID NO: 153487 - DNA, 1586 bp, Homo sapiens
  Payload ID: 10191
  Gene Symbol: METTL17
  Gene Name: methyltransferase like 17
  Uniprot ID: Q9H7H0
  ENST ID: ENST00000382985
  CDS Start-End: 24-1460
gtttccggttcgcctccggagccatggcggcggcactgaagtgtctactgacattaggaagatggtgccccggccttggagtggctccccaggcccgggcgctcgccgccttagtacccggagtgacccaggtagataacaagtccggtttcctgcagaagaggcctcatcgccagcaccctggcatcctaaagctgccgcacgtgcggctgccacaggcactggctaacggtgcccagttattgctacttgggagcgctgggcccactatggagaatcaggtgcaaacactgaccagttatctctggagcagacatttgcctgtagagccagaggagttgcaaagacgggctaggcatcttgagaaaaaattcctggaaaacccagacttatctcagacagaggagaaacttcgtggagcagtgctacacgcactacgtaaaactacctaccattggcaagaactgagctacactgagggactgagcctggtgtatatggcagcaagactggatggtggctttgcagcagtctccagagcattccatgagatccgggctcgaaatccagcatttcagccacaaactttgatggactttggctcaggtactggttctgtcacctgggctgctcacagtatttggggccagagcctacgtgaatatatgtgtgtggacagatcagctgccatgttggttttggcagaaaaactactgaaaggtggttcagaatctggggagccttatattccaggtgtctttttcagacagtttctacctgtatcacccaaggtgcagtttgatgtagtagtgtcagctttttccttaagtgaactgcccagcaaggctgaccgcactgaggtagttcaaaccttatggcgtaagacaggtcatttcctggtactggtggagaatggaacaaaagctgggcacagccttctcatggatgccagggatctggtccttaagggaaaagagaagtcacctttggaccctcgacctggttttgtctttgccccgtgtccccatgaactcccttgtccccagttgaccaacctggcctgtagcttctcacaggcgtaccatcccatccccttcagctggaacaagaaaccaaaggaagaaaagttctctatggtgatccttgctcgggggtctccagaggaggctcatcgctggccccgtatcactcagcctgtccttaaacggcctcgccatgtgcattgtcacttgtgctgtccagatgggcacatgcagcatgctgtgctcacagcccgccggcacggcaggtatggggggtgtgaccaaaatcagtgggatgtggcaggaagctgcagcccacgccagcatctgtttccacagggatttgtatcgttgtgcccgtgtcagctcctggggagatcttttacctgtgcttactccgtctgcgtttcctccatctacggctcaggatccctctgagagttgatgaggatgtgtaacaagtattttcttctatcgtgcctgccagggctgaagctgcctggtatccaggaggggaatgctggtatccccatatgtctgtgtttgtttgagatttttaataat

SEQ ID NO: 153488 - DNA, 2887 bp, Homo sapiens
  Payload ID: 10191
  Gene Symbol: METTL17
  Gene Name: methyltransferase like 17
  ENST ID: ENST00000555640
  CDS Start-End: 10-486
tccggagccatggcggcggcactgaagtgtctactgacattaggaagatggtgccccggccttggagtggctccccaggcccgggcgctcgccgccttagtacccggagtgacccaggtagataacaagtccggtttcctgcagaagaggcctcatcgccagcaccctggcatcctaaagctgccgcacgtgcggctgccacaggcactggctaacggtgcccagttattgctacttgggagcgctgggcccactatggagaatcaggtgcaaacactgaccagttatctctggagcagacatttgcctgtagagccagaggagttgcaaagacgggctaggcatcttgagaaaaaattcctggaaaacccaggtcctgacttccagtccttgttctcaccacagacttatctcagacagaggagaaacttcgtggagcagtgctacacgcactacgtaaaactacctaccattggcaagaactgagctacactgagggactgagcctggtgtatatggcagcaagactggatggtggctttgcagcagtctccagagcattccatgagatccgggctcgaaatccagcatttcagccacaaactttgatggactttggctcaggtactggttctgtcacctggtgagtaactttcttcagccctatcttggtcaattttagctctagaaagccatacttacaccactccaaaattaacagactggaaaaccagagggagaataggcaagttgggaatctataatgtttcttccatcagattaggcaaggcagaagaaggtatatggattggggccagaacttaaaagaaatgtcaagtaaaaaaaggcgcatgtgtagaaaaattaaaaagaaaaggaattatcaatcaaagttgtttttgcctacaaatagtattttgagtctaccttttttttttcttttttgaaacggtgtctcactctgtcgcccaggctggagtgcagtggcacaatctcggctcactgcagcctccactcctgggttcaagtgattctcctgcctcaccctcccgagtagctgggactacaggtgcacgccaccacacccagctaatttttgtatttttagtagagacggggtttcaccatattggccaggctggtctctaactcctgaccttgtgatccgcccaccttggcctcccaaagtgctgggattacaagcatgagccactgtgcccagctgagtctacctttttttttttaggagttgtaaataaaacaagaaaataacactattagttattttattactaactatacaactactttaacataacactctcttttcccaggggtggggttgggtgtaaatgggcctcttgtagagatgactcttggtcatgggaattggtgatttataataattttgccatcttagggctgctcacagtatttggggccagagcctacgtgaatatatgtgtgtggacagatcagctgccatgttggttttggcagaaaaactactgaaaggtggttcagaatctggggagccttatattccaggtgtctttttcagacagtttctacctgtatcacccaaggtgcagtttgatgtagtagtgtcagctttttccttaagtgaactgcccagcaaggctgaccgcactgaggtagttcaaaccttatggcgtaagacaggtcatttcctggtgagttaaaattccttgttctccttaagtcttgaagcagcttcatggatttcatgcctttgctcctctcattgtctttattcttcaccatttttctccttcatgggtttctttatccctctttgagggtctccatcctgattatgtaatgcctatttctttttaggactccttctccctctatgattgctcttacacagctactgacatttatactttcgtgtaattcaagtcttctgcatattttccccttttgtgaacaggtactggtggagaatggaacaaaagctgggcacagccttctcatggatgccagggatctggtccttaagggaaaagagaagtcacctttggaccctcgacctggttttgtctttgccccggtgagtattacttctgcctgtcccaccacacggatctgaacttaggcgtggccgggaaatgtaagatggtaaagctaagccactctccactactttgtgttcctatccagttcctacctaatgattcccctggctcttcctacccactgctcctgtcctcccttctccctggccccttttgactctattattctcagtttttaagttttgtgattgatggctcttttgtcttacctcatttttttatgtgttcacagtgtccccatgaactcccttgtccccagttgaccaacctggcctgtagcttctcacaggcgtaccatcccatccccttcagctggaacaagaaaccaaaggaagaaaagttctctatggtgatccttgctcgggggtctccagaggaggctcatcgctggccccgtatcactcagcctgtccttaaacggcctcgccatgtgcattgtcacttgtgctgtccagatgggcacatgcagcatgctgtgctcacagcccgccggcacggcaggtatggggggtgtgaccaaaatcagtgggatgtggcaggaagctgcagcccacgccagcatctgtttccacagggatttgtatcgttgtgcccgtgtcagctcctggggagatcttttacctgtgcttactccgtctgcgtttcctccatctacggctcaggatccctctgagagttgatgaggatgtgtaacaagtattttcttctatcgtgcctgccagggctgaagctgcctggtatccaggaggggaatgctggtatccccatatgtctgtgtttgtttg

SEQ ID NO: 153489 - DNA, 1500 bp, Homo sapiens
  Payload ID: 10191
  Gene Symbol: METTL17
  Gene Name: methyltransferase like 17
  Uniprot ID: Q9H7H0
  ENST ID: ENST00000556670
  CDS Start-End: 17-1360
gttcgcctccggagccatggcggcggcactgaagtgtctactgacattaggaagatggtgccccggccttggagtggctccccaggcccgggcgctcgccgccttagtacccggagtgacccaggtagataacaagtccggtttcctgcagaagaggcctcatcgccagcaccctggcatcctaaagctgccgcacgtgcggctgccacaggcactggctaacggtgcccagttattgctacttgggagcgctgggcccactatggagaatcaggtgcaaacactgaccagttatctctggagcagacatttgcctgtagagccagaggagttgcaaagacgggctaggcatcttgagaaaaaattcctggaaaacccagacttatctcagacagaggagaaacttcgtggagcagtgctacacgcactacgtaaaactacctaccattggcaagaactgagctacactgagggactgagcctggtgtatatggcagcaagactggatggtggctttgcagcagtctccagagcattccatgagatccgggctcgaaatccagcatttcagccacaaactttgatggactttggctcaggtactggttctgtcacctgggctgctcacagtatttggggccagagcctacgtgaatatatgtgtgtggacagatcagctgccatgttggttttggcagaaaaactactgaaaggtggttcagaatctggggagccttatattccaggtgtctttttcagacagtttctacctgtatcacccaaggtgcagtttgatgtagtagtgtcagctttttccttaagtgaactgcccagcaaggctgaccgcactgaggtagttcaaaccttatggcgtaagacaggtcatttcctggtactggtggagaatggaacaaaagctgggcacagccttctcatggatgccagggatctggtccttaagggaaaagagaagtcacctttggaccctcgacctggttttgtctttgccccgtgtccccatgaactcccttgtccccagttgaccaacctggcctgtagcttctcacaggcgtaccatcccatccccttcagctggaacaagaaaccaaaggaagaaaagttctctatggtgatccttgctcgggggtctccagaggaggctcatcgctggccccgtatcactcagcctgtccttaaacggcctcgccatgtgcattgtcacttgtgctgtccagatgggcacatgcagcatgctgtgctcacagcccgccggcacggcagctcctggggagatcttttacctgtgcttactccgtctgcgtttcctccatctacggctcaggatccctctgagagttgatgaggatgtgtaacaagtattttcttctatcgtgcctgccagggctgaagctgcctggtatccaggaggggaatgctggtatccccatatgtctgtgtttgtttgagatttttaataataaataataaatttttgaagaa

SEQ ID NO: 153490 - DNA, 1605 bp, Homo sapiens
  Payload ID: 10191
  Gene Symbol: METTL17
  Gene Name: methyltransferase like 17
  ENST ID: ENST00000555533
  CDS Start-End: 10-486
tccggagccatggcggcggcactgaagtgtctactgacattaggaagatggtgccccggccttggagtggctccccaggcccgggcgctcgccgccttagtacccggagtgacccaggtagataacaagtccggtttcctgcagaagaggcctcatcgccagcaccctggcatcctaaagctgccgcacgtgcggctgccacaggcactggctaacggtgcccagttattgctacttgggagcgctgggcccactatggagaatcaggtgcaaacactgaccagttatctctggagcagacatttgcctgtagagccagaggagttgcaaagacgggctaggcatcttgagaaaaaattcctggaaaacccaggtcctgacttccagtccttgttctcaccacagacttatctcagacagaggagaaacttcgtggagcagtgctacacgcactacgtaaaactacctaccattggcaagaactgagctacactgagggactgagcctggtgtatatggcagcaagactggatggtggctttgcagcagtctccagagcattccatgagatccgggctcgaaatccagcatttcagccacaaactttgatggactttggctcaggtactggttctgtcacctgggctgctcacagtatttggggccagagcctacgtgaatatatgtgtgtggacagatcagctgccatgttggttttggcagaaaaactactgaaaggtggttcagaatctggggagccttatattccaggtgtctttttcagacagtttctacctgtatcacccaaggtgcagtttgatgtagtagtgtcagctttttccttaagtgaactgcccagcaaggctgaccgcactgaggtagttcaaaccttatggcgtaagacaggtcatttcctggtactggtggagaatggaacaaaagctgggcacagccttctcatggatgccagggatctggtccttaagggaaaagagaagtcacctttggaccctcgacctggttttgtctttgccccgtgtccccatgaactcccttgtccccagttgaccaacctggcctgtagcttctcacaggcgtaccatcccatccccttcagctggaacaagaaaccaaaggaagaaaagttctctatggtgatccttgctcgggggtctccagaggaggctcatcgctggccccgtatcactcagcctgtccttaaacggcctcgccatgtgcattgtcacttgtgctgtccagatgggcacatgcagcatgctgtgctcacagcccgccggcacggcaggtatggggggtgtgaccaaaatcagtgggatgtggcaggaagctgcagcccacgccagcatctgtttccacagggatttgtatcgttgtgcccgtgtcagctcctggggagatcttttacctgtgcttactccgtctgcgtttcctccatctacggctcaggatccctctgagagttgatgaggatgtgtaacaagtattttcttctatcgtgcctgccagggctgaagctgcctggtatccaggaggggaatgctggtatccccatatgtctgtgtttgtttgagatttttaataata

SEQ ID NO: 153491 - DNA, 803 bp, Homo sapiens
  Payload ID: 10191
  Gene Symbol: METTL17
  Gene Name: methyltransferase like 17
  ENST ID: ENST00000555670
  CDS Start-End: 282-803
cccggccttggagtggctccccaggcccgggcgctcgccgccttagtacccggagtgacccaggtagataacaagtccggtttcctgcagaagaggcctcatcgccagcaccctggcatcctaaagctgccgcacgtgcggctgccacaggcactggctaacggtgcccagttattgctacttggtgagtaacggcgggaaagcgagaagaaacgggactggacctacatgcaagtgattccgcttttcgtctttggcccatagggagcgctgggcccactatggagaatcaggtgcaaacactgaccagttatctctggagcagacatttgcctgtagagccagaggagttgcaaagacgggctaggcatcttgagaaaaaattcctggaaaacccagacttatctcagacagaggagaaacttcgtggagcagtgctacacgcactacgtaaaactacctaccattggcaagaactgagctacactgagggactgagcctggtgtatatggcagcaagactggatggtggctttgcagcagtctccagagcattccatgagatccgggctcgaaatccagcatttcagccacaaactttgatggactttggctcaggtactggttctgtcacctgggctgctcacagtatttggggccagagcctacgtgaatatatgtgtgtggacagatcagctgccatgttggttttggcagaaaaactactgaaaggtggttcagaatctggggagccttatattccaggtgtctttttcagacagtttctacctgtatcacccaag

SEQ ID NO: 153492 - DNA, 900 bp, Homo sapiens
  Payload ID: 10191
  Gene Symbol: METTL17
  Gene Name: methyltransferase like 17
  ENST ID: ENST00000553564
  CDS Start-End: 480-900
catggcggcggcactgaagtgtctactgacattaggaagatggtgccccggccttggagtggctccccaggcccgggtgagtgcctacattccctgctgtcggagagactctggatctgcagagacatctccgcgcagaggaggagcgctcctggcagcccccgccctagcgattgccagcaactttcctttctgccaggaaatcaacctacctttctctgcctgcaggcgctcgccgccttagtacccggagtgacccaggtagataacaagtccggtttcctgcagaagaggcctcatcgccagcaccctggcatcctaaagctgccgcacgtgcggctgccacaggcactggctaacggtgcccagttattgctacttggtgagtaacggcgggaaagcgagaagaaacgggactggacctacatgcaagtgattccgcttttcgtctttggcccatagggagcgctgggcccactatggagaatcaggtgcaaacactgaccagttatctctggagcagacatttgcctgtagagccagaggagttgcaaagacgggctaggcatcttgagaaaaaattcctggaaaacccagacttatctcagacagaggagaaacttcgtggagcagtgctacacgcactacgtaaaactacctaccattggcaagaactgagctacactgagggactgagcctggtgtatatggcagcaagactggatggtggctttgcagcagtctccagagcattccatgagatccgggctcgaaatccagcatttcagccacaaactttgatggactttggctcaggtactggttctgtcacctgggctgctcacagtatttggggccagagcctacgtgaatatatgtgtgtggacagatcagctgcca

SEQ ID NO: 153493 - DNA, 568 bp, Homo sapiens
  Payload ID: 10191
  Gene Symbol: METTL17
  Gene Name: methyltransferase like 17
  ENST ID: ENST00000554283
  CDS Start-End: 10-568
attaggaagatggtgccccggccttggagtggctccccaggcccgggtgagtgcctacattccctgctgtcggagagactctggatctgcagagacatctccgcgcagaggaggagcgctcctggcagcccccgccctagcgattgccagcaactttcctttctgccaggaaatcaacctacctttctctgcctgcaggcgctcgccgccttagtacccggagtgacccaggtagataacaagtccggtttcctgcagaagaggcctcatcgccagcaccctggcatcctaaagctgccgcacgtgcggctgccacaggcactggctaacggtgcccagttattgctacttgggagcgctgggcccactatggagaatcaggtgcaaacactgaccagttatctctggagcagacatttgcctgtagagccagaggagttgcaaagacgggctaggcatcttgagaaaaaattcctggaaaacccagacttatctcagacagaggagaaacttcgtggagcagtgctacacgcactacgtaaaactacctaccattggcaagaactga

SEQ ID NO: 153494 - DNA, 556 bp, Homo sapiens
  Payload ID: 10191
  Gene Symbol: METTL17
  Gene Name: methyltransferase like 17
  ENST ID: ENST00000554751
  CDS Start-End: 251-556
acattaggaagatggtgccccggccttggagtggctccccaggcccgggtgagtgcctacattccctgctgtcggagagactctggatctgcagagacatctccgcgcagaggaggagcgctcctggcagcccccgccctagcgattgccagcaactttcctttctgccaggaaatcaacctacctttctctgcctgcaggcgctcgccgccttagtacccggagtgacccagggagcgctgggcccactatggagaatcaggtgcaaacactgaccagttatctctggagcagacatttgcctgtagagccagaggagttgcaaagacgggctaggcatcttgagaaaaaattcctggaaaacccagacttatctcagacagaggagaaacttcgtggagcagtgctacacgcactacgtaaaactacctaccattggcaagaactgagctacactgagggactgagcctggtgtatatggcagcaagactggatggtggctttgcagcagtctccagagcattccatgagatccgggctcgaaatccagcattt

SEQ ID NO: 153495 - DNA, 510 bp, Homo sapiens
  Payload ID: 10191
  Gene Symbol: METTL17
  Gene Name: methyltransferase like 17
  ENST ID: ENST00000556733
  CDS Start-End: 1-370
acctggttttgtctttgccccgtgtccccatgaactcccttgtccccagttgaccaacctggcctgtagcttctcacaggcgtaccatcccatccccttcagctggaacaagaaaccaaaggaagaaaagttctctatggtgatccttgctcgggggtctccagaggaggctcatcgctggccccgtatcactcagcctgtccttaaacggcctcgccatgtgcattgtcacttgtgctgtccagatgggcacatgcagcatgctgtgctcacagcccgccggcacggcagctcctggggagatcttttacctgtgcttactccgtctgcgtttcctccatctacggctcaggatccctctgagagttgatgaggatgtgtaacaagtattttcttctatcgtgcctgccagggctgaagctgcctggtatccaggaggggaatgctggtatccccatatgtctgtgtttgtttgagatttttaataataaataataaatttttgaagaa

SEQ ID NO: 153496 - DNA, 1529 bp, Homo sapiens
  Payload ID: 10191
  Gene Symbol: METTL17
  Gene Name: methyltransferase like 17
  ENST ID: ENST00000557550
  CDS Start-End: 1-477
atggcggcggcactgaagtgtctactgacattaggaagatggtgccccggccttggagtggctccccaggcccgggcgctcgccgccttagtacccggagtgacccaggtagataacaagtccggtttcctgcagaagaggcctcatcgccagcaccctggcatcctaaagctgccgcacgtgcggctgccacaggcactggctaacggtgcccagttattgctacttgggagcgctgggcccactatggagaatcaggtgcaaacactgaccagttatctctggagcagacatttgcctgtagagccagaggagttgcaaagacgggctaggcatcttgagaaaaaattcctggaaaacccaggtcctgacttccagtccttgttctcaccacagacttatctcagacagaggagaaacttcgtggagcagtgctacacgcactacgtaaaactacctaccattggcaagaactgagctacactgagggactgagcctggtgtatatggcagcaagactggatggtggctttgcagcagtctccagagcattccatgagatccgggctcgaaatccagcatttcagccacaaactttgatggactttggctcaggtactggttctgtcacctgggctgctcacagtatttggggccagagcctacgtgaatatatgtgtgtggacagatcagctgccatgttggttttggcagaaaaactactgaaaggtggttcagaatctggggagccttatattccaggtgtctttttcagacagtttctacctgtatcacccaaggtgcagtttgatgtagtagtgtcagctttttccttaagtgaactgcccagcaaggctgaccgcactgaggtagttcaaaccttatggcgtaagacaggtcatttcctggtactggtggagaatggaacaaaagctgggcacagccttctcatggatgccagggatctggtccttaagggaaaagagaagtcacctttggaccctcgacctggttttgtctttgccccgtgtccccatgaactcccttgtccccagttgaccaacctggcctgtagcttctcacaggcgtaccatcccatccccttcagctggaacaagaaaccaaaggaagaaaagttctctatggtgatccttgctcgggggtctccagaggaggctcatcgctggccccgtatcactcagcctgtccttaaacggcctcgccatgtgcattgtcacttgtgctgtccagatgggcacatgcagcatgctgtgctcacagcccgccggcacggcagggatttgtatcgttgtgcccgtgtcagctcctggggagatcttttacctgtgcttactccgtctgcgtttcctccatctacggctcaggatccctctgagagttgatgaggatgtgtaacaagtattttcttctatcgtgcctgccagggctgaagctgcctggtatccaggaggggaatgctggtatccccatatgtctgtgtttgtttgagatttttaataataaataat

SEQ ID NO: 153497 - DNA, 1426 bp, Homo sapiens
  Payload ID: 10192
  Gene Symbol: METTL18
  Gene Name: methyltransferase like 18
  Uniprot ID: O95568
  ENST ID: ENST00000303469
  CDS Start-End: 260-1378
gaggaaagaggcgcgttcctagccgcgggactgggtgacccgcctctcccccaaattagctgcttggaaagaggaccaaagacgtctaaaaagtcatttggaaatatctctaaatatttgttaccatgtataagctgctaaagagaaattgggcccaacaaaactaattgaataattgaggcagatttgtgtgtatcatcaaattctatccagaagttgaagaatctgaatttaaagattgtgtgcatttaataagaggatgacctttcagtttaatttcactatagaagaccatctggaaaatgaattaacacccattagagatggagctttgaccctggattcctcaaaagagctgtcagtctcagaaagtcaaaaaggagaagagagggacagaaaatgttctgcagaacaatttgacttgcctcaggatcacttgtgggaacataagtcaatggaaaatgcagctccctctcaagacacagacagtccactcagtgcagccagcagttcaaggaacttggagccacatggaaaacagccctccttgagagctgccaaagagcatgctatgcctaaagatttaaagaagatgttagaaaataaagtcatagaaacattaccaggtttccagcatgttaagttatcagtagtgaaaaccatcttgttgaaagagaacttccctggagaaaacatagtttcaaaaagcttttcttctcactctgatctgattacaggtgtttatgagggaggcttaaaaatctgggaatgtacctttgacctcctggcttatttcacaaaggccaaagtgaaatttgctgggaaaaaagtcttggatcttggttgtggatcaggtttactaggtataactgcattcaagggagggtccaaagaaattcactttcaagattataacagtatggtgattgatgaagtaaccttacctaatgtagtagctaactccactttggaagatgaagaaaatgatgtaaatgagccagatgtgaaaagatgcaggaaaccaaaagtaacacaactatataaatgccgatttttttctggtgagtggtctgagttttgtaagcttgtactaagtagtgaaaaactttttgtaaaatatgatctcattctcacctcagaaaccatttacaacccagattattatagtaatttgcaccagactttccttagactgttaagtaaaaatggacgtgtacttttggccagcaaagcacattattttggtgtaggtggaggtgttcatctctttcagaagtttgtagaagaaagagatgtttttaagaccagaatactcaaaataattgatgaaggattgaagaggttcataattgaaataacttttaagtttcctggttaattaacattcactgagtatccaaaatgaaataaacagaaggaccaaaaa

SEQ ID NO: 153498 - DNA, 1521 bp, Homo sapiens
  Payload ID: 10192
  Gene Symbol: METTL18
  Gene Name: methyltransferase like 18
  Uniprot ID: O95568
  ENST ID: ENST00000310392
  CDS Start-End: 355-1473
cgggtccctcaaggccggaaagaaagtcgggcttctctagcccctggaggactcgactcactggtgcgcgatttaggtccggaggaggcgttgtgaggtgagctttttcagaagcgcgatcccaggacacgtcgggaagcaagcatccccagagctgcttggaaagaggaccaaagacgtctaaaaagtcatttggaaatatctctaaatatttgttaccatgtataagctgctaaagagaaattgggcccaacaaaactaattgaataattgaggcagatttgtgtgtatcatcaaattctatccagaagttgaagaatctgaatttaaagattgtgtgcatttaataagaggatgacctttcagtttaatttcactatagaagaccatctggaaaatgaattaacacccattagagatggagctttgaccctggattcctcaaaagagctgtcagtctcagaaagtcaaaaaggagaagagagggacagaaaatgttctgcagaacaatttgacttgcctcaggatcacttgtgggaacataagtcaatggaaaatgcagctccctctcaagacacagacagtccactcagtgcagccagcagttcaaggaacttggagccacatggaaaacagccctccttgagagctgccaaagagcatgctatgcctaaagatttaaagaagatgttagaaaataaagtcatagaaacattaccaggtttccagcatgttaagttatcagtagtgaaaaccatcttgttgaaagagaacttccctggagaaaacatagtttcaaaaagcttttcttctcactctgatctgattacaggtgtttatgagggaggcttaaaaatctgggaatgtacctttgacctcctggcttatttcacaaaggccaaagtgaaatttgctgggaaaaaagtcttggatcttggttgtggatcaggtttactaggtataactgcattcaagggagggtccaaagaaattcactttcaagattataacagtatggtgattgatgaagtaaccttacctaatgtagtagctaactccactttggaagatgaagaaaatgatgtaaatgagccagatgtgaaaagatgcaggaaaccaaaagtaacacaactatataaatgccgatttttttctggtgagtggtctgagttttgtaagcttgtactaagtagtgaaaaactttttgtaaaatatgatctcattctcacctcagaaaccatttacaacccagattattatagtaatttgcaccagactttccttagactgttaagtaaaaatggacgtgtacttttggccagcaaagcacattattttggtgtaggtggaggtgttcatctctttcagaagtttgtagaagaaagagatgtttttaagaccagaatactcaaaataattgatgaaggattgaagaggttcataattgaaataacttttaagtttcctggttaattaacattcactgagtatccaaaatgaaataaacagaaggaccaaaaa

SEQ ID NO: 153499 - DNA, 850 bp, Homo sapiens
  Payload ID: 10192
  Gene Symbol: METTL18
  Gene Name: methyltransferase like 18
  ENST ID: ENST00000454472
  CDS Start-End: 297-850
gtccctcaaggccggaaagaaagtcgggcttctctagcccctggaggactcgactcactggtgcgcgatttaggtccggaggaggcgttgtgagagctgcttggaaagaggaccaaagacgtctaaaaagtcatttggaaatatctctaaatatttgttaccatgtataagctgctaaagagaaattgggcccaacaaaactaattgaataattgaggcagatttgtgtgtatcatcaaattctatccagaagttgaagaatctgaatttaaagattgtgtgcatttaataagaggatgacctttcagtttaatttcactatagaagaccatctggaaaatgaattaacacccattagagatggagctttgaccctggattcctcaaaagagctgtcagtctcagaaagtcaaaaaggagaagagagggacagaaaatgttctgcagaacaatttgacttgcctcaggatcacttgtgggaacataagtcaatggaaaatgcagctccctctcaagacacagacagtccactcagtgcagccagcagttcaaggaacttggagccacatggaaaacagccctccttgagagctgccaaagagcatgctatgcctaaagatttaaagaagatgttagaaaataaagtcatagaaacattaccaggtttccagcatgttaagttatcagtagtgaaaaccatcttgttgaaagagaacttccctggagaaaacatagtttcaaaaagcttttcttctcactctgatctgattacaggtgtttatgagggaggcttaaaaatctgggaatgtacctttgacctcctggcttatttcacaaaggccaaagtgaa

SEQ ID NO: 153500 - DNA, 6128 bp, Homo sapiens
  Payload ID: 10193
  Gene Symbol: METTL20
  Gene Name: methyltransferase like 20
  Uniprot ID: Q8IXQ9
  ENST ID: ENST00000357721
  CDS Start-End: 216-1004
agtctagtgggataccaggccctgagagacccctacgatcccaggacactgatgtggggtaactaacacccactggaagtctacgctgagttcacaggctatagtcagaggttccggttgagatcaagttgggagacacacccttgttcattctccttgagaagcagctattatcaacagaacattgacagaacctgtgtttggggaaaggactgatggctttgagtctaggttggaaagcacacaggaaccactgtggtctcctcttgcaggctctgcgaagcagtggtcttctcttgtttccctgtggccagtgtccctggagaggagctggaagctttttggaccctgagataaaggctttcctggaggagaacactgaagtcaccagcagtggtagcctcacccctgaaatccagttgcggcttttgacccccagatgcaaattctggtgggagagagctgacctgtggccccacagtgatccttactgggcaatctactggccaggaggccaagccctgtctaggtatcttttggataatcctgatgttgtcagaggaaaatctgtattagatcttgggagtggatgtggagctacagctattgctgctaagatgagtggggcatcaaggatcttggccaatgacatagaccctattgcaggaatggctattacactaaattgtgaattgaacagactgaatccttttcctattttaatccaaaacattttgaatttggaacaagataagtgggaccttgttgttcttggcgatatgttttatgatgaagaccttgcagatagtcttcatcagtggctgaagaagtgcttctggacctatagaactcgagtactgattggtgaccctgggcggccccagttcagtggacacagcattcagcatcacctgcacaaagtggtagaatattcacttttggagtctactaggcaggaaaacagtggactgacaacaagcacagtgtggggttttcagccttgagttgtcaaagtgcttccaagtatgaatatagtaatgtttggatctgactctaaaagttttctctataggagatactctccagtttaatgaatgtaattcttgttaaatggaaaatcttgtttttaaaatatgaaggtttagagttttgtttacttttgtcatgtaactggttctgtatttctatgcatgccaattatacacatctctatctgcatttttttttctattttaaccgctgaaggaatatgattatacaatgccatactcaatggtggcagcatttaatttaagtaatggagaagaattaaacattgtagctggatctgtttctgtagtcgaggacaactgtgatgtaactttgaattaaacaaacaaaacaaaacagaagaagactatatatatattttttctttttttagagacagtctcactttgctcccaggctggaatgcagtggctattcagaggcttaatcattgggcactgcagccttgaactctgggcttttttttttttttgagatggagtctcagctctgtcgtccaggctggagtgcagtgactcatgtctcggctcactgtagcctccacctcccccaatcaagcgattgtcctgtctcagcctccagagtagctgggattttaggtgtgcaccaccatgcctggctaatttttgtatttttagtagagacggggttttgccatgttggccaggccggtctcaaactcctgacctcaggtgatccacccgccttggcctcccaaagtgctaggattacaggtgtgagccaccacgccagcctgacgatgttttttacttctatcacttccttttgattttttcttatagcttctatctctgcttacgtcacccatcattcttgcgtgttgtatgcttttcgcattagagccctttgcatgttaatcagttattttaaatttatgatctggtaattctaaaatgtctgccataactgagtctggttctgatgcttgttttcttttcagactgtttttttgtcttttagcatgccttgtaattttttgttgatagctagacatgatgtattgcataaataaacaagtaaactaaggtagcatgaggttttaaaatctgggtagggctactgtttgctgtagagtagatattacaggctaaattttcctctagtgtcctggctattgtctcctctgttatctttgagtttccctagagattccttcttatatagagtctgaagcttgcagtttttttcacctgtaattccctgttattatacagtagcctaactgatgtgataaggtatgggagaaggtatgttctatagtcctgtgattaagtctcagtcagttaagtcagcctgtgcccctgctgtgaccttcacaagtgctttcagcttttcttttgtcactttggtgagacaggaaggctagaggcagctggagttgggtgcttcctttcccccaggtcaacgaggctctggtaaaatagtttcccttgagaactggcttttgttaaggagaactgaacacttgggcatatttcaaaatggttactttccctatcctcataccagaagaggggatttttctctgatcctcaccctgagaacctggtaggtatcctggaggtaaaactatgaaagtgtggtgtctcccctaggagtgggccccctggagtttgtttgttttaatttaacaaagtttaattgagcaaagaacaatctgtgaattgggcagctcccaaaagcagaataggttcagagtgactgcagggttgccacacctggttagataacgtttatggacagattcctagagcttttgattcttttttttttttttttgaggcagagtttcactcttattgcccaggctggagtgcaatggcgtgatcttggctcactgcaacctccacctcctgggttaaagtgattctcctgcctcagcctcctgagtagctgggattacaggtatacaccaccaaacccagctgggattacaggcatgcaccaccatgcccagctaatttttgtatttttagtaaagacagggcttcgccatgttggccaggctggtctcgaactcctgacctcaggtgatccacctgcctcagcctccccaagtgctgggattacacgtgtgagccactgtgccaggctggagcttttgattcttaagtccatccacatggagcctccagcaactcaggaattacagcataaatgttcctattggtactggctccagcaacaggcttctgctccctgtaagctatggttctttgtatttgcgtttctaatttgtgaggcattctctctttaaccttaattctctaatggatctaagtgttgttgacttttcagtttattgagcttttttcttattgtgaggatgggaatgatgacttccaatctctttatattagaaaatataaatcagactagagactggaaatttttgttgttgttgttgggtgttttgttttgtttgtttttagacaggtcttgctctctcatccaggctggagttcagcaatgcgaccgtgctcactgcagcctcgactttctaggctcaggtaatcctcccacttcagcctccttagtagctaggactgtaggcatgcaccaccatgatgcctggctagtttttttattttgtattttttgtagacatggagtcttgctacattggccaggctgggtattactgggtatttctttctttcctcctttatttctttccatatttacttattcaatgaatatttgagtgcttattatataccaggcactgttctaggcactggggatatggggatacagcaatgaaaaaaaaagataaatactttgtccttatgaaatttgtattctagagtagggagacataatgaacaaatgaaaacaggcatcagatggtgataggtagtaaggagaaaaagaagtaagggtaatagggaatactgggtactggatggggtacagatattttaaacagagtggtgagaaatagttaatacagctagcaacataaaaaaggagaaatatcaaactgcaaactgttttaggaagataaatccttcatagacccaaagaagctcacaatttagatgtcgaaactagtttctgcaaaaaggggaaaatgtgattgacttggttaaatattcagtattaaattttattgaatttgtctttagaaaaatttcatagttagaacaggccttacccattttgcacatatatacatatgcaccacctttgcagtggcaacatatatatccacactataaacataccacatttataaatcttgtaaggacaagaaatggagttgaataagtaccccccaacatatacaagaaagttagcatacttaccccgtttttcactacatcagaggcaaaataagaaatcttttaagaaaatctcaagactggctcatggcaaaatgaatatgctaaatttgggggttggtttaagcgtggtatgtgtcaggtaattttgtgattaccaaaaagttttcacttgaaaactaagacctttgctgtttatttcacaatgtgaaatcaataaacctgaggatacaagtctctgtagtgatattctgtatttactcatttttacacatttttgaatgcaattttgctaaggaaggaaagcttacagatgcataaaatgtaactgggaagagtagccataaaaatcaatgaatggatgtggctgggcaagagcctctgtaatactaatacgctgaatggctaataagtcacttcatttcggtgaaacaaatacctaaattctttgaagaattaacaggcttgatgttcaggtctgcttttggcaaatgggcatttaaatactccaagaaggtaagagccagaaaataggaaggtaactatgcttttagaaatatgtttacttagattctcccaaggtttatacttacaggtaaacttagaacaatagctcaaatacctacataggagaaggaaatctcaagggaaaacagttaattttaaagttatttaagaaacagaatccaacaccatagatcagagttcatgctaggattatcatttcaaaaataatgactcatccaacagatatagaataatagcactttaaagatgtttaagagtaaagcacaaaccatgtatataccaagacttagctaattctctgagagttataacttaagacaataaaataattaaaaatagtgttaacattaagtagaatgcaaatctctatagatggtttcctgggaaagtagttttgataagctttcctagcattgatcatcttcaaaaaagcatcaataaacagtccatgtcacttgctttagtttgtttgggcctactaattgctccaacacttctcgggaatgatctataaaagaaaacaatgacaatatattaattgacaataaaaaatgtttaatgtttcctcatgtctaactggaggtgatgttaattattatacagttatttaaaggattaaaggaggtgatctataaagcacaatatacaactaactcactaataattaattaatggtagccctcactattattaggtgtagtgcacctatcatggtattacttgtttaaaaaaaaaaaacaggcatttgttgttttctctgtaatttcatcataattccaccaaccagagtaatggtctaatttcaccattaacctgtgttaatggttaataacttttttcaggatcttagccggaaatagatgattcactaaagtggggtgactgaacagcatttaatgaagggaatatttaccaaaaaagtaggattaaagaaagccaataggtacggtaaaccaccttgggaagctgcaacacacccaaagggttaaaggaggtagtagtcaccgaacgtgacaagttgacctgtagctgaacatttttccatgtctgtataatactactataaagcatgattttaaatagataaccattatataaatacactgtaatttaaccaatctatattattggacatttagatgttttcagtttttcacaatgtacagtcgtgattttgatatggtttccatcctagttttaggatgtcttttaaaaatctgaattaaagcaaaaatactgataaaa

SEQ ID NO: 153501 - DNA, 2055 bp, Homo sapiens
  Payload ID: 10193
  Gene Symbol: METTL20
  Gene Name: methyltransferase like 20
  Uniprot ID: Q8IXQ9
  ENST ID: ENST00000395763
  CDS Start-End: 290-1078
gccgcgaggggccgccgtccgtcccgccccctgccgggccgcggcgctctgctagagcgtggctcagttttggtagcgggaccccggaaatgtaaagcatgagcgggaacagtcgccagggcgagtgacaggcgagccctatgctttacttccgagggcggtgtcagcaaagctagagtcagaggttccggttgagatcaagttgggagacacacccttgttcattctccttgagaagcagctattatcaacagaacattgacagaacctgtgtttggggaaaggactgatggctttgagtctaggttggaaagcacacaggaaccactgtggtctcctcttgcaggctctgcgaagcagtggtcttctcttgtttccctgtggccagtgtccctggagaggagctggaagctttttggaccctgagataaaggctttcctggaggagaacactgaagtcaccagcagtggtagcctcacccctgaaatccagttgcggcttttgacccccagatgcaaattctggtgggagagagctgacctgtggccccacagtgatccttactgggcaatctactggccaggaggccaagccctgtctaggtatcttttggataatcctgatgttgtcagaggaaaatctgtattagatcttgggagtggatgtggagctacagctattgctgctaagatgagtggggcatcaaggatcttggccaatgacatagaccctattgcaggaatggctattacactaaattgtgaattgaacagactgaatccttttcctattttaatccaaaacattttgaatttggaacaagataagtgggaccttgttgttcttggcgatatgttttatgatgaagaccttgcagatagtcttcatcagtggctgaagaagtgcttctggacctatagaactcgagtactgattggtgaccctgggcggccccagttcagtggacacagcattcagcatcacctgcacaaagtggtagaatattcacttttggagtctactaggcaggaaaacagtggactgacaacaagcacagtgtggggttttcagccttgagttgtcaaagtgcttccaagtatgaatatagtaatgtttggatctgactctaaaagttttctctataggagatactctccagtttaatgaatgtaattcttgttaaatggaaaatcttgtttttaaaatatgaaggtttagagttttgtttacttttgtcatgtaactggttctgtatttctatgcatgccaattatacacatctctatctgcatttttttttctattttaaccgctgaaggaatatgattatacaatgccatactcaatggtggcagcatttaatttaagtaatggagaagaattaaacattgtagctggatctgtttctgtagtcgaggacaactgtgatgtaactttgaattaaacaaacaaaacaaaacagaagaagactatatatatattttttctttttttagagacagtctcactttgctcccaggctggaatgcagtggctattcagaggcttaatcattgggcactgcagccttgaactctgggcttttttttttttttgagatggagtctcagctctgtcgtccaggctggagtgcagtgactcatgtctcggctcactgtagcctccacctcccccaatcaagcgattgtcctgtctcagcctccagagtagctgggattttaggtgtgcaccaccatgcctggctaatttttgtatttttagtagagacggggttttgccatgttggccaggccggtctcaaactcctgacctcaggtgatccacccgccttggcctcccaaagtgctaggattacaggtgtgagccaccacgccagcctgacgatgttttttacttctatcacttccttttgattttttcttatagcttctatctctgcttacgtcacccatcattcttgcgtgttgtatgcttttcgcattagagccctttgcatgttaatcagttattttaaatttatgatctggtaattctaaaatgtctgccataactga

SEQ ID NO: 153502 - DNA, 1083 bp, Homo sapiens
  Payload ID: 10193
  Gene Symbol: METTL20
  Gene Name: methyltransferase like 20
  Uniprot ID: Q8IXQ9
  ENST ID: ENST00000412352
  CDS Start-End: 210-998
ttcttaatggaatccaagcctctaagcctcacagtccaggccctccaccagcctgcctcaccctatcctcatttcatctcccgcaacctggctccgagtcagaggttccggttgagatcaagttgggagacacacccttgttcattctccttgagaagcagctattatcaacagaacattgacagaacctgtgtttggggaaaggactgatggctttgagtctaggttggaaagcacacaggaaccactgtggtctcctcttgcaggctctgcgaagcagtggtcttctcttgtttccctgtggccagtgtccctggagaggagctggaagctttttggaccctgagataaaggctttcctggaggagaacactgaagtcaccagcagtggtagcctcacccctgaaatccagttgcggcttttgacccccagatgcaaattctggtgggagagagctgacctgtggccccacagtgatccttactgggcaatctactggccaggaggccaagccctgtctaggtatcttttggataatcctgatgttgtcagaggaaaatctgtattagatcttgggagtggatgtggagctacagctattgctgctaagatgagtggggcatcaaggatcttggccaatgacatagaccctattgcaggaatggctattacactaaattgtgaattgaacagactgaatccttttcctattttaatccaaaacattttgaatttggaacaagataagtgggaccttgttgttcttggcgatatgttttatgatgaagaccttgcagatagtcttcatcagtggctgaagaagtgcttctggacctatagaactcgagtactgattggtgaccctgggcggccccagttcagtggacacagcattcagcatcacctgcacaaagtggtagaatattcacttttggagtctactaggcaggaaaacagtggactgacaacaagcacagtgtggggttttcagccttgagttgtcaaagtgcttccaagtatgaatatagtaatgtttggatctgactctaaaagttttctctataggagatactctccagttt

SEQ ID NO: 153503 - DNA, 1067 bp, Homo sapiens
  Payload ID: 10193
  Gene Symbol: METTL20
  Gene Name: methyltransferase like 20
  ENST ID: ENST00000538391
  CDS Start-End: 18-362
gtttggggaaaggactgatggctttgagtctaggttggaaagcacacaggaaccactgtggtctcctcttgcaggctctgcgaagcagtggtcttctcttgtttccctgtggccagtgtccctggagaggagctggaagctttttggaccctgagataaaggctttcctggaggagaacactgaagtcaccagcagtggtagcctcacccctgaaatccagttgcggcttttgacccccagatgcaaattctggtgggagagagctgacctgtggccccacagtgatccttactgggcaatctactggccaggaggccaagccctgtctagttgcaggaatggctattacactaaattgtgaattgaacagactgaatccttttcctattttaatccaaaacattttgaatttggaacaagataagtgggaccttgttgttcttggcgatatgttttatgatgaagaccttgcagatagtcttcatcagtggctgaagaagtgcttctggacctatagaactcgagtactgattggtgaccctgggcggccccagttcagtggacacagcattcagcatcacctgcacaaagtggtagaatattcacttttggagtctactaggcaggaaaacagtggactgacaacaagcacagtgtggggttttcagccttgagttgtcaaagtgcttccaagtatgaatatagtaatgtttggatctgactctaaaagttttctctataggagatactctccagtttaatgaatgtaattcttgttaaatggaaaatcttgtttttaaaatatgaaggtttagagttttgtttacttttgtcatgtaactggttctgtatttctatgcatgccaattatacacatctctatctgcatttttttttctattttaaccgctgaaggaatatgattatacaatgccatactcaatggtggcagcatttaatttaagtaatggagaagaattaaacattgtagctggatctgtttctgtagtcgaggacaactgtgatgtaactttgaattaaacaaacaaaacaaaacagaagaaga

SEQ ID NO: 153504 - DNA, 1862 bp, Homo sapiens
  Payload ID: 10193
  Gene Symbol: METTL20
  Gene Name: methyltransferase like 20
  Uniprot ID: Q8IXQ9
  ENST ID: ENST00000538463
  CDS Start-End: 684-1472
agtctagtgggataccaggccctgagagacccctacgatcccaggacactgatgtggggtaactaacacccactggaagtctacgctgagttcacaggctatgtatgacctgacatgcattttgacctgccctgtgttttgatatttgaatgagttgctgatgtttacaagccgaagctggccgggcgtggtggctcgcgcctgtaatcccagcactttgggaggtcgaggcaggaggatcgcttcaggtcaggagttccagaccagtctggccaacatggcgaaacctcgtctctactaaaaaaaaaaaaaaaaaaaaaaatacaaaaattagccgggcgtggtggcacgcccctgtaatcccaggactcgggaggctgagacaattataaattcattaacccccagaactcttggctagacttcataaaggcaaaaactgtgtttgccctgttaactgctttatcccaccactagaatataagcttcctgaagacagaagacttctgttattttgttcacagttaccaagcatgcctactttgttaaatttatgaaagaactttaaagagtcagaggttccggttgagatcaagttgggagacacacccttgttcattctccttgagaagcagctattatcaacagaacattgacagaacctgtgtttggggaaaggactgatggctttgagtctaggttggaaagcacacaggaaccactgtggtctcctcttgcaggctctgcgaagcagtggtcttctcttgtttccctgtggccagtgtccctggagaggagctggaagctttttggaccctgagataaaggctttcctggaggagaacactgaagtcaccagcagtggtagcctcacccctgaaatccagttgcggcttttgacccccagatgcaaattctggtgggagagagctgacctgtggccccacagtgatccttactgggcaatctactggccaggaggccaagccctgtctaggtatcttttggataatcctgatgttgtcagaggaaaatctgtattagatcttgggagtggatgtggagctacagctattgctgctaagatgagtggggcatcaaggatcttggccaatgacatagaccctattgcaggaatggctattacactaaattgtgaattgaacagactgaatccttttcctattttaatccaaaacattttgaatttggaacaagataagtgggaccttgttgttcttggcgatatgttttatgatgaagaccttgcagatagtcttcatcagtggctgaagaagtgcttctggacctatagaactcgagtactgattggtgaccctgggcggccccagttcagtggacacagcattcagcatcacctgcacaaagtggtagaatattcacttttggagtctactaggcaggaaaacagtggactgacaacaagcacagtgtggggttttcagccttgagttgtcaaagtgcttccaagtatgaatatagtaatgtttggatctgactctaaaagttttctctataggagatactctccagtttaatgaatgtaattcttgttaaatggaaaatcttgtttttaaaatatgaaggtttagagttttgtttacttttgtcatgtaactggttctgtatttctatgcatgccaattatacacatctctatctgcatttttttttctattttaaccgctgaaggaatatgattatacaatgccatactcaatggtggcagcatttaatttaagtaatggagaagaattaaacattgtagctggatctgtttctgtagtcgaggacaactgtgatgtaactttgaattaaacaaacaaaacaaaacagaagaa

SEQ ID NO: 153505 - DNA, 554 bp, Homo sapiens
  Payload ID: 10193
  Gene Symbol: METTL20
  Gene Name: methyltransferase like 20
  ENST ID: ENST00000539633
  CDS Start-End: 339-554
gagagacccctacgatcccaggacactgatgtggggtaactaacacccactggaagtctacgctgagttcacaggctatgtatgacctgacatgcattttgacctgccctgtgttttgatatttgaatgagttgctgatgtttacaagccgaagctggccgggcgtggtggctcgcgcctgtaatcccagcactttgggaggtcgaggcaggaggatcgcttcagagtcagaggttccggttgagatcaagttgggagacacacccttgttcattctccttgagaagcagctattatcaacagaacattgacagaacctgtgtttggggaaaggactgatggctttgagtctaggttggaaagcacacaggaaccactgtggtctcctcttgcaggctctgcgaagcagtggtcttctcttgtttccctgtggccagtgtccctggagaggagctggaagctttttggaccctgagataaaggctttcctggaggagaacactgaagtcaccagcagtggtagcctcacccctgaaatccagttgcggcttttg

SEQ ID NO: 153506 - DNA, 1210 bp, Homo sapiens
  Payload ID: 10194
  Gene Symbol: METTL21A
  Gene Name: methyltransferase like 21A
  ENST ID: ENST00000272839
  CDS Start-End: 177-887
tgcaaaagaaattggacaaaggcttcctccacctgtttctttttttcttttgaacttgtaaacgaccttaaaagcatttggagttagttaagaacagataatgtatcttttggccagagcgtcacccaggattcttttgcacggcaggtctgagcagagggcggggtgcaggcggaatggccctcgtgccctatgaggagaccacggaatttgggttgcagaaattccacaagcctcttgcaactttttcctttgcaaaccacacgatccagatccggcaggactggagacacctgggagtcgcagcggtggtttgggatgcggccatcgttctttccacatacctggagatgggagctgtggagctcaggggccgctctgccgtggagctgggtgctggcacggggctggtgggcatagtggctgccctgctggcacttaagtcatcgatgaagcccttgctggtacactgccttttattcttttcaggtgctcatgtgactatcacggatcgaaaagtagcattagaatttcttaaatcaaacgttcaagccaacttacctcctcatatccaaactaaaactgttgttaaggagctgacttggggacaaaatttggggagtttttctcctggagaatttgacctgatacttggtgctgatatcatatatttagaagaaacattcacagatcttcttcagacactggaacatctctgtagcaatcactctgtgattcttttagcatgccgaattcgctatgaacgggataacaacttcttagcaatgctggagaggcaatttactgtgagaaaggttcactacgatcctgaaaaagatgtacatatttacgaagcacagaagagaaaccagaaggaggacttataattggctataatttataagaatgttgtcattgagtgtgtcacttaaggtcttagactgcaaatctaaccatatttaatgaaatgtcttactgtacaaaaagtctaagccaaaggttctcaggggagaaagcacatgtgcagttttaaaacaaagcagtgctttgtcccattgctgtgatttttagtcagactttactcagtctgaaatgcaattaacattaaaggattaagtgtgagatttcgatttatgctatttgtgtatcccatactcctcccttttaataaacagtttccactgatgatatgaagggccggtataaagaa

SEQ ID NO: 153507 - DNA, 1103 bp, Homo sapiens
  Payload ID: 10194
  Gene Symbol: METTL21A
  Gene Name: methyltransferase like 21A
  Uniprot ID: Q8WXB1
  ENST ID: ENST00000406927
  CDS Start-End: 144-800
gggccggggccgcccgcccccgcgtcgcgggctctttaaggccggcggttttcgcagccagcccggggcggggaaagcggagcgcgcgctccacgcgggaccgcctcccgggccgtctgagcagagggcggggtgcaggcggaatggccctcgtgccctatgaggagaccacggaatttgggttgcagaaattccacaagcctcttgcaactttttcctttgcaaaccacacgatccagatccggcaggactggagacacctgggagtcgcagcggtggtttgggatgcggccatcgttctttccacatacctggagatgggagctgtggagctcaggggccgctctgccgtggagctgggtgctggcacggggctggtgggcatagtggctgccctgctgggtgctcatgtgactatcacggatcgaaaagtagcattagaatttcttaaatcaaacgttcaagccaacttacctcctcatatccaaactaaaactgttgttaaggagctgacttggggacaaaatttggggagtttttctcctggagaatttgacctgatacttggtgctgatatcatatatttagaagaaacattcacagatcttcttcagacactggaacatctctgtagcaatcactctgtgattcttttagcatgccgaattcgctatgaacgggataacaacttcttagcaatgctggagaggcaatttactgtgagaaaggttcactacgatcctgaaaaagatgtacatatttacgaagcacagaagagaaaccagaaggaggacttataattggctataatttataagaatgttgtcattgagtgtgtcacttaaggtcttagactgcaaatctaaccatatttaatgaaatgtcttactgtacaaaaagtctaagccaaaggttctcaggggagaaagcacatgtgcagttttaaaacaaagcagtgctttgtcccattgctgtgatttttagtcagactttactcagtctgaaatgcaattaacattaaaggattaagtgtgagatttcgatttatgctatttgtgtatcccatactcctcccttttaataaacagtttccactgatgata

SEQ ID NO: 153508 - DNA, 1366 bp, Homo sapiens
  Payload ID: 10194
  Gene Symbol: METTL21A
  Gene Name: methyltransferase like 21A
  Uniprot ID: Q8WXB1
  ENST ID: ENST00000458426
  CDS Start-End: 300-572
gttttcgcagccagcccggggcggggaaagcggagcgcgcgctccacgcgggaccgcctcccgggccgtaagtaccggcgtggcggcgcctcagcccggcctgggcgagccctgggtgctccgccgggcagctcacggcgccccgtatggcctggggatcctaagaggccctgtgacccccctcgcctggtctccctctcacccctggagggttgccgcagctccggggcccccgggcaggaagggcgcactggtcgtcccgggagaggggtctgagcagagggcggggtgcaggcggaatggccctcgtgccctatgaggagaccacggaatttgggttgcagaaattccacaagcctcttgcaactttttcctttgcaaaccacacgatccagatccggcaggactggagacacctgggagtcgcagcggtggtttgggatgcggccatcgttctttccacatacctggagatgggagctgtggagctcaggggccgctctgccgtggagctgggtgctggcacggggctggtgggcatagtggctgccctgctgggaggtggaatttaattctcctccccttgaatatgggctggacaaagagaaaaatggtagctcaacagtggagacacctggacagcactttaaccaagtgatcaaagttaatatcgccaattatgtatgtgctcccggatgtgatgttatgagaaaggcacactatacctctgtggaattcctccccaaaacctattatctcaatctatccatagaaaacactggacaaatgcaaactgagggatattctaaaagaaaacagatcactactcttcaaaagttacaaggccatcaaagacaaggaaacaaactttcacagactgaaggagactataattaaatgcgatatggtacccaaactggattatgtaagtaaaaaaactggggaaataaaatgtataattcagttaatggtattataccaatgtacttttatttttgataaatgtaccctggttatgtaatatactaagattagagaaagctggatgaagggtatccggaactctgtatttttaaaactcctttgtaagtttaaaattacttaaaaatatattaaaaatgtatatttacctttgtactggtttgagtaaaaaaactgactttagaatgttaacattttagatggtgaaattagaagtaattcaatttttaggtaatgtttcttaatttacttataatgaacatgttttacttgtgtaataataaatttaaaaaacctgatagtaatgtaaatactctttggtaacctgcttttgtccgagaacatcttcccatcttaataaaaatacacctttatttactcttaa

SEQ ID NO: 153509 - DNA, 1003 bp, Homo sapiens
  Payload ID: 10194
  Gene Symbol: METTL21A
  Gene Name: methyltransferase like 21A
  Uniprot ID: Q8WXB1
  ENST ID: ENST00000442521
  CDS Start-End: 281-937
ctgtgctttagttgaaaagggttttgtgacttttccactcgattgccgccaagcgggctattacgccgcttctgaccccaccgtggagacgcggggactagagtgaccatgccttcttcggagcgagctgtctccatcatccgctaacgcgccacctttaaaaaacaggcacaacgcgcaagcgacaaagtcagaggcagagagcggcggagcacatgatagaaaaggtcgagaggcacattcagcgccaggtctgagcagagggcggggtgcaggcggaatggccctcgtgccctatgaggagaccacggaatttgggttgcagaaattccacaagcctcttgcaactttttcctttgcaaaccacacgatccagatccggcaggactggagacacctgggagtcgcagcggtggtttgggatgcggccatcgttctttccacatacctggagatgggagctgtggagctcaggggccgctctgccgtggagctgggtgctggcacggggctggtgggcatagtggctgccctgctgggtgctcatgtgactatcacggatcgaaaagtagcattagaatttcttaaatcaaacgttcaagccaacttacctcctcatatccaaactaaaactgttgttaaggagctgacttggggacaaaatttggggagtttttctcctggagaatttgacctgatacttggtgctgatatcatatatttagaagaaacattcacagatcttcttcagacactggaacatctctgtagcaatcactctgtgattcttttagcatgccgaattcgctatgaacgggataacaacttcttagcaatgctggagaggcaatttactgtgagaaaggttcactacgatcctgaaaaagatgtacatatttacgaagcacagaagagaaaccagaaggaggacttataattggctataatttataagaatgttgtcattgagtgtgtcacttaaggtcttagactgcaaatctaa

SEQ ID NO: 153510 - DNA, 869 bp, Homo sapiens
  Payload ID: 10194
  Gene Symbol: METTL21A
  Gene Name: methyltransferase like 21A
  Uniprot ID: Q8WXB1
  ENST ID: ENST00000425132
  CDS Start-End: 145-417
cgggccggggccgcccgcccccgcgtcgcgggctctttaaggccggcggttttcgcagccagcccggggcggggaaagcggagcgcgcgctccacgcgggaccgcctcccgggccgtctgagcagagggcggggtgcaggcggaatggccctcgtgccctatgaggagaccacggaatttgggttgcagaaattccacaagcctcttgcaactttttcctttgcaaaccacacgatccagatccggcaggactggagacacctgggagtcgcagcggtggtttgggatgcggccatcgttctttccacatacctggagatgggagctgtggagctcaggggccgctctgccgtggagctgggtgctggcacggggctggtgggcatagtggctgccctgctgggaggtggaatttaattctcctccccttgaatatgggctggacaaagagaaaaatggtagctcaacagtggagacacctggacagcactttaaccaagtgatcaaagttaatatcgccaattatgtatgtgctcccggatgtgatgttatgagaaaggcacactatacctctgtggaattcctccccaaaacctattatctcaatctatccatagaaaacactggacaaatgcaaactgagggatattctaaaagaaaacagatcactactcttcaaaagttacaaggccatcaaagacaaggaaacaaactttcacagactgaaggagactataattaaatgcgatatggtacccaaactggattatgtaagtaaaaaaactggggaaataaaatgtataattcagttaatggtattataccaatgtacttttatttttgataaatgtaccctggttatgtaatat

SEQ ID NO: 153511 - DNA, 1051 bp, Homo sapiens
  Payload ID: 10194
  Gene Symbol: METTL21A
  Gene Name: methyltransferase like 21A
  Uniprot ID: Q8WXB1
  ENST ID: ENST00000426075
  CDS Start-End: 192-848
gattcggaagagccatgcaaaagaaattggacaaaggcttcctccacctgtttctttttttcttttgaacttgtaaacgaccttaaaagcatttggagttagttaagaacagataatgtatcttttggccagagcgtcacccaggattcttttgcacggcaggtctgagcagagggcggggtgcaggcggaatggccctcgtgccctatgaggagaccacggaatttgggttgcagaaattccacaagcctcttgcaactttttcctttgcaaaccacacgatccagatccggcaggactggagacacctgggagtcgcagcggtggtttgggatgcggccatcgttctttccacatacctggagatgggagctgtggagctcaggggccgctctgccgtggagctgggtgctggcacggggctggtgggcatagtggctgccctgctgggtgctcatgtgactatcacggatcgaaaagtagcattagaatttcttaaatcaaacgttcaagccaacttacctcctcatatccaaactaaaactgttgttaaggagctgacttggggacaaaatttggggagtttttctcctggagaatttgacctgatacttggtgctgatatcatatatttagaagaaacattcacagatcttcttcagacactggaacatctctgtagcaatcactctgtgattcttttagcatgccgaattcgctatgaacgggataacaacttcttagcaatgctggagaggcaatttactgtgagaaaggttcactacgatcctgaaaaagatgtacatatttacgaagcacagaagagaaaccagaaggaggacttataattggctataatttataagaatgttgtcattgagtgtgtcacttaaggtcttagactgcaaatctaaccatatttaatgaaatgtcttactgtacaaaaagtctaagccaaaggttctcaggggagaaagcacatgtgcagttttaaaacaaagcagtgctttgtcccattgctgtgatttttagtcagactttactcagtctg

SEQ ID NO: 153512 - DNA, 1770 bp, Homo sapiens
  Payload ID: 10194
  Gene Symbol: METTL21A
  Gene Name: methyltransferase like 21A
  Uniprot ID: Q8WXB1
  ENST ID: ENST00000448007
  CDS Start-End: 172-828
ccagtgtcgctcacttccagggtcggggagacggaactgcggcgaccatgtatttctggtttatcaaaccgctaacacccagtctaagggcaggttctgtcccattgttatcactatcgaagcagccgatggaggaggggaggtctgagcagagggcggggtgcaggcggaatggccctcgtgccctatgaggagaccacggaatttgggttgcagaaattccacaagcctcttgcaactttttcctttgcaaaccacacgatccagatccggcaggactggagacacctgggagtcgcagcggtggtttgggatgcggccatcgttctttccacatacctggagatgggagctgtggagctcaggggccgctctgccgtggagctgggtgctggcacggggctggtgggcatagtggctgccctgctgggtgctcatgtgactatcacggatcgaaaagtagcattagaatttcttaaatcaaacgttcaagccaacttacctcctcatatccaaactaaaactgttgttaaggagctgacttggggacaaaatttggggagtttttctcctggagaatttgacctgatacttggtgctgatatcatatatttagaagaaacattcacagatcttcttcagacactggaacatctctgtagcaatcactctgtgattcttttagcatgccgaattcgctatgaacgggataacaacttcttagcaatgctggagaggcaatttactgtgagaaaggttcactacgatcctgaaaaagatgtacatatttacgaagcacagaagagaaaccagaaggaggacttataattggctataatttataagaatgttgtcattgagtgtgtcacttaaggtcttagactgcaaatctaaccatatttaatgaaatgtcttactgtacaaaaagtctaagccaaaggttctcaggggagaaagcacatgtgcagttttaaaacaaagcagtgctttgtcccattgctgtgatttttagtcagactttactcagtctgaaatgcaattaacattaaaggattaagtgtgagatttcgatttatgctatttgtgtatcccatactcctcccttttaataaacagtttccactgatgatatgaagggccggtataaagaagtctttaaatgagtaagctttcttggtaagattaaatcttacaaattatttttaaaaccttgtgatatatacaatgtttagctgagttttctaattttctggatgtaaaacaaaaggtttaacctatacattccttgagctgttagtgctatttaaatcttttgccctgtttaggtcctaaacacttttagttgagtaggatatgagcttttttgggtctcatatcatgctttttgccttaatttcaggtatatatatatatataaataaaggaattaagtaaaaataaaatttcagttactttttaaaagcacctgaaatctggccggatgcggtggctcatgcctgtaatcccaccactttgggaggccgaggcgggcagatcacctgaggtcaggagttcaagaccagcctggccaacatggtgaaaccccatctctactaaaaatacaaaaattagccgggcgtggtgtcaggcgcctgtaatcccagctactcaggaggctgaggcaggagaatcgcttgaacctgggaggcagaggttgcagtgagctgagattgcaccattgtactccagcctgggggacaagagcgagactccatctcaaaaaaaaaaaaa

SEQ ID NO: 153513 - DNA, 869 bp, Homo sapiens
  Payload ID: 10194
  Gene Symbol: METTL21A
  Gene Name: methyltransferase like 21A
  ENST ID: ENST00000448823
  CDS Start-End: 6-164
gcggaatggccctcgtgccctatgaggagaccacggaatttgggttgcagaaattccacaagcctcttgcaactttttcctttgcaaaccacacgatccagatccggcaggactggagacacctgggagtcgcagcggtggtttgggatgcggtgctcatgtgactatcacggatcgaaaagtagcattagaatttcttaaatcaaacgttcaagccaacttacctcctcatatccaaactaaaactgttgttaaggagctgacttggggacaaaatttggggagtttttctcctggagaatttgacctgatacttggtgctgatatcatatatttagaagaaacattcacagatcttcttcagacactggaacatctctgtagcaatcactctgtgattcttttagcatgccgaattcgctatgaacgggataacaacttcttagcaatgctggagaggcaatttactgtgagaaaggttcactacgatcctgaaaaagatgtacatatttacgaagcacagaagagaaaccagaaggaggacttataattggctataatttataagaatgttgtcattgagtgtgtcacttaaggtcttagactgcaaatctaaccatatttaatgaaatgtcttactgtacaaaaagtctaagccaaaggttctcaggggagaaagcacatgtgcagttttaaaacaaagcagtgctttgtcccattgctgtgatttttagtcagactttactcagtctgaaatgcaattaacattaaaggattaagtgtgagatttcgatttatgctatttgtgtatcccatactcctcccttttaataaacagtttccactgatgatatgaagggccggtataa

SEQ ID NO: 153514 - DNA, 4805 bp, Homo sapiens
  Payload ID: 10194
  Gene Symbol: METTL21A
  Gene Name: methyltransferase like 21A
  Uniprot ID: Q8WXB1
  ENST ID: ENST00000411432
  CDS Start-End: 218-874
gcggcgcctcagcccggcctgggcgagccctgggtgctccgccgggcagctcacggcgccccgtatggcctggggatcctaagaggccctgtgacccccctcgcctggtctccctctcacccctggagggttgccgcagctccggggcccccgggcaggaagggcgcactggtcgtcccgggagaggggtctgagcagagggcggggtgcaggcggaatggccctcgtgccctatgaggagaccacggaatttgggttgcagaaattccacaagcctcttgcaactttttcctttgcaaaccacacgatccagatccggcaggactggagacacctgggagtcgcagcggtggtttgggatgcggccatcgttctttccacatacctggagatgggagctgtggagctcaggggccgctctgccgtggagctgggtgctggcacggggctggtgggcatagtggctgccctgctgggtgctcatgtgactatcacggatcgaaaagtagcattagaatttcttaaatcaaacgttcaagccaacttacctcctcatatccaaactaaaactgttgttaaggagctgacttggggacaaaatttggggagtttttctcctggagaatttgacctgatacttggtgctgatatcatatatttagaagaaacattcacagatcttcttcagacactggaacatctctgtagcaatcactctgtgattcttttagcatgccgaattcgctatgaacgggataacaacttcttagcaatgctggagaggcaatttactgtgagaaaggttcactacgatcctgaaaaagatgtacatatttacgaagcacagaagagaaaccagaaggaggacttataattggctataatttataagaatgttgtcattgagtgtgtcacttaaggtcttagactgcaaatctaaccatatttaatgaaatgtcttactgtacaaaaagtctaagccaaaggttctcaggggagaaagcacatgtgcagttttaaaacaaagcagtgctttgtcccattgctgtgatttttagtcagactttactcagtctgaaatgcaattaacattaaaggattaagtgtgagatttcgatttatgctatttgtgtatcccatactcctcccttttaataaacagtttccactgatgatatgaagggccggtataaagaagtctttaaatgagtaagctttcttggtaagattaaatcttacaaattatttttaaaaccttgtgatatatacaatgtttagctgagttttctaattttctggatgtaaaacaaaaggtttaacctatacattccttgagctgttagtgctatttaaatcttttgccctgtttaggtcctaaacacttttagttgagtaggatatgagcttttttgggtctcatatcatgctttttgccttaatttcaggtatatatatatatataaataaaggaattaagtaaaaataaaatttcagttactttttaaaagcacctgaaatctggccggatgcggtggctcatgcctgtaatcccaccactttgggaggccgaggcgggcagatcacctgaggtcaggagttcaagaccagcctggccaacatggtgaaaccccatctctactaaaaatacaaaaattagccgggcgtggtgtcaggcgcctgtaatcccagctactcaggaggctgaggcaggagaatcgcttgaacctgggaggcagaggttgcagtgagctgagattgcaccattgtactccagcctgggggacaagagcgagactccatctcaaaaaaaaaaaaaaaaaaaaaaaaaaaaagcacctgaaatcttgaataggttttctttttttttttttttttttaattaatttattttttttttattgatcattcttgggtgtttctcgcagagggggatttggcagggtcataggacaatagtggagggaaggtcagcagataaacaagtgaacaaaggtctctggttttcctaggcagaggaccctgcggccttggccttccgcagtgtttgtgtccctgggtacttaagattagggagtggtgatgactcttaacgagcatgctgccttcaagcatctgtttaacaaagcacatcttgcaccgcccttaatccatttaaccctgagtggacacagcacatgtttcagagagcacagggttggggataaggtcacagatcaacaggatcccaaggcagaagaatttttcttagtacagaacaaaatgaaaagtctcccatgtctacttctatccacacagacccggcaaccatccgatttctcaattttttccccacccttcccgcctttctattccacaaaaccgccattgtcatcgtggcccatccccaatgagccgctgggcacacctcccagacggggtcgtggccgggcagaggggctcctcacttcccagtaggggcggccgggcagaagcgcccctcacctcccggatggggcggctggccgggcggggggctgacccccccaccaccctcccggacggggcggctggccaggcagaggggctcctcacttcccagtagggacggccgggcagacgcgcccctcacctcctggatagggcggctggctgggcggggggctgtcccccccacctccctcccggacggggcggctggccgggcagaggggtcctcacttcccagtaggggcggccgggcagaggcgcccctcacctcccggacggggcggccggccggaaggggggctgaccccccccacctccctcccggaccgggcggctggccgacccccccccccccccccgcctccctcccggacggggcggctggccgggcagaggggctcctcactttccagtaggggcggccgggcagaggcgcccctcacctcccggacggggcgactggccaggcggggggctgacccccccacctccctcccggatggggcagctggccaggtgggaggatgacccccccacctccctcccgggcggggcggctggccgggcagaggggctcctcacttcccagtaggggcggccgggcagaggcgcccctcacctcccggatggggcggctggccaggcggggggctgatccccccacctccctcccggacggggcggctggccaggcagaggggctcctcacttcccagtaggggcggccgggcagaggagcccctcacctcccggacggggcggctggccgggcggggggctgaccccccccacctccctcccggacggggtggctgctgggcggagacgctcctcacttcccagacggggtggttgccggacggaggggctcctcacttctcagacggggcggttgccaggcagagggtttcctcacttctcagacggagcggccgggcagagacgctccccacctcccagacagggctgcggcccagcagaggcgctcctcacatcccagacagggcggcggggcagaggtgctccccacatctcagacgatgggcggccgggcagagacgctcctcacttcctagatgggatggcggcggggaagaggcgctcctcgcttcccagatgggatggcggccgggcagagacgctcctcactttccagactgggcagccaggcagaggggctcctcacatcccagacgatgggtggccaagcagagacgctcctcacttcccagacggggtggcggccaggcagaggctgcaatctcggctctccgggaggccaaggcaggcggctgggaggtggttgcagcgagccgagatcacgccactgcactccagcctgggcaccattgagcactgagtgaacgagactccatctgcaatcccggcacctcgggaggccgaggctggcggatcactcgcggctaggagctggagaccagcccggccaacacagcgaaaccccgtctccaccaaaaaaaaccgaaaaccagtcaggcgtggcggtgcgcgcctgcaatcgcaggcactcggcaggctgaggcaggagaatcaggcagggaggttgcagtgagccgagatggcagcagtaccgtccagccttggctcggcatcagagggagaccgtggagggagagggagagggagagggagagggagggggagggagagggagagggagggaataggttttctatttcaagtcaagagctgaggttttccccttctgttttacccttgctcaaatgtcttaatgcagttctttcccaagctttccctgcttccttaacaacgcataggatgacattaaaagttttaaatctcatccctgcctgagaggttagcttcctacatataagctccttttgtattggacttgtaattgctcattcagtggtagtattgccctgtagagtgtaagctccttgagggccaagaatgcttctgcctcttccattgttgcttccccagtaccttctgtatatttcataaccaaataatgaaaaagatacattccatttaaagggcattgactttgggttaaatgattgttatattgttttaggattatctatgatacactttgacatctcacacacacacatgaacttttctttttacaatgcaaaagtttaaacaatagcttaaatttagactgcaagaatattataatctcaatatggtatttggtactagagatagatttcttttataaaatcttaaaaacaggacgttctcttccttttgaacctttatcccagaggtgaaaatatccaatatgttgttttctgcatatattgaagtagtagtttcactttaataaagatggattaaaagtt

SEQ ID NO: 153515 - DNA, 869 bp, Homo sapiens
  Payload ID: 10194
  Gene Symbol: METTL21A
  Gene Name: methyltransferase like 21A
  ENST ID: ENST00000432416
  CDS Start-End: 90-473
ggttgccgcagctccggggcccccgggcaggaagggcgcactggtcgtcccgggagaggggtctgagcagagggcggggtgcaggcggaatggccctcgtgccctatgaggagaccacggaatttgggttgcagaaattccacaagcctcttgcaactttttcctttgcaaaccacacgatccagatccggcaggactggagacacctgggagtcgcagcggtggtttgggatgcggccatcgttctttccacatacctggagatgggagctgtggagctcaggggccgctctgccgtggagctgggtgctggcacggggctggtgggcatagtggctgccctgctggaaaacactggacaaatgcaaactgagggatattctaaaagaaaacagatcactactcttcaaaagttacaaggccatcaaagacaaggaaacaaactttcacagactgaaggagactataattaaatgcgatatggtacccaaactggattatgaagagttcattcccactccactgactttgggcttgtccttgcctgtgctgtggctaacagatcacgagtagatgtaacgttcaccaaaatcaagcaaatgctttcaaaagcattgcccttttctcaaagacgtgctgctctatctagcccaggatcctagacccagatgggcacatgaaggagagccacagcaactgacctgcagctgccaaaatgtaacagaagtgaggaagaaattttaagacactgagattcgtggttgttactgtagcaacacaaattaacagaagagctgtctacactttcttttagaatgtttaccacttaccttcatcttgaaataaatggcaatttggatagtgatgaa

SEQ ID NO: 153516 - DNA, 2563 bp, Homo sapiens
  Payload ID: 10195
  Gene Symbol: METTL21B
  Gene Name: methyltransferase like 21B
  Uniprot ID: Q96AZ1
  ENST ID: ENST00000300209
  CDS Start-End: 126-806
ctcagggaggcggggctcgttccacagggacaccacgacggctcgcggcccccagcctctaccccgctccggatccgggatctgagcgccggccgcggtgcccaggcactcccttggcgggccggatggcggaccccggcccagatcccgaatctgagtcggaatcggtgttcccgcgggaggtcgggctctttgcagactcttactcggagaagagccagttctgtttctgtgggcatgtgctgaccatcacgcagaactttgggtcccgcctcggggtggcggcgcgcgtgtgggacgcggccctgagcctgtgcaattatttcgagagtcaaaatgtggatttccgaggcaagaaggtgatcgaactgggtgcggggacaggcatcgtggggatcttggcagcgctgcaggggggggatgttaccatcactgacctgcccctggccctagaacagatccagggcaacgtccaggccaatgtgccagctggaggccaggcccaggtgcgtgccttgtcctgggggattgaccatcatgtcttccctgcaaactatgacctggtgctgggggctgatatcgtgtacctggaacccaccttccctctgctgctggggaccctccaacacctgtgcaggccccatggcaccatctatctggcctccaagatgagaaaggagcatgggacagagagcttctttcagcacctcctgccccagcatttccaactggagctggctcagcgggatgaggatgaaaatgtcaacatctatagggccaggcacagggaaccaagacctgcttgacatcacccttgctgttcttctcaatctcttgctctaatgaaggaactgtgtatctcaaaaaccatatttccagagccacaaacatgaggaccaaaaaggatggatttccctggcctctctcactttcctccttccctctttgttaccccagatactcttgggcaggtgcagtgaggtgcctgcttacaaggaatcccagagttctggcagcactagtgttagaacaccaaggaggttcctggctcctgttctcagagaaggaggatggtaaggtatccaggatttttagggggtaagggagatatatgggatgtgagagcagtgattgtagacagactgtcactgatcacttccattcctgttgctgtttacacagaatggactttaaaaaaattctgtgggatttttttttctttttttctttttttttgagacagggtctcactctgtcatccaggctggagtgcagtggtgtgatcacagctcactgcagcctcaacctctgaaggcccagatgatcttcctgcctcagctccccaagtagctgggactagaggcatgcgccaccacacccggctaatttttgtattttcagtagagacagggtttcgccatgttgcccagggtggtctcaaactcctgggctcaagtgatccacccgccttgcctcccaaagtgctgggattgcaggcatggcccactgtgctagcctaggatttttttttttttttaagaaagaattaagccttaaaaatctattgtgcaagaacccaacttttactcaggagctgagaaggaagaagcctcaaaccacccatttcctgctttttagagatagagtctagtggaaccatggctctaactgggtcaagtcctcctagctctgaagctaaggctgcagagctgtcctttggactgtatttcttcatgctttccagagttagagccttgatcacggaacatcattgtgtgcagaagaatactgtacctagtactaagttcttttcatctttgatttttctttagcttcatcagtccttccttcctaatctctaatcccctgaagcctaacacagttcctaatgtgttttgccttaacctcttttctcttcccacattggtacttctggttggggctctctttacttactgcttaggcacatagtcaccttctctggactccctgcttccatgctttctccttcagtccattccgcaaactcttgtgatcttccaaaattagctctgattagctttcacttcctgtagaagcaagaacaagctcctctgcttggtacttagtctgtgtccatgtgatccaaaattaccttcctattgcatttcctactcctttgctacgtgtattggacctctggccaaattacaaaagatgtactctttgttctctaaaaccacactaaagttttctgacttctttcacactctttatgataatcctctgcctgaaaggctattgccacctgtcaaaatcttcattattctttgcctctttcctgagcctcttgcttgaatgtgatttctttctccctgagacccataaggttcatcttatgggaccttaatttgtcttgcatggacatttgtgattctcattttctcaccattaaattaccttggagggtagggctgtggtttactcctgtctaaacccctgaagcctaacacagttcctggcacacaacaggtgttcaacagatattgtgctcattcaataaatatttactcgctttgtttaa

SEQ ID NO: 153517 - DNA, 2762 bp, Homo sapiens
  Payload ID: 10195
  Gene Symbol: METTL21B
  Gene Name: methyltransferase like 21B
  Uniprot ID: Q96AZ1
  ENST ID: ENST00000333012
  CDS Start-End: 48-497
gatctgagcgccggccgcggtgcccaggcactcccttggcgggccggatggcggaccccggcccagatcccgaatctgagtcggaatcggtgttcccgcgggaggtcgggctctttgcagactcttactcggagaagagccagttctgtttctgtgggcatgtgctgaccatcacgcagaactttgggtcccgcctcggggtggcggcgcgcgtgtgggacgcggccctgagcctgtgcaattatttcgagagtcaaaatgtggatttccgaggcaagaaggtgatcgaactgggtgcggggacaggcatcgtggggatcttggcagcgctgcagggagcttatggtctagtgagggagacagaggacgatgtcatagaacaagaactctggcgaggtatgcgtggagcctgtggacatgctctatccatgtctaccatgactccctgggaatccatcaagggaagctctgtcagggggggatgttaccatcactgacctgcccctggccctagaacagatccagggcaacgtccaggccaatgtgccagctggaggccaggcccaggtgcgtgccttgtcctgggggattgaccatcatgtcttccctgcaaactatgacctggtgctgggggctgatatcgtgtacctggaacccaccttccctctgctgctggggaccctccaacacctgtgcaggccccatggcaccatctatctggcctccaagatgagaaaggagcatgggacagagagcttctttcagcacctcctgccccagcatttccaactggagctggctcagcgggatgaggatgaaaatgtcaacatctatagggccaggcacagggaaccaagacctgcttgacatcacccttgctgttcttctcaatctcttgctctaatgaaggaactgtgtatctcaaaaaccatatttccagagccacaaacatgaggaccaaaaaggatggatttccctggcctctctcactttcctccttccctctttgttaccccagatactcttgggcaggtgcagtgaggtgcctgcttacaaggaatcccagagttctggcagcactagtgttagaacaccaaggaggttcctggctcctgttctcagagaaggaggatggtaaggtatccaggatttttagggggtaagggagatatatgggatgtgagagcagtgattgtagacagactgtcactgatcacttccattcctgttgctgtttacacagaatggactttaaaaaaattctgtgggatttttttttctttttttctttttttttgagacagggtctcactctgtcatccaggctggagtgcagtggtgtgatcacagctcactgcagcctcaacctctgaaggcccagatgatcttcctgcctcagctccccaagtagctgggactagaggcatgcgccaccacacccggctaatttttgtattttcagtagagacagggtttcgccatgttgcccagggtggtctcaaactcctgggctcaagtgatccacccgccttgcctcccaaagtgctgggattgcaggcatggcccactgtgctagcctaggatttttttttttttttaagaaagaattaagccttaaaaatctattgtgcaagaacccaacttttactcaggagctgagaaggaagaagcctcaaaccacccatttcctgctttttagagatagagtctagtggaaccatggctctaactgggtcaagtcctcctagctctgaagctaaggctgcagagctgtcctttggactgtatttcttcatgctttccagagttagagccttgatcacggaacatcattgtgtgcagaagaatactgtacctagtactaagttcttttcatctttgatttttctttagcttcatcagtccttccttcctaatctctaatcccctgaagcctaacacagttcctaatgtgttttgccttaacctcttttctcttcccacattggtacttctggttggggctctctttacttactgcttaggcacatagtcaccttctctggactccctgcttccatgctttctccttcagtccattccgcaaactcttgtgatcttccaaaattagctctgattagctttcacttcctgtagaagcaagaacaagctcctctgcttggtacttagtctgtgtccatgtgatccaaaattaccttcctattgcatttcctactcctttgctacgtgtattggacctctggccaaattacaaaagatgtactctttgttctctaaaaccacactaaagttttctgacttctttcacactctttatgataatcctctgcctgaaaggctattgccacctgtcaaaatcttcattattctttgcctctttcctgagcctcttgcttgaatgtgatttctttctccctgagacccataaggttcatcttatgggaccttaatttgtcttgcatggacatttgtgattctcattttctcaccattaaattaccttggagggtagggctgtggtttactcctgtctaaacccctgaagcctaacacagttcctggcacacaacaggtgttcaacagatattgtgctcattcaataaatatttactcgctttgtttaatggattccacccctgccttcctaggtgaccttggacaaattctcgaacccattcaccaaccacacaagtttgttgtgagtcataaatggataatgaatataaatgcgcattgaaaataaacataaaatgttacccaca

SEQ ID NO: 153518 - DNA, 561 bp, Homo sapiens
  Payload ID: 10195
  Gene Symbol: METTL21B
  Gene Name: methyltransferase like 21B
  ENST ID: ENST00000548256
  CDS Start-End: 84-407
acttctggcggttgatgtgaccctggccgggtaactgccctttctggggcacaagttccccttctcccgagactggctgcctaatgcactgggatcctactttgtgtttgtgctctgcggggagggaaggtaaggccctgagcctgtgcaattatttcgagagtcaaaatgtggatttccgaggcaagaaggtgatcgaactgggtgcggggacaggcatcgtggggatcttggcagcgctgcagggagcttatggtctagtgagggagacagaggacgatgtcatagaacaagaactctggcgaggtatgcgtggagcctgtggacatgctctatccatgtctaccatgactccctgggaatccatcaagggaagctctgtcagggggggatgttaccatcactgacctgcccctggccctagaacagatccagggcaacgtccaggccaatgtgccagctggaggccaggcccaggtgcgtgccttgtcctgggggattgaccatcatgtcttccctgcaaactatgacctggtgctgggggctgatatcgtgtacctg

SEQ ID NO: 153519 - DNA, 836 bp, Homo sapiens
  Payload ID: 10195
  Gene Symbol: METTL21B
  Gene Name: methyltransferase like 21B
  ENST ID: ENST00000551420
  CDS Start-End: 565-702
aaattcagctgggctgggctgggctgggctgggctaggtggggagggctgtaaggagcgagtgctggagggaacctccgcaccgttagcctccaactgggagggcgaggccaggcccagggacccaacgttttctcttagcttgcttctgcctggtctgggttaccatcctggttgcaggcacctgtgcaccccacaggccctgagcctgtgcaattatttcgagagtcaaaatgtggatttccgaggcaagaaggtgatcgaactgggtgcggggacaggcatcgtggggatcttggcagcgctgcaggggggggatgttaccatcactgacctgcccctggccctagaacagatccagggcaacgtccaggccaatgtgccagctggaggccaggcccaggtgcgtgccttgtcctgggggattgaccatcatgtcttccctgcaaactatgacctggtgctgggggctgatatcgtgtacctggaacccaccttccctctgctgctggggaccctccaacacctgtgcaggccccatggcaccatctatctggcctccaagatgagaaaggagcatgggacagagagcttctttcagcacctcctgccccagcatttccaactggagctggctcagcgggatgaggatgaaaatgtcaacatctatagggccaggcacagggaaccaagacctgcttgacatcacccttgctgttcttctcaatctcttgctctaatgaaggaactgtgtatctcaaaaaccatatttccagagccacaaacatgaggaccaaaaaggatggatttccctggcctctctcactttcctccttc

SEQ ID NO: 153520 - DNA, 30 bp, Homo sapiens
  Payload ID: 10195
  Gene Symbol: METTL21B
  Gene Name: methyltransferase like 21B
  ENST ID: ENST00000630957
  CDS Start-End: 1-30
tcgaacccattcaccaaccacacaactaga

SEQ ID NO: 153521 - DNA, 1088 bp, Homo sapiens
  Payload ID: 10196
  Gene Symbol: METTL21C
  Gene Name: methyltransferase like 21C
  Uniprot ID: Q5VZV1
  ENST ID: ENST00000267273
  CDS Start-End: 7-801
ccggctatggacgtgtgtctgagctccgcgcagcagcctgggcgccggggggaaggactcagctccccgggtggctggttagaggctgagaagaagggggctccgcagaaagacagcaccgggggagtcctagaagaatccaacaagatagaaccatctcttcatagcctccagaaatttgttcctacagattacgccagctacactcaggagcattatcggtttgcaggaaaggagattgtcatccaggaatccatagagagttacggagcggtggtgtggccaggggctatggctttgtgtcaatacttggaggaacatgccgaggaattgaatttccaagatgcaaaaatacttgaaattggtgccggaccaggccttgtttccattgtggccagtattttaggagctcaagtcacagcaacagatttgcctgatgtcctgggaaaccttcaatacaatcttttaaaaaacacactacaatgtacagcacatctgcctgaagtgaaagaactggtatggggggaagacctggacaaaaactttcccaagtcagctttttactatgattacgtcctagcctcagatgtggtctaccatcactacttcctggacaagctgctcaccaccatggtgtacctttcccagccagggacggtgctgctttgggcaaacaaattcaggttcagcaccgactatgaatttttagataaattcaagcaagtttttgacacaacactgttggctgaatatccagagtcatcagtcaaactttttaaggggatactaaaatgggactaaatccaacaaaatgcctttcacaacgttactgtgtcttttgagcaatgtgttagaaattgctttggtaatagacttctttcacaggattgagaaggtagtgcatagaaacaacttgtatacttggaacaaatgtaacaatactgcagaaactttctaatttctaagataatttaagattatctggttaatctaaatatctaaaaagaacaacataaaaacatgaaagtagctttgttggttccaacgaagttacatgtttaataaatcttacatggataaagtaataa

SEQ ID NO: 153522 - DNA, 1510 bp, Homo sapiens
  Payload ID: 10197
  Gene Symbol: METTL22
  Gene Name: methyltransferase like 22
  Uniprot ID: Q9BUU2
  ENST ID: ENST00000163678
  CDS Start-End: 256-873
cctgcgcagaccgcctgttatggcggccgcctaagtcccacagagacgggagtcgggtgggatcccaggctgggccccgcggcggctggattctcttccctggccaagtctctgagatcttctcccagggcgatgcaaagctactcgctaccagcttggacctgtctgcagtatctcctctgggacctgccatgctgaggacccattctcacctctgagggactcctgtcctaggactaaggtggagcctgggccatggtacagctggctcctgcggcagccatggacgaggtcacctttaggagcgacactgtgctgtcagatgtccacctctataccccgaaccatagacatctcatggtacggctgaacagcgtggggcagccagttttcctgtcccaattcaagcttctatggagccaagactcttggacagattcaggagccaagggtggcagtcacagagatgttcacacaaaggagcctccttctgctgagacaggcagcacagggtcccctccaggaagtggccatggtaatgagggtttctccctccaggccgggactgacaccactggccaggaagtggctgaagctcagctggatgaggatggggatttggacgtggtgagaagaccacgagccgcctctgattccaacccagcagggcctctgagagacaaggtacatcccatgattctagcacaggaagaagacgacgtcctgggagaggaagcacaaggcagcccgcacgatatcatcagaataggtgtggcggggcgccctgctcctggcagactacatcctgttccgacaggacctcttccgaggatgtacagcgctggagctcggggccggcacggggctcgctagcatcatcgcagccaccatggcacggaccgtttattgtacagatgtcggtgcagatctcttgtccatgtgccagcgaaacattgccctcaacagccacctggctgccactggaggtggtatagttagggtcaaagaactggactggctgaaggacgacctctgcacagatcccaaggtccccttcagttggtcacaagaggaaatttctgacttgtacgatcacaccaccatcctgtttgcagccgaagtgttttacgacgacgacttgactgatgctgtgtttaaaacgctctcccgactcgcccacagattgaaaaatgcctgcacagccatactgtcggtggagaagaggctcaacttcacattgagacacttggacgtcacatgtgaagcctacgatcacttccgctcctgcctgcacgcgctggagcagctcgcagatggcaagctgcgcttcgtggtggagcccgtggaggcctccttcccacagctcctggtttacgagcgcctccagcaactggagctctggaagatcatcgcagaaccagtaacatgacccatcgcctccacaaggcgcggcgtctcgactgttcttagagtgtatttctagtaaaatcagaagctcaccaaagcaaca

SEQ ID NO: 153523 - DNA, 4984 bp, Homo sapiens
  Payload ID: 10197
  Gene Symbol: METTL22
  Gene Name: methyltransferase like 22
  Uniprot ID: Q9BUU2
  ENST ID: ENST00000381920
  CDS Start-End: 259-1473
gcgcctgcgcagaccgcctgttatggcggccgcctaagtcccacagagacgggagtcgggtgggatcccaggctgggccccgcggcggctggattctcttccctggccaagtctctgagatcttctcccagggcgatgcaaagctactcgctaccagcttggacctgtctgcagtatctcctctgggacctgccatgctgaggacccattctcacctctgagggactcctgtcctaggactaaggtggagcctgggccatggtacagctggctcctgcggcagccatggacgaggtcacctttaggagcgacactgtgctgtcagatgtccacctctataccccgaaccatagacatctcatggtacggctgaacagcgtggggcagccagttttcctgtcccaattcaagcttctatggagccaagactcttggacagattcaggagccaagggtggcagtcacagagatgttcacacaaaggagcctccttctgctgagacaggcagcacagggtcccctccaggaagtggccatggtaatgagggtttctccctccaggccgggactgacaccactggccaggaagtggctgaagctcagctggatgaggatggggatttggacgtggtgagaagaccacgagccgcctctgattccaacccagcagggcctctgagagacaaggtacatcccatgattctagcacaggaagaagacgacgtcctgggagaggaagcacaaggcagcccgcacgatatcatcagaatagagcacaccatggccacgcccctggaggatgttggcaagcaggtgtggcggggcgccctgctcctggcagactacatcctgttccgacaggacctcttccgaggatgtacagcgctggagctcggggccggcacggggctcgctagcatcatcgcagccaccatggcacggaccgtttattgtacagatgtcggtgcagatctcttgtccatgtgccagcgaaacattgccctcaacagccacctggctgccactggaggtggtatagttagggtcaaagaactggactggctgaaggacgacctctgcacagatcccaaggtccccttcagttggtcacaagaggaaatttctgacttgtacgatcacaccaccatcctgtttgcagccgaagtgttttacgacgacgacttgactgatgctgtgtttaaaacgctctcccgactcgcccacagattgaaaaatgcctgcacagccatactgtcggtggagaagaggctcaacttcacattgagacacttggacgtcacatgtgaagcctacgatcacttccgctcctgcctgcacgcgctggagcagctcgcagatggcaagctgcgcttcgtggtggagcccgtggaggcctccttcccacagctcctggtttacgagcgcctccagcaactggagctctggaagatcatcgcagaaccagtaacatgacccatcgcctccacaaggcgcggcgtctcgactgttcttagagtgtatttctagtaaaatcagaagctcaccaaagcaacatgcttgagattttgtcattttaaaaatatggttacacgtaccttagatgacccaagatggttttctggggtctgtccctgcctcccagttgtagccagagaaggttgttgctgtgggctggaggtcactttagttgcctgtttctcatggttgtgatgtgtgctccagggtcaagccgagccacgttccttctcagctcagttccacccacgtcagtcatttcagctgtgtgctttacttgcggttgcggccctggctgtgaggtggattcttgtactgccctctgtcagctgtttacagatgggttgactaccactgccagtattgccatcatattgccgctcggcacaaaagcctcatttcctcccagggttgggtatgctccaccccatcactctggtgagggccccatgagaaggaagaggcaggagctggcgccaggaatggactggcattggcctttgtatttaattttaactctttatcacccaaatcaggtacgtttggaataaacctaagagccactctttggggtcatgtgcagctgaccagggtttgtgcagtgatcttcctcagaggtgttcccttccgcctggactcattttccctccgccccttggtctctctgtcttatcacgtgtgtacatgtctgtctgtctggttttttatcttctccatctgtgcctctctcctcccatctccaccccttcctgtcatcctctatgtcccactgtctctctccttctctccagttttggtcccatcttcctgctacccttggccctccctgcagcccctttcccctgccttgctgctgccgcacactttgcaccagggcctttcatggcccctttccgcctcccttgcagctcaggtttcctggcttctccatgcactgtccctgcccacactcgcttctccccaagctcccaggttccatccctaggcccatcatacccctggcattggctaatccctcatgccaggggccaggcacttgcaagtctaacttcatcttcccaacaaatttaggaggtccgcagccttgtgatacccacattacagcggagaagactgaggtccaaaaaggaaaaagtctccatgaggtcagggaccttgtttgtcttaaatatcactacatccctgctgtatggtctggcaaacagtagatgctcaacacatattgttgaatgaattgctaatgtaagttactaattaggtcattatttcctatttgtgagtgattttgcctccaggaacatttggcagtgcctggagacattttcggtggtcacaagtaggggagacgggtgccaccagtatccagtgggtgaggccagagatgctgctgaacgttctataatgcggtaatcacggagcatcccccacaacacaaaatgatccagcccaaaatgtgagtagcgccgaggcggagaaatcctgacttggaagaagaaagccaagtactttagagaagaaaaacggtctcagctgaacctgtagtgagagcatgcaggagagtgacctcaccctgcccctctgggagcaagaagaaaacctatgcatgtacgttattataaatcttcaaagaacctaaaaggcagaagtgatccctattttgcacatgagaaatccaaaattcagagaggttcagcaacttgcccaacatcacacagcaaccaagggcagagtcaggtttagagcccatgtccacccatgtccatctgactcctgagcctgtgcttttcccacattcccgctggagcagcagcagcatctgtggcatcacgtggatgctggttagaaatgcaacatcaggctgagcatgttggctcactcctgcaatcccgatactttgggaggccaaggcaggaggatcaattaaggccaggagttcaaccagcctggacaacaaagcaagaccccatctctattaaaaattaaacagccaattagtctggcatggtggtttgcgcctgcagtcccagctacttgggaggccgaggcaggagaatcgcttgaacctgggaggcgaaggttgcagtgagccaagatcgcaacactgccctccagcctgggcaacagagccagacatctcaaaaattaaaaagccaggcgaggtgccgggcatggtggctcatgcctgtcatcccagcactttgggaggccgaggcgggtggatcacccaaagtcaggagttcaagaccagcctggccaacatggtgaaaccctgcctctactaaaaatacaaaattagccgggtgtggtggctcatgcctgtaatcccagctacttgggaggctgaggcaggagaatcacttgaacccaggaggcagaggttgcagtgagccaagaccatgccattgcactctagcctgggcaacaagagcaaaactccatctcaaaaaaaaaaaaaagccaggcgtagtggctaacgcctgtagtcccaactactcagaaggcaaggtgagaggattgcttgagcctaagaatttgaggctgcagtgagccatgactgcaccattgcactctggcctgggcaacagagagagatcctgtctccaaaaaagaagaaaagtatcaagcctcagctcaggacgtgattccgaatctgcatctcaacgagaccctgggtgatttgtgtgcacagtagtttgagaagctctggggcctaccacatagccctcaacctattgctgttttctaaaattcctacacaaactccgttcctgacagacttgccataatggagcagcattgcagatcactacagggaatattaataatgagtcttcaaatcagaaccccactagacagagccaacaactggcagtacgtcagcactaatggtgacaatttcctagcactcctgggtacaagtccataaatgtaattggcaccaagcaatagagttgtcacagctttcacctgccgcattagggcaaactgcttttatgtctaaaccactgggcctgaaagcttcctctaagtagagcctggaattaatcttgatccactgtaattcaaagtatcgtcagattttcatttcccagagtgggagcgcgcccccattgccatgttttatggccttgtttgagcctctacaagtgcttgtttggcagcgatattcagaatcaccaaaccatggggatgttctgctaggtaattagcccaggccagtggactcaatttttttataacattttcagaaaaatatgtgacccaaggaggggacttggctgttcagctgcagcctgcatgggaaagaactgttaaaaccaacaaagccaggcacagtggctcacacctgtaattccagcattttgggaggccgaggtgggtggatcacctaaggtcaggagttcgagaccagcctggccaacatggtgaaaccccgtctctactaaaaatacaaaaaaaaaaaaaaaaa

SEQ ID NO: 153524 - DNA, 550 bp, Homo sapiens
  Payload ID: 10197
  Gene Symbol: METTL22
  Gene Name: methyltransferase like 22
  ENST ID: ENST00000564554
  CDS Start-End: 503-550
atggcggccgcctaagtcccacagagacgggagtcgggtgggatcccaggctgggccccgcggcggttgaagaagtgggggccctgaagatttcatgacatctacccaggtaggaacagctcctataggcagtcaggggttacaggcaggtttgggtcaaatacctgaaaccaaccccaggacaaggaggttgctggtgttttattaacacctactgtgagccaaggactctgctcagcagtttacccacccagtaacactgcgtgagattgtggctgaagaaacagatgcagagaggcgaagtgattttcctgaaatcacatggctagaagctggattctcttccctggccaagtctctgagatcttctcccagggcgatgcaaagctactcgctaccagcttggacctgtctgcagtatctcctctgggacctgccatgctgaggacccattctcacctctgagggactcctgtcctaggactaaggtggagcctgggccatggtacagctggctcctgcggcagccatggacgaggtcacctttagg

SEQ ID NO: 153525 - DNA, 1312 bp, Homo sapiens
  Payload ID: 10197
  Gene Symbol: METTL22
  Gene Name: methyltransferase like 22
  ENST ID: ENST00000561758
  CDS Start-End: 218-1264
cacagagacgggagtcgggtgggatcccaggctgggccccgcggcggctggattctcttccctggccaagtctctgagatcttctcccagggcgatgcaaagctactcgctaccagcttggacctgtctgcagtatctcctctgggacctgccatgctgaggacccattctcacctctgagggactcctgtcctaggactaaggtggagcctgggccatggtacagctggctcctgcggcagccatggacgaggtcacctttaggagcgacactgtgctgtcagatgtccacctctataccccgaaccatagacatctcatggtacggctgaacagcgtggggcagccagttttcctgtcccaattcaagcttctatggagccaagactcttggacagattcaggagccaagggtggcagtcacagagatgttcacacaaaggagcctccttctgctgagacaggcagcacagggtcccctccaggaagtggccatgcacaggaagaagacgacgtcctgggagaggaagcacaaggcagcccgcacgatatcatcagaatagagcacaccatggccacgcccctggaggatgttggcaagcaggtgtggcggggcgccctgctcctggcagactacatcctgttccgacaggacctcttccgaggatgtacagcgctggagctcggggccggcacggggctcgctagcatcatcgcagccaccatggcacggaccgtttattgtacagatgtcggtgcagatctcttgtccatgtgccagcgaaacattgccctcaacagccacctggctgccactggaggtggtatagttagggtcaaagaactggactggctgaaggacgacctctgcacagatcccaaggtccccttcagttggtcacaagaggaaatttctgacttgtacgatcacaccaccatcctgtttgcagccgaagtgttttacgacgacgacttgactgatgctgtgtttaaaacgctctcccgactcgcccacagattgaaaaatgcctgcacagccatactgtcggtggagaagaggctcaacttcacattgagacacttggacgtcacatgtgaagcctacgatcacttccgctcctgcctgcacgcgctggagcagctcgcagatggcaagctgcgcttcgtggtggagcccgtggaggcctccttcccacagctcctggtttacgagcgcctccagcaactggagctctggaagatcatcgcagaaccagtaacatgacccatcgcctccacaaggcgcggcgtctcgactgttcttagagtgtat

SEQ ID NO: 153526 - DNA, 561 bp, Homo sapiens
  Payload ID: 10197
  Gene Symbol: METTL22
  Gene Name: methyltransferase like 22
  ENST ID: ENST00000565866
  CDS Start-End: 1-140
gtggtatagttagggtcaaagaactggactggctgaaggacgacctctgcacaggtgttgtggtttccctgtgtggtagcatgataatccctgaattatcccaaggtccccttcagttggtcacaagaggaaatttctgacttgtacgatcacaccaccatcctgtttgcagccgaagtgttttacgacgacgacttgactgatgctgtgtttaaaacgctctcccgactcgcccacagattgaaaaatgcctgcacagccatactgtcggtggagaagaggctcaacttcacattgagacacttggacgtcacatgtgaagcctacgatcacttccgctcctgcctgcacgcgctggagcagctcgcagatggcaagctgcgcttcgtggtggagcccgtggaggcctccttcccacagctcctggtttacgagcgcctccagcaactggagctctggaagatcatcgcagaaccagtaacatgacccatcgcctccacaaggcgcggcgtctcgactgttcttagagtgtatttctagtaaaatcagaagctcaccaaa

SEQ ID NO: 153527 - DNA, 614 bp, Homo sapiens
  Payload ID: 10197
  Gene Symbol: METTL22
  Gene Name: methyltransferase like 22
  ENST ID: ENST00000563958
  CDS Start-End: 403-614
gggccgcgcctgcgcagaccgcctgttatggcggccgcctaagtcccacagagacgggagtcgggtgggatcccaggctgggccccgcggcggcttttgctgccccacagcaaccacttaaatgtaggaactccagcagtgtactgggatcattaggacagcctgagtcatgatgacctcattttgcagttgaagaagtgggggccctgaagatttcatgacatctacccagctggattctcttccctggccaagtctctgagatcttctcccagggcgatgcaaagctactcgctaccagcttggacctgtctgcagtatctcctctgggacctgccatgctgaggacccattctcacctctgagggactcctgtcctaggactaaggtggagcctgggccatggtacagctggctcctgcggcagccatggacgaggtcacctttaggagcgacactgtgctgtcagatgtccacctctataccccgaaccatagacatctcatggtacggctgaacagcgtggggcagccagttttcctgtcccaattcaagcttctatggagccaagactcttggacagattcaggagccaagggtggcagtcacagaga

SEQ ID NO: 153528 - DNA, 714 bp, Homo sapiens
  Payload ID: 10197
  Gene Symbol: METTL22
  Gene Name: methyltransferase like 22
  ENST ID: ENST00000567295
  CDS Start-End: 215-358
agagacgggagtcgggtgggatcccaggctgggccccgcggcggctggattctcttccctggccaagtctctgagatcttctcccagggcgatgcaaagctactcgctaccagcttggacctgtctgcagtatctcctctgggacctgccatgctgaggacccattctcacctctgagggactcctgtcctaggactaaggtggagcctgggccatggtacagctggctcctgcggcagccatggacgaggtcacctttaggagcgacactgtgctgtcagatgtccacctctataccccgaaccatagacatctcatggtacggctgaacagcgtggggcagccaggccgggactgacaccactggccaggaagtggctgaagctcagctggatgaggatggggatttggacgtggtgagaagaccacgagccgcctctgattccaacccagcagggcctctgagagacaaggtacatcccatgattctagcacaggaagaagacgacgtcctgggagaggaagcacaaggcagcccgcacgatatcatcagaatagagcacaccatggccacgcccctggaggatgttggcaagcaggtgtggcggggcgccctgctcctggcagactacatcctgttccgacaggacctcttccgaggatgtacagcgctggagctcggggccggcacggggctcgctagcatcatcgcag

SEQ ID NO: 153529 - DNA, 706 bp, Homo sapiens
  Payload ID: 10197
  Gene Symbol: METTL22
  Gene Name: methyltransferase like 22
  ENST ID: ENST00000572956
  CDS Start-End: 1-465
cgaggatgtacagcgctggagctcggggccggcacggggctcgctagcatcatcgcagccaccatggcacggaccgtttattgtacagatgtcggtgcagatctcttgtccatgtgccagcgaaacattgccctcaacagccacctggctgccactggaggtggtatagttagggtcaaagaactggactggctgaaggacgacctctgcacagatcccaaggtccccttcagttggtcacaagaggaaatttctgacttgtacgatcacaccaccatcctgtttgcagccgaagtgttttacgacgacgacttgactgatgctgtgtttaaaacgctctcccgactcgcccacagattgaaaaatgcctgcacagccatactgtcggtggagaagagtttgtgcgtccgactggctggtttgcaggctcaacttcacattgagacacttggacgtcacatgtgaagcctacgatcacttccgctcctgcctgcacgcgctggagcagctcgcagatggcaagctgcgcttcgtggtggagcccgtggaggcctccttcccacagctcctggtttacgagcgcctccagcaactggagctctggaagatcatcgcagaaccagtaacatgacccatcgcctccacaaggcgcggcgtctcgactgttcttagagtgtatttctagtaaaatcagaagctcaccaaa

SEQ ID NO: 153530 - DNA, 586 bp, Homo sapiens
  Payload ID: 10197
  Gene Symbol: METTL22
  Gene Name: methyltransferase like 22
  ENST ID: ENST00000562973
  CDS Start-End: 1-312
tacgacgacgacttgactgatgctgtgtttaaaacgctctcccgactcgcccacagattgaaaaatgcctgcacagccatactgtcggtggagaagaggctcaacttcacattgagacacttggacgtcacatgtgaagcctacgatcacttccgctcctgcctgcacgcgctggagcagctcgcagatggcaagctgcgcttcgtggtggagcccgtggaggcctccttcccacagctcctggtttacgagcgcctccagcaactggtaggtccaggccccgaagcagggccgttggttgctttactgtgaagcgggtgactccagggcaaagaggtgatgaagcaagccctccaagcacaggctccaccctagtcctgcagggggtgaagcctgcgtgcctggcaccatctgtagtggaacctgttgggggagctacatcctgttcttagcagccaccatgtctggagacgggcctacaggcgaaccttgtcttttactttatagcacatattccccccgttggacagttcagactccagaggaggcaagaccgaggcagaggttgtttggggaacaggaagtc

SEQ ID NO: 153531 - DNA, 520 bp, Homo sapiens
  Payload ID: 10197
  Gene Symbol: METTL22
  Gene Name: methyltransferase like 22
  ENST ID: ENST00000562151
  CDS Start-End: 1-496
agttagggtcaaagaactggactggctgaaggacgacctctgcacagatcccaaggtccccttcagttggtcacaagaggaaatttctgacttgtacgatcacaccaccatcctgtttgcagccgaagtgttttacgacgacgacttgactgatgctgtgtttaaaacgctctcccgactcgcccacagattgaaaaatgcctgcacagccatactgtcggtggagaagaggctcaacttcacattgagacacttggacgtcacatgtgaagcctacgatcacttccgctcctgcctgcacgcgctggagcagctcgcagatggcaagctgcgcttcgtggtggagcccgtggaggcctccttcccacagctcctggtttacgagcgcctccagcaactgcctctctgccacagtaaaatagaacagcccagagcaacaaagaaaggaggaagccgcccgtccgctcctgccccagctcgcctgctccgtggctgacgtgttgtctaactactctccttg

SEQ ID NO: 153532 - DNA, 1155 bp, Homo sapiens
  Payload ID: 10198
  Gene Symbol: METTL23
  Gene Name: methyltransferase like 23
  Uniprot ID: Q86XA0
  ENST ID: ENST00000341249
  CDS Start-End: 333-905
agttctgcgcgtgtgagtctctttcgccttgctccgggctttcttcgctcgcagcgcggcagggttatcaccagatctgggctttccccttcttgccgtcaggtgctacggccacgtggcccgcggcttcccgctcgcgcagtctggcagcccggagccttccgcggtcccccgcccgcccggggcccaacgacgccctactgggcgagcacgatttccgaggacagggggtccgggcccagcgctttcgattctcggaggagccgggtccgggggccgacggggctgtcctggaggtccacgtcccgcaggtcctgcatctccagtatggaatgtatgtttggccctgtgctgtggtcctggcccagtacctttggtttcacagaagatctctgccaggcaaggccatcttagagattggagctggagtgagccttccaggaattttggctgccaaatgtggtgcagaagtaatactgtcagacagctcagaactgcctcactgtctggaagtctgtcggcaaagctgccaaatgaataacctgccacatctgcaggtggtaggactaacatggggtcatatatcttgggatcttctggctctaccaccacaagatattatccttgcatctgatgtgttctttgaaccagaagattttgaagacattttggctacaatatattttttgatgcacaagaatcccaaggtccaattgtggtctacttatcaagttaggagtgctgactggtcacttgaagctttactctacaaatgggatatgaaatgtgtccacattcctcttgagtcttttgatgcagacaaagaagatatagcagaatctacccttccaggaagacatacagttgaaatgctggtcatttcctttgcaaaggacagtctctgaattatacctacaacctgttctgggacagtatcaatactgatgagcaacctggcacacaaactatgagcagaccacttcagcttgagaatgcagtgggtctgaagatggtcaagtctgtttgccttagattttgatgtcacctagacaacacttaaactcatatgaaacaaaaattaaaatacgtattacaagtacttggattgttccttagtcattaaataggatataaattaggttgagaagggggtat

SEQ ID NO: 153533 - DNA, 617 bp, Homo sapiens
  Payload ID: 10198
  Gene Symbol: METTL23
  Gene Name: methyltransferase like 23
  ENST ID: ENST00000589977
  CDS Start-End: 72-512
gtgcccatcacttccggtcgcgccagccgcccgttgccagttctgcgcgtgtcctgcatctccagtatggaatgtatgtttggccctgtgctgtggtcctggcccagtacctttggtttcacagaagatctctgccaggcaaggccatcttagagattggagctggagtgagccttccaggaattttggctgccaaatgtggtgcagaagtaatactgtcagacagctcagaactgcctcactgtctggaagtctgtcggcaaagctgccaaatgaataacctgccacatctgcaggtggtaggactaacatggggtcatatatcttgggatcttctggctctaccaccacaagatattatccttgcatctgatgtgttctttgaaccagaagattttgaagacattttggctacaatatattttttgatgcacaagaatcccaaggtccaattgtggtctacttatcaagttaggaggcaagtatggatgacccttactttttatatgtaacttaagccttactctaccctacccatgcgatacataatttaagaatagaatacatctgaagcaaaacagaaaaggcatgactttaaaagaacaactttttttttt

SEQ ID NO: 153534 - DNA, 1049 bp, Homo sapiens
  Payload ID: 10198
  Gene Symbol: METTL23
  Gene Name: methyltransferase like 23
  Uniprot ID: Q86XA0
  ENST ID: ENST00000588822
  CDS Start-End: 606-977
ttctgcgcgtgtgagtctctttcgccttgctccgggctttcttcgctcgcagcgcggcagggttatcaccagatctgggctttccccttcttgccgtcaggtgctacggccacgtggcccgcggcttcccgctcgcgcagtctggcagcccggagccttccgcggtcccccgcccgcccggggcccaacgacgccctactgggcgagcacgatttccgaggacagggggtccgggcccagcgctttcgattctcggaggagccgggtccgggggccgacggggctgtcctggaggtccacgtcccgcaggtgcgtgcagcagcacccgccaggaggcgcctgaggtcaggagcggatgtcggctgacttggctgggttcctgagggaccgggggtgcggacgctcagctgcgcagcttcctgctttaggttgacccccggagcaaaaacgtcggatatgaagcccttcggtgcattaaatgtctctcaattggagctggagtgagccttccaggaattttggctgccaaatgtggtgcagaagtaatactgtcagacagctcagaactgcctcactgtctggaagtctgtcggcaaagctgccaaatgaataacctgccacatctgcaggtggtaggactaacatggggtcatatatcttgggatcttctggctctaccaccacaagatattatccttgcatctgatgtgttctttgaaccagaagattttgaagacattttggctacaatatattttttgatgcacaagaatcccaaggtccaattgtggtctacttatcaagttaggagtgctgactggtcacttgaagctttactctacaaatgggatatgaaatgtgtccacattcctcttgagtcttttgatgcagacaaagaagatatagcagaatctacccttccaggaagacatacagttgaaatgctggtcatttcctttgcaaaggacagtctctgaattatacctacaacctgttctgggacagtatcaatactgatgagcaacctggcacacaaactatgagcagac

SEQ ID NO: 153535 - DNA, 1006 bp, Homo sapiens
  Payload ID: 10198
  Gene Symbol: METTL23
  Gene Name: methyltransferase like 23
  Uniprot ID: Q86XA0
  ENST ID: ENST00000590964
  CDS Start-End: 443-814
agccgcccgttgccagttctgcgcgtgtgagtctctttcgccttgctccgggctttcttcgctcgcagcgcggcagggttatcaccagatctgggctttccccttcttgccgtcaggtgctacggccacgtggcccgcggcttcccgctcgcgcagtctggcagcccggagccttccgcggtcccccgcccgcccggggcccaacgacgccctactgggcgagcacgatttccgaggacagggggtccgggcccagcgctttcgattctcggaggagccgggtccgggggccgacggggctgtcctggaggtccacgtcccgcagattggagctggagtgagccttccaggaattttggctgccaaatgtggtgcagaagtaatactgtcagacagctcagaactgcctcactgtctggaagtctgtcggcaaagctgccaaatgaataacctgccacatctgcaggtggtaggactaacatggggtcatatatcttgggatcttctggctctaccaccacaagatattatccttgcatctgatgtgttctttgaaccagaagattttgaagacattttggctacaatatattttttgatgcacaagaatcccaaggtccaattgtggtctacttatcaagttaggagtgctgactggtcacttgaagctttactctacaaatgggatatgaaatgtgtccacattcctcttgagtcttttgatgcagacaaagaagatatagcagaatctacccttccaggaagacatacagttgaaatgctggtcatttcctttgcaaaggacagtctctgaattatacctacaacctgttctgggacagtatcaatactgatgagcaacctggcacacaaactatgagcagaccacttcagcttgagaatgcagtgggtctgaagatggtcaagtctgtttgccttagattttgatgtcacctagacaacacttaaactcatatgaaacaaaaattaaaatacgtattacaag

SEQ ID NO: 153536 - DNA, 465 bp, Homo sapiens
  Payload ID: 10198
  Gene Symbol: METTL23
  Gene Name: methyltransferase like 23
  ENST ID: ENST00000586200
  CDS Start-End: 250-465
gtcaggtgctacggccacgtggcccgcggcttcccgctcgcgcagtctggcagcccggagccttccgcggtcccccgcccgcccggggcccaacgacgccctactgggcgagcacgatttccgaggacagggggtccgggcccagcgctttcgattctcggaggagccgggtccgggggccgacggggctgtcctggaggtccacgtcccgcagattttgaagacattttggctacaatatattttttgatgcacaagaatcccaaggtccaattgtggtctacttatcaagttaggagtgctgactggtcacttgaagctttactctacaaatgggatatgaaatgtgtccacattcctcttgagtcttttgatgcagacaaagaagatatagcagaatctacccttccaggaagacatacagttgaaatgctggtcatttcctttgcaaaggacagtctctga

SEQ ID NO: 153537 - DNA, 904 bp, Homo sapiens
  Payload ID: 10198
  Gene Symbol: METTL23
  Gene Name: methyltransferase like 23
  Uniprot ID: Q86XA0
  ENST ID: ENST00000586752
  CDS Start-End: 481-852
gccagccgcccgttgccagttctgcgcgtgtgagtctctttcgccttgctccgggctttcttcgctcgcagcgcggcagggttatcaccagatctgggctttccccttcttgccgtcaggtgctacggccacgtggcccgcggcttcccgctcgcgcagtctggcagcccggagccttccgcggtcccccgcccgcccggggcccaacgacgccctactgggcgagcacgatttccgaggacagggggtccgggcccagcgctttcgattctcggaggagccgggtccgggggccgacggggctgtcctggaggtccacgtcccgcaggtgcgtgcagcagcacccgccaggaggcgcctgagattggagctggagtgagccttccaggaattttggctgccaaatgtggtgcagaagtaatactgtcagacagctcagaactgcctcactgtctggaagtctgtcggcaaagctgccaaatgaataacctgccacatctgcaggtggtaggactaacatggggtcatatatcttgggatcttctggctctaccaccacaagatattatccttgcatctgatgtgttctttgaaccagaagattttgaagacattttggctacaatatattttttgatgcacaagaatcccaaggtccaattgtggtctacttatcaagttaggagtgctgactggtcacttgaagctttactctacaaatgggatatgaaatgtgtccacattcctcttgagtcttttgatgcagacaaagaagatatagcagaatctacccttccaggaagacatacagttgaaatgctggtcatttcctttgcaaaggacagtctctgaattatacctacaacctgttctgggacagtatcaatactgatgagcaacctgg

SEQ ID NO: 153538 - DNA, 585 bp, Homo sapiens
  Payload ID: 10198
  Gene Symbol: METTL23
  Gene Name: methyltransferase like 23
  ENST ID: ENST00000591571
  CDS Start-End: 159-398
acttccggtcgcgccagccgcccgttgccagttctgcgcgtattggagctggagtgagccttccaggaattttggctgccaaatgtggtgcagaagtaatactgtcagacagctcagaactgcctcactgtctggaagtctgtcggcaaagctgccaaatgaataacctgccacatctgcaggtggtaggactaacatggggtcatatatcttgggatcttctggctctaccaccacaagatattatccttgcatctgatgtgttctttgaaccagaagattttgaagacattttggctacaatatattttttgatgcacaagaatcccaaggtccaattgtggtctacttatcaagttaggaggcaagtatggatgacccttactttttatatgtaacttaagccttactctaccctacccatgcgatacataatttaagaatagaatacatctgaagcaaaacagaaaaggcatgactttaaaagaacaactttttttttttaagtgctgactggtcacttgaagctttactctacaaatgggatatgaaatgtgtccacattcctcttgagtcttttgatgc

SEQ ID NO: 153539 - DNA, 1184 bp, Homo sapiens
  Payload ID: 10198
  Gene Symbol: METTL23
  Gene Name: methyltransferase like 23
  ENST ID: ENST00000588783
  CDS Start-End: 358-774
ccggtcgcgccagccgcccgttgccagttctgcgcgtgtgagtctctttcgccttgctccgggctttcttcgctcgcagcgcggcagggttatcaccagatctgggctttccccttcttgccgtcaggtgctacggccacgtggcccgcggcttcccgctcgcgcagtctggcagcccggagccttccgcggtcccccgcccgcccggggcccaacgacgccctactgggcgagcacgatttccgaggacagggggtccgggcccagcgctttcgattctcggaggagccgggtccgggggccgacggggctgtcctggaggtccacgtcccgcaggtcctgcatctccagtatggaatgtatgtttggccctgtgctgtggtcctggcccagtacctttggtttcacagaagatctctgccaggcaaggccatcttagagattggagctggagtgagccttccaggaattttggctgccaaatgtggtgcagaagtaatactgtcagacagctcagaactgcctcactgtctggaagtctgtcggcaaagctgccaaatgaataacctgccacatctgcaggtggtaggactaacatggggtcatatatcttgggatcttctggctctaccaccacaagatattatccttgcatctgatgtgttctttgaaccagaagattttgaagacattttggctacaatatattttttgatgcacaagaatcccaaggtccaattgtggtctacttatcaagttaggaggcaatgctgactggtcacttgaagctttactctacaaatgggatatgaaatgtgtccacattcctcttgagtcttttgatgcagacaaagaagatatagcagaatctacccttccaggaagacatacagttgaaatgctggtcatttcctttgcaaaggacagtctctgaattatacctacaacctgttctgggacagtatcaatactgatgagcaacctggcacacaaactatgagcagaccacttcagcttgagaatgcagtgggtctgaagatggtcaagtctgtttgccttagattttgatgtcacctagacaacacttaaactcatatgaaacaaaaattaaaatacgtattacaagtacttggattgttccttagtcattaaataggatataaattaggttgagaagggggtat

SEQ ID NO: 153540 - DNA, 609 bp, Homo sapiens
  Payload ID: 10198
  Gene Symbol: METTL23
  Gene Name: methyltransferase like 23
  ENST ID: ENST00000588964
  CDS Start-End: 440-609
aaaactgaaaatcatggcagaggaatcaagtgccccaaaactacttctgtgtgcatagcaattaactgccagttacgatacatggccctttaatattgaaattgaaggttaagcttttaccttttagcagagtagattcataaggaatgtacttttgtcatgtttatagtaatgttcagttacggtacattttatacaaacccagaaagactgactctatgcttatttaaaaatgcaagaatataatgaaaaagtactaagattcccaattatttgcagttccaagtataattgtgaaatgccatctttcataacttattagattggagctggagtgagccttccaggaattttggctgccaaatgtggtgcagaagtaatactgtcagacagctcagaactgcctcactgtctggaagtctgtcggcaaagctgccaaatgaataacctgccacatctgcaggtggtaggactaacatggggtcatatatcttgggatcttctggctctaccaccacaagatattatccttgcatctgatgtgttctttgaaccagaagattttgaagacattttggctacaatatattttttgatgcacaagaatcc

SEQ ID NO: 153541 - DNA, 581 bp, Homo sapiens
  Payload ID: 10198
  Gene Symbol: METTL23
  Gene Name: methyltransferase like 23
  ENST ID: ENST00000588563
  CDS Start-End: 52-581
cgccagccgcccgttgccagttctgcgcgtgtcctgcatctccagtatggaatgtatgtttggccctgtgctgtggtcctggcccagtacctttggtttcacagaagatctctgccaggcaaggccatcttagagattggagctggagtgagccttccaggaattttggctgccaaatgtggtgcagaagtaatactgtcagacagctcagaactgcctcactgtctggaagtctgtcggcaaagctgccaaatgaataacctgccacatctgcaggtggtaggactaacatggggtcatatatcttgggatcttctggctctaccaccacaagatattatccttgcatctgatgtgttctttgaaccagaagattttgaagacattttggctacaatatattttttgatgcacaagaatcccaaggtccaattgtggtctacttatcaagttaggagtgctgactggtcacttgaagctttactctacaaatgggatatgaaatgtgtccacattcctcttgagtcttttgatgcagacaaagaagatatagcagaatctacccttccaggaagacatac

SEQ ID NO: 153542 - DNA, 846 bp, Homo sapiens
  Payload ID: 10198
  Gene Symbol: METTL23
  Gene Name: methyltransferase like 23
  ENST ID: ENST00000592849
  CDS Start-End: 396-846
cttccggtcgcgccagccgcccgttgccagttctgcgcgtgtgagtctctttcgccttgctccgggctttcttcgctcgcagcgcggcagggttatcaccagatctgggctttccccttcttgccgtcaggtgctacggccacgtggcccgcggcttcccgctcgcgcagtctggcagcccggagccttccgcggtcccccgcccgcccggggcccaacgacgccctactgggcgagcacgatttccgaggacagggggtccgggcccagcgctttcgattctcggaggagccgggtccgggggccgacggggctgtcctggaggtccacgtcccgcaggtgcgtgcagcagcacccgccaggaggcgcctgaggtcctgcatctccagtatggaatgtatgtttggccctgtgctgtggtcctggcccagtacctttggtttcacagaagatctctgccaggcaaggccatcttagagattggagctggagtgagccttccaggaattttggctgccaaatgtggtgcagaagtaatactgtcagacagctcagaactgcctcactgtctggaagtctgtcggcaaagctgccaaatgaataacctgccacatctgcaggtggtaggactaacatggggtcatatatcttgggatcttctggctctaccaccacaagatattatccttgcatctgatgtgttctttgaaccagaagattttgaagacattttggctacaatatattttttgatgcacaagaatcccaaggtccaattgtggtctacttatcaagttaggagtgctgactggtcacttgaagctttactctacaaatgggatatga

SEQ ID NO: 153543 - DNA, 1059 bp, Homo sapiens
  Payload ID: 10198
  Gene Symbol: METTL23
  Gene Name: methyltransferase like 23
  ENST ID: ENST00000586738
  CDS Start-End: 303-719
ccggtcgcgccagccgcccgttgccagttctgcgcgtgtgctacggccacgtggcccgcggcttcccgctcgcgcagtctggcagcccggagccttccgcggtcccccgcccgcccggggcccaacgacgccctactgggcgagcacgatttccgaggacagggggtccgggcccagcgctttcgattctcggaggagccgggtccgggggccgacggggctgtcctggaggtccacgtcccgcaggtgcgtgcagcagcacccgccaggaggcgcctgaggtcctgcatctccagtatggaatgtatgtttggccctgtgctgtggtcctggcccagtacctttggtttcacagaagatctctgccaggcaaggccatcttagagattggagctggagtgagccttccaggaattttggctgccaaatgtggtgcagaagtaatactgtcagacagctcagaactgcctcactgtctggaagtctgtcggcaaagctgccaaatgaataacctgccacatctgcaggtggtaggactaacatggggtcatatatcttgggatcttctggctctaccaccacaagatattatccttgcatctgatgtgttctttgaaccagaagattttgaagacattttggctacaatatattttttgatgcacaagaatcccaaggtccaattgtggtctacttatcaagttaggaggcaatgctgactggtcacttgaagctttactctacaaatgggatatgaaatgtgtccacattcctcttgagtcttttgatgcagacaaagaagatatagcagaatctacccttccaggaagacatacagttgaaatgctggtcatttcctttgcaaaggacagtctctgaattatacctacaacctgttctgggacagtatcaatactgatgagcaacctggcacacaaactatgagcagaccacttcagcttgagaatgcagtgggtctgaagatggtcaagtctgtttgccttagattttgatgtcacctagacaacacttaaactcatatgaaacaaaaattaaaat

SEQ ID NO: 153544 - DNA, 925 bp, Homo sapiens
  Payload ID: 10198
  Gene Symbol: METTL23
  Gene Name: methyltransferase like 23
  ENST ID: ENST00000588302
  CDS Start-End: 356-571
gccagccgcccgttgccagttctgcgcgtgtgctacggccacgtggcccgcggcttcccgctcgcgcagtctggcagcccggagccttccgcggtcccccgcccgcccggggcccaacgacgccctactgggcgagcacgatttccgaggacagggggtccgggcccagcgctttcgattctcggaggagccgggtccgggggccgacggggctgtcctggaggtccacgtcccgcagattggagctggagtgagccttccaggaattttggctgccaaatgtggtgcagaagtaatactgtcagacagctcagaactgcctcactgtctggaagtctgtcggcaaagctgccaaatgaataacctgccacatctgcaggtggtaggactaacatggggtcatatatcttgggatcttctggctctaccaccacaagatattatccttgcatctgatgtgttctttgaaccagaagattttgaagacattttggctacaatatattttttgatgcacaagaatcccaaggtccaattgtggtctacttatcaagttaggaggcaatgctgactggtcacttgaagctttactctacaaatgggatatgaaatgtgtccacattcctcttgagtcttttgatgcagacaaagaagatatagcagaatctacccttccaggaagacatacagttgaaatgctggtcatttcctttgcaaaggacagtctctgaattatacctacaacctgttctgggacagtatcaatactgatgagcaacctggcacacaaactatgagcagaccacttcagcttgagaatgcagtgggtctgaagatggtcaagtctgtttgccttagattttgatgtcacctagacaacacttaaactcatatgaaacaaaaattaaaatacgtattacaagta

SEQ ID NO: 153545 - DNA, 1171 bp, Homo sapiens
  Payload ID: 10198
  Gene Symbol: METTL23
  Gene Name: methyltransferase like 23
  Uniprot ID: Q86XA0
  ENST ID: ENST00000615984
  CDS Start-End: 406-978
gtgcccatcacttccggtcgcgccagccgcccgttgccagttctgcgcgtgtgagtctctttcgccttgctccgggctttcttcgctcgcagcgcggcagggttatcaccagatctgggctttccccttcttgccgtcaggtgctacggccacgtggcccgcggcttcccgctcgcgcagtctggcagcccggagccttccgcggtcccccgcccgcccggggcccaacgacgccctactgggcgagcacgatttccgaggacagggggtccgggcccagcgctttcgattctcggaggagccgggtccgggggccgacggggctgtcctggaggtccacgtcccgcaggtgcgtgcagcagcacccgccaggaggcgcctgaggtcctgcatctccagtatggaatgtatgtttggccctgtgctgtggtcctggcccagtacctttggtttcacagaagatctctgccaggcaaggccatcttagagattggagctggagtgagccttccaggaattttggctgccaaatgtggtgcagaagtaatactgtcagacagctcagaactgcctcactgtctggaagtctgtcggcaaagctgccaaatgaataacctgccacatctgcaggtggtaggactaacatggggtcatatatcttgggatcttctggctctaccaccacaagatattatccttgcatctgatgtgttctttgaaccagaagattttgaagacattttggctacaatatattttttgatgcacaagaatcccaaggtccaattgtggtctacttatcaagttaggagtgctgactggtcacttgaagctttactctacaaatgggatatgaaatgtgtccacattcctcttgagtcttttgatgcagacaaagaagatatagcagaatctacccttccaggaagacatacagttgaaatgctggtcatttcctttgcaaaggacagtctctgaattatacctacaacctgttctgggacagtatcaatactgatgagcaacctggcacacaaactatgagcagaccacttcagcttgagaatgcagtgggtctgaagatggtcaagtctgtttgccttagattttgatgtcacctagacaacacttaaactcatatgaaacaaaaattaaaatacgtattacaagt

SEQ ID NO: 153546 - DNA, 1119 bp, Homo sapiens
  Payload ID: 10199
  Gene Symbol: METTL24
  Gene Name: methyltransferase like 24
  Uniprot ID: Q5JXM2
  ENST ID: ENST00000338882
  CDS Start-End: 1-1101
atggcccgggagaggccgcccgggaggggctgcggcgtcctgcgccggtgtctactcggggctgtgctgttgttcggcctgcggctctgcgcagagctgcggcgcgccgggcccgggtcccccacccgcagcgccccgccgggcccggcctggcggccacctgggccgcacctgccgcccgcgccgggccagccgcgcggcgccagcaggaggcaggtgacctacgtgcgcagcggtcgccgggcgccgccggggggcggcgggagcgggacgccggagcctggctgctgtgccccgcgcgggcgcccccgccggaagggtccccggtggcatatagatctccagccttgggcaggctctgctcagtccctggatgaagaagcctggaggttcctgagatatatcagcaccacccagattgcatgcaatcacatgaatacagacagcctggctactgactctagtcctacacacaagccctggtcagtgtgtcttgacgacaggttcaatttagctcatcaaatccgcaacaagcagtgccgcctctactccttagggctaggaagtgatgatacccattttgaggttagcatggccaacaacggatgtgaagtgcatcgttttgatcctagtgtcaagtcagctcacattctggagagtcagcacctttggtatcaccgcttgtccattgactggcgggatccccatccagctgttgctgcccaaaaaccacatagcaacaccagaaaactgggaagcattttgaatgaatttggacatcacaagattgacgttctcaaggcagatctggaaagtgcagaatggaaagttttggaaaatcttattctggaagatgttcttgagcagattggacagctcatctttgagatccatctccactggcctgggtttgaggtcagtggcagtgacagcagcgttgtgcggttctggtacagccttctcaaagagttagaacaaaaggatttcaggctttttcacagttacaaagacttatctaaacctcagctattcttgaagaaagacattttcaatgcaagtagctgttatactctgagttgggtgaatacaagatggaaataggatgcaggatgtcatcaa

SEQ ID NO: 153547 - DNA, 2093 bp, Homo sapiens
  Payload ID: 10200
  Gene Symbol: METTL25
  Gene Name: methyltransferase like 25
  Uniprot ID: Q8N6Q8
  ENST ID: ENST00000248306
  CDS Start-End: 70-1881
gctaatttgggccgagctggcgcctcacggccatgtttgcgccacctacagcctcggagggtgagcgtcatggcggcttcttgccctctcccggtgaccccggacctgcccacgctgcgtgccaagttgcagggactgctgcagttcctgagggatgccctgtccatttccaatgcacataccgtggatttctacacagaatccgtgtgggaggagctggtcgacttgccaccggagacagtgctggctgcgctgaggaagtcagcgtcggagacggaggccctgccctcagagacgcgccccctagtggaagcagagtgggaagcaggtatgactgattttcccaaaatattttgtgaaacttctcagaagttggtgagtgtggaagcctttgctctggctgcgaaatactattctgtacaaaacttgggaatatgtactccttttgaacagttgcttgtagcccttcgaggaaatcaaaaccagagaattggtgaaaatcagaaggcagttgagtttatgaatatgaagaaatctcatgaagttcaggcaatgtcagagctgatcagcagtattgctgactactatggaataaagcaggtgattgacttgggttccggtaaaggctacctaagctcttttttgtccttgaagtatggcttaaaagtttatggaattgattcttcaaataccaatactcatggagctgaggagagaaacagaaaattgaagaaacattggaaactctgtcatgctcagtcaagattagatgtcaatggactagcattaaaaatggcaaaagaaaggaaagtgcaaaataaagttaaaaataaagctgatactgaggaagtgtttaacaacagtcctacaaatcaagaaaagatgcctacctcagctattttgcctgatttttctggctctgtaatttctaatatcagaaaccaaatggaaacccttcattctcagccacatcaagaagaaaatttgtgttttgaaaattccttttctcttataaaccttttgcctattaatgctgtagagcctacttcttcacagcaaatacccaacagagaaacatctgaagccaataaagagagaagaaaaatgacatcaaagtcaagtgaatcaaatatatattcacctttaacctcttttatcactgctgattcagaactccatgacattattaaagatttggaggattgtttgatggtgggtctccacacttgtggtgatctggctccaaatactttgcgaatatttacctccaactctgaaatcaagggagtttgcagtgtgggttgttgctaccacctcttatctgaagaatttgaaaaccagcataaagaacgtactcaggaaaagtggggatttccaatgtgccactatttaaaggaagagagatggtgctgtggtcgtaatgccagaatgtcagcatgtttggcattggagcgggttgcagctggccaagggctgcctactgaatcactcttctatcgtgctgttcttcaggatattattaaagattgttatggcatcaccaaatgtgatcggcatgttggtaaaatttattccaaatgttcttcttttctggattatgtcagacggtctctaaagaagcttggattagatgagtccaagctgccagaaaaaattataatgaactactacgagaagtataagcctcgaatgaatgagctggaagcttttaatatgttgaaagttgtactggctccctgtatagagactttgattcttctggatcgactttgttacctgaaagagcaggaagatattgcatggtctgctcttgtgaagttgtttgatcccgtgaaatctcccagatgttatgctgttattgccctgaagaagcagcagtgatttccattgaagcaaattattagatgtatttctctatgagacctgttgctgagattgcttttctaaacatatatgtcctgttatacaaaaatttttaaatgactgttatgtattttaaataataaaataatggctaacaacagaaggttataatccatttttccattgtcaaagcatacattaataaaagaagaacctgtcataataatata

SEQ ID NO: 153548 - DNA, 743 bp, Homo sapiens
  Payload ID: 10200
  Gene Symbol: METTL25
  Gene Name: methyltransferase like 25
  ENST ID: ENST00000548200
  CDS Start-End: 27-743
acctacagcctcggagggtgagcgtcatggcggcttcttgccctctcccggtgaccccggacctgcccacgctgcgtgccaagttgcagggactgctgcagttcctgagggatgccctgtccatttccaatgcacataccgtggatttctacacagaatccgtgtgggaggagctggtcgacttgccaccggagacagtgctggctgcgctgaggaagtcagcgtcggagacggaggccctgccctcagagacgcgccccctagtggaagcagagtgggaagcaggtatgactgattttcccaaaatattttgtgaaacttctcagaagttggtgagtgtggaagcctttgctctggctgcgaaatactattctgtacaaaacttgggaatatgtactccttttgaacagttgcttgtagcccttcgaggaaatcaaaaccagagaattggtgaaaatcagaaggcagttgagtttatgaatatgaagaaatctcatgaagttcaggcaatgtcagagctgatcagcagtattgctgactactatggaataaagcaggtgattgacttgggttccggtaaaggctacctaagctcttttttgtccttgaagtatggcttaaaagtttatggaattgattcttcaaataccaatactcatggagctgaggagagaaacagaaaattgaagaaacattggaaactctgtcatgctcagtcaagattagatgtcaatggactagca

SEQ ID NO: 153549 - DNA, 679 bp, Homo sapiens
  Payload ID: 10200
  Gene Symbol: METTL25
  Gene Name: methyltransferase like 25
  ENST ID: ENST00000550298
  CDS Start-End: 1-432
gattcagaactccatgacattattaaagatttggaggattgtttgatggtgggtctccacacttgtggtgatctggctccaaatactttgcgaatatttacctccaactctgaaatcaagggagtttgcagtgtgggttgttgctaccacctcttatctgaagaatttgaaaaccagcataaagaacgtactcaggaaaagtggggatttccaatgtgccactatttaaaggaagagagatggtgctgtggtcgtaatgccagaatgtcagcatgtttggcattggagcgggttgcagctggccaagggctgcctactgaatcactcttctatcgtgctgttcttcaggatattattaaagattgttatggcatcaccaaatggtatgaggattttattttaataagaataactatgttatattgtaagtaaagtgacttttagtcttcaggtgaatttatgcagggtcactgttattagtagaagcaactttgaatttgagcataatgtcaataacaagtacacaacaactgtatcttaggttaattatcattaaagtgggggctctaatgattccttcttgtcctgaaagcttgttgtaatgataaaataatctatgtaaaatgtactttagaatttttgaagtattaaaatattaaatagttcagtgacgatatta

SEQ ID NO: 153550 - DNA, 568 bp, Homo sapiens
  Payload ID: 10200
  Gene Symbol: METTL25
  Gene Name: methyltransferase like 25
  ENST ID: ENST00000550058
  CDS Start-End: 1-568
ctggtggaagccagcagaaccagctcttaaagatggtgtgtccggagtttcttccttcagatgtgtccagagtttcttccttctggtgggttcatggtcctgctgacttcaagaatgaagccgcggaccttcacggtatgactgattttcccaaaatattttgtgaaacttctcagaagttggtgagtgtggaagcctttgctctggctgcgaaatactattctgtacaaaacttgggaatatgtactccttttgaacagttgcttgtagcccttcgaggaaatcaaaaccagagaattggtgaaaatcagaaggcagttgagtttatgaatatgaagaaatctcatgaagttcaggcaatgtcagagctgatcagcagtattgctgactactatggaataaagcaggtgattgacttgggttccggtaaaggctacctaagctcttttttgtccttgaagtatggcttaaaagtttatggaattgattcttcaaataccaatactcatggagctgaggagagaaacagaaaattgaagaaacattggaaactctgtcatgctcagtc

SEQ ID NO: 153551 - DNA, 2537 bp, Homo sapiens
  Payload ID: 10201
  Gene Symbol: METTL2A
  Gene Name: methyltransferase like 2A
  Uniprot ID: Q96IZ6
  ENST ID: ENST00000311506
  CDS Start-End: 37-1173
cgttacggaaagtaaagtgtttccggctccggtgtcatggccggctcctaccctgaaggtgcacctgcagtcctcgccgataagaggcagcagttcggaagccggttcctgagagatccggcgcgcgtcttccaccacaatgcctgggacaatgtggagtggtcggaagagcaagccgcggcggcggagagaaaagtccaggagaacagtatccagcgggtgtgccaggagaaacaagttgattatgagatcaatgcccacaaatactggaatgacttctacaaaatccacgaaaatgggtttttcaaggatagacattggctttttaccgaattccctgagctggcacctagccaaaatcaaaatcatttgaaggactggttcttggagaacaagagtgaagtacctgaatgtagaaacaatgaggatggacctggtttaataatggaagaacagcacaagtgttcttcaaagagccttgaacataaaacacagacacttcctgtggaggagaatgtaactcagaaaattagtgacctggaaatttgtgctgatgagtttcctggatcctcagccacctaccgaatactggaggttggctgtggtgtgggaaacacagtctttccaattttacaaacgaacaatgacccaggactctttgtttattgctgtgatttttcttccacagctatagaactggtccagacaaattcagaatatgatccttctcggtgttttgcctttgttcacgacctgtgtgatgaagagaagagttacccagtgcccaagggcagtcttgatattatcattctcatatttgttctttcagcaattgttccagacaagatgcagaaggctatcaacaggctgagcaggcttctgaaacctggcgggatgatgcttctgcgagattacggccgctatgacatggctcagcttcggtttaaaaaaggtcagtgtctatctggaaatttctacgtgagaggtgatggaaccagagtttacttcttcacacaagaggaactggacacgcttttcaccactgctggactggaaaaagttcagaacctggtggatcgccgactgcaggtgaaccgaggaaagcaactgacaatgtaccgggtttggattcagtgcaaatactgcaagccccttctgtccagcaccagctgagaggcacctgctgccaacacgatgcaagcccattgtgtttccgggcttttttaaaaaaaaaattgtagcactgggcgtggtgcatgcctgtaatcccagccactcaggaggctgaggcggggaggatccattgagcccagcagtccaacctgggcaaaatagtgagagaccctgtatctgaaagtaataataaaaataaaaaatataaatgaggtctcgttgatgttggacaattcaagaattcagacttgaaccttaaacctaggaaaagttactttgtatcaggattctaacaattatgcttcatatttgtgaagtcctttaaaacataattttctcaagttctttctttgagatctcaatctgtcttagcattttgtaactaataactgaaattttattcaaaggaattgtaaaccttaaaccaccaatttatttccatgtgaaaaagtgttacatatgacaagtgttttttgactgtaattgcgttaaatcttttgagaatgtaaatgccgggctaggcaattgcagttaatacatacagaggttagtgaagggcttattaagttgtaggggaagcaagctgggaagaatcagatcagatattttcctgacaaaaaaaaatgaccctacagagagcatcaaaatgtggtgttcttgttaagtaattgatcgtggtcttcgctttaatcttagttccgccaggcacggtggctcacacctgtaatcccagcactttgggaggccaaggcgggcggatcagctgaggtcaggagttggagaccagcgtggccaacatggtgaaaccccgtctctactaaagataaaaaaattagctgagtgtgttggtgggtgcctgtaatccagctacttgggagactgaggcaggagaattgcttgaacccaggaggcagaggttgcagtgagctgagattgtgccactgcactccagcctgggcaacaaagcaagactctgtctcaaaaaaataaaaataaaaaaaaaatcttagttccatggaattttaagcattgttccccctctaacctgtgtctaaagaattaaaagaatttggccgggtgcggcagctcatgcctgtaatcccaacactttgggaggctgaggcaggcggatcacgaggtcaggagatcgagaccatcctggccaacacggtgaaacctcgtctccactaaaaataccaaaaaaattagctgggcatggtggcacacacctgtagtcccctgtagtcccagctactcgggaggctgaggcaggagaatcgtttgaacctgggaggtggaggttgcagtgagccaagatcatgtcactgcattccagcctgggcaacagaggaagactccgtctc

SEQ ID NO: 153552 - DNA, 3150 bp, Homo sapiens
  Payload ID: 10201
  Gene Symbol: METTL2A
  Gene Name: methyltransferase like 2A
  ENST ID: ENST00000616852
  CDS Start-End: 116-1057
ggctccggtgtcatggccggctcctaccctgaaggtgcacctgcagtcctcgccgataagaggcagcagttcggaagccggttcctgagagatccggcgcgcgtcttccaccacaatgcctgttgattatgagatcaatgcccacaaatactggaatgacttctacaaaatccacgaaaatgggtttttcaaggatagacattggctttttaccgaattccctgagctggcacctagccaaaatcaaaatcatttgaaggactggttcttggagaacaagagtgaagtacctgaatgtagaaacaatgaggatggacctggtttaataatggaagaacagcacaagtgttcttcaaagagccttgaacataaaacacagacacttcctgtggaggagaatgtaactcagaaaattagtgacctggaaatttgtgctgatgagtttcctggatcctcagccacctaccgaatactggaggttggctgtggtgtgggaaacacagtctttccaattttacaaacgaacaatgacccaggactctttgtttattgctgtgatttttcttccacagctatagaactggtccagacaaattcagaatatgatccttctcggtgttttgcctttgttcacgacctgtgtgatgaagagaagagttacccagtgcccaagggcagtcttgatattatcattctcatatttgttctttcagcaattgttccagacaagatgcagaaggctatcaacaggctgagcaggcttctgaaacctggcgggatgatgcttctgcgagattacggccgctatgacatggctcagcttcggtttaaaaaaggtcagtgtctatctggaaatttctacgtgagaggtgatggaaccagagtttacttcttcacacaagaggaactggacacgcttttcaccactgctggactggaaaaagttcagaacctggtggatcgccgactgcaggtgaaccgaggaaagcaactgacaatgtaccgggtttggattcagtgcaaatactgcaagccccttctgtccagcaccagctgagaggcacctgctgccaacacgatgcaagcccattgtgtttccgggcttttttaaaaaaaaaattgtagcactgggcgtggtgcatgcctgtaatcccagccactcaggaggctgaggcggggaggatccattgagcccagcagtccaacctgggcaaaatagtgagagaccctgtatctgaaagtaataataaaaataaaaaatataaatgaggtctcgttgatgttggacaattcaagaattcagacttgaaccttaaacctaggaaaagttactttgtatcaggattctaacaattatgcttcatatttgtgaagtcctttaaaacataattttctcaagttctttctttgagatctcaatctgtcttagcattttgtaactaataactgaaattttattcaaaggaattgtaaaccttaaaccaccaatttatttccatgtgaaaaagtgttacatatgacaagtgttttttgactgtaattgcgttaaatcttttgagaatgtaaatgccgggctaggcaattgcagttaatacatacagaggttagtgaagggcttattaagttgtaggggaagcaagctgggaagaatcagatcagatattttcctgacaaaaaaaaatgaccctacagagagcatcaaaatgtggtgttcttgttaagtaattgatcgtggtcttcgctttaatcttagttccgccaggcacggtggctcacacctgtaatcccagcactttgggaggccaaggcgggcggatcagctgaggtcaggagttggagaccagcgtggccaacatggtgaaaccccgtctctactaaagataaaaaaattagctgagtgtgttggtgggtgcctgtaatccagctacttgggagactgaggcaggagaattgcttgaacccaggaggcagaggttgcagtgagctgagattgtgccactgcactccagcctgggcaacaaagcaagactctgtctcaaaaaaataaaaataaaaaaaaaatcttagttccatggaattttaagcattgttccccctctaacctgtgtctaaagaattaaaagaatttggccgggtgcggcagctcatgcctgtaatcccaacactttgggaggctgaggcaggcggatcacgaggtcaggagatcgagaccatcctggccaacacggtgaaacctcgtctccactaaaaataccaaaaaaattagctgggcatggtggcacacacctgtagtcccctgtagtcccagctactcgggaggctgaggcaggagaatcgtttgaacctgggaggtggaggttgcagtgagccaagatcatgtcactgcattccagcctgggcaacagaggaagactccgtctcaaaaaaaaaaaagaaaagaattttcactttttgcaaaattatcttttttaatgcacccttaagtgtttgacacaaaaggaattgagggaacttcttaattttaaccacatcatcacttcacttctgaatgtgatcattatcagtgttagatgcctttttttttttttttttttttttttttttaaggagacagggctctcactttgttgcccaggctggagttcagtggtgcaatgatagctcattatcacctcaaacttctggctcaagccatccctccgcctcagcctcctgagtagctaggactgcaggtgggcaccatcatgcctagctaattgttagatcctttttttttatgttctgcattttttcagttatttttacatatttctctcttgatccatgcagttataggatatatccttaattttagaaagtaaggacttttcgaccaggcgtggcggctcatgcctataatcccagcactttgggaggccgaggtgggcagatcacttgaggtcaggagttccagtccagcctggctaacatagtgaaaccccgtctccactaaaaaataaaaaatcagcccggcatggctgtgggcgcctgtaatcccagctactcaggaggctgaagtagaattgcttgaacctgggaggcagaggttgcagtgagccgagatggtgccattgcactccagcctgggtgacaagagcgaaactgcatctc

SEQ ID NO: 153553 - DNA, 2182 bp, Homo sapiens
  Payload ID: 10202
  Gene Symbol: METTL2B
  Gene Name: methyltransferase like 2B
  Uniprot ID: Q6P1Q9
  ENST ID: ENST00000262432
  CDS Start-End: 38-1174
gcgttacggaaagtgaagtgtttccggctccggtgtcatggccggctcctaccctgaaggtgcacctgcaatcctcgccgataagaggcagcagttcggaagccggttcctgagcgatccggcgcgcgtcttccaccacaatgcctgggacaatgtggagtggtcggaagagcaagccgcggcggcggagagaaaagtccaggagaacagtatccagcgggtgtgccaggagaaacaagttgattatgagatcaatgcccacaaatactggaatgacttctacaaaatccacgaaaatgggtttttcaaggatagacattggctttttaccgaattccctgagctggcacctagccaaaatcaaaatcatttgaaggattggttcttggagaacaagagtgaagtatgtgaatgtagaaacaatgaggatggacctggtttaataatggaagaacagcacaagtgttcttcgaagagccttgaacataaaacacagacacctcctgtggaggagaatgtaactcagaaaattagtgacctggaaatttgtgctgatgagtttcctggatcctcagccacctaccgaatactggaggttggctgtggtgtgggaaacacagtctttccaattttacaaacgaacaatgacccaggactctttgtttattgctgtgatttttcttccacagctatagaactggtccagacaaattcagaatatgatccttctcggtgttttgcctttgttcacgacctgtgtgatgaagagaagagttacccagtgcccaagggcagtcttgatattatcattctcatatttgttctttcagcagttgttccagacaagatgcagaaggctatcaacaggctgagcaggcttctgaaacctggggggatggtacttctgcgagattacggccgctatgacatggctcagcttcggtttaaaaaaggtcagtgtctatctggaaatttctatgtgagaggtgatggaaccagagtttacttcttcacacaagaggaactggacacgcttttcaccactgctggactggaaaaagttcagaatctggtggaccgccgactgcaggtgaaccgagggaagcaactgacaatgtaccgggtttggattcagtgcaaatactgcaagccccttctgtccagcaccagctaagaggcacctgctgccaacacgatgcaagcccgttgtgtttccgagcttttttaaaaaaaaatttgtagcaccgggcatggtgcatgcctgtaatcccagccactcaggaggctgaggcagggaggatccattgagcccaggagtccagcctgggcaaaatagcgagagaccctgaatctgaaagtaatgataaaataaaaagaatataaatgaggtctcgttgatgctggacaattcaagaattcagacttgaaccttaaacctaggaaaagttactttgtatcaggattctaacaattatgcttcatatttgtgaagtcctttaaaacataattttctcaagttctttctttgagacctcaatctgtcttagcattttgtaactaataactgaaattttattcaaaggaattgtaaaccttaaaccaccatttatttccatgtgaaaaagtgttatatatgacaagtgttttttgattgtaattgcgttaaatcttttgagagtgtaaatgccgggctaggcaattgcagttaatacatacaggggttagtgaagggcttattaagttgtaggggaagcaagctgggaagaatcagatcagatattttcctgacaagaaaaaaatgaccctgtagacagcatcaaaatgtggtgttcttgttaagtaattgatcgtggtctttgctttaatcttagttccgccaggcacggtggctcacacctgtaatcccagcactttgggaggccgaggcgggcagatcacctgaggtcaggagttcgagaccagcgtggccaacatggtgaaaccccgtctctactaaagataaaaaaattagctgggtgtgttggtgggtgcctgtaatccagctactcgggaggctgaggcaggagaatcacttgaacccaggaggcagaggttgcagtgagctgagattgcgccactgtactccagcctgggcaacaaagcaagactctgtctcaaaaaaataaaaataaaaaaaatctta

SEQ ID NO: 153554 - DNA, 411 bp, Homo sapiens
  Payload ID: 10202
  Gene Symbol: METTL2B
  Gene Name: methyltransferase like 2B
  ENST ID: ENST00000419443
  CDS Start-End: 1-319
ctcagccacctaccgaatactggaggttggctgtggtgtgggaaacacagtctttccaattttacaaacgaacaatgacccaggactctttgtttattgctgtgatttttcttccacagctatagaactggtccagttcactttatcacactgtacagatgtcatatctgttcatatattgaaagtctgtggcaaccctgcatcaagcaagcctaccagtgccgtttctccaccaccatatgctcacttagtgtctgtgtgtcatgctttggtgattctcagaatatttcagacttttttactattatgtatgttatagtgtgtgacgttactgttgtacttggtttggggttccacaaatcacatctgtgtaagacggtcaacttaataaatgcatgtgttgtgactgcc

SEQ ID NO: 153555 - DNA, 977 bp, Homo sapiens
  Payload ID: 10202
  Gene Symbol: METTL2B
  Gene Name: methyltransferase like 2B
  ENST ID: ENST00000497665
  CDS Start-End: 18-248
tttccggctccggtgtcatggccggctcctaccctgaaggtgcacctgcaatcctcgccgataagaggcagcagttcggaagccggttcctgagcgatccggcgcgcgtcttccaccacaatgcctgggacaatgtggagtggtcggaagagcaagccgcggcggcggagagaaaagtccaggagaacagtatccagcgggtgtgccaggagaaacaagttaaagacacttggaccacaggacattaagtgcttttcccagagttgattatgagatcaatgcccacaaatactggaatgacttctacaaaatccacgaaaatgggtttttcaaggatagacattggctttttaccgaattccctgagctggcacctagccaaaatcaaaatcatttgaaggattggttcttggagaacaagagtgaagtatgtgaatgtagaaacaatgaggatggacctggtttaataatggaagaacagcacaagtgttcttcgaagagccttgaacataaaacacagacacctcctgtggaggagaatgtaactcagaaaattagtgacctggaaatttgtgctgatgagtttcctggatcctcagccacctaccgaatactggaggttggctgtggtgtgggaaacacagtctttccaattttacaaacgaacaatgacccaggactctttgtttattgctgtgatttttcttccacagctatagaactggtccagacaaattcagaatatgatccttctcggtgttttgcctttgttcacgacctgtgtgatgaagagaagagttacccagtgcccaagggcagtcttgatattatcattctcatatttgttctttcagcagttgttccagacaagatgcagaaggctatcaacaggctgagcaggcttctgaaacctggggggatggtacttctgcgagattacggccgctatgacatggctcagcttcggtttaaaaaag

SEQ ID NO: 153556 - DNA, 5743 bp, Homo sapiens
  Payload ID: 10202
  Gene Symbol: METTL2B
  Gene Name: methyltransferase like 2B
  Uniprot ID: Q6P1Q9
  ENST ID: ENST00000480046
  CDS Start-End: 116-1057
ggctccggtgtcatggccggctcctaccctgaaggtgcacctgcaatcctcgccgataagaggcagcagttcggaagccggttcctgagcgatccggcgcgcgtcttccaccacaatgcctgttgattatgagatcaatgcccacaaatactggaatgacttctacaaaatccacgaaaatgggtttttcaaggatagacattggctttttaccgaattccctgagctggcacctagccaaaatcaaaatcatttgaaggattggttcttggagaacaagagtgaagtatgtgaatgtagaaacaatgaggatggacctggtttaataatggaagaacagcacaagtgttcttcgaagagccttgaacataaaacacagacacctcctgtggaggagaatgtaactcagaaaattagtgacctggaaatttgtgctgatgagtttcctggatcctcagccacctaccgaatactggaggttggctgtggtgtgggaaacacagtctttccaattttacaaacgaacaatgacccaggactctttgtttattgctgtgatttttcttccacagctatagaactggtccagacaaattcagaatatgatccttctcggtgttttgcctttgttcacgacctgtgtgatgaagagaagagttacccagtgcccaagggcagtcttgatattatcattctcatatttgttctttcagcagttgttccagacaagatgcagaaggctatcaacaggctgagcaggcttctgaaacctggggggatggtacttctgcgagattacggccgctatgacatggctcagcttcggtttaaaaaaggtcagtgtctatctggaaatttctatgtgagaggtgatggaaccagagtttacttcttcacacaagaggaactggacacgcttttcaccactgctggactggaaaaagttcagaatctggtggaccgccgactgcaggtgaaccgagggaagcaactgacaatgtaccgggtttggattcagtgcaaatactgcaagccccttctgtccagcaccagctaagaggcacctgctgccaacacgatgcaagcccgttgtgtttccgagcttttttaaaaaaaaatttgtagcaccgggcatggtgcatgcctgtaatcccagccactcaggaggctgaggcagggaggatccattgagcccaggagtccagcctgggcaaaatagcgagagaccctgaatctgaaagtaatgataaaataaaaagaatataaatgaggtctcgttgatgctggacaattcaagaattcagacttgaaccttaaacctaggaaaagttactttgtatcaggattctaacaattatgcttcatatttgtgaagtcctttaaaacataattttctcaagttctttctttgagacctcaatctgtcttagcattttgtaactaataactgaaattttattcaaaggaattgtaaaccttaaaccaccatttatttccatgtgaaaaagtgttatatatgacaagtgttttttgattgtaattgcgttaaatcttttgagagtgtaaatgccgggctaggcaattgcagttaatacatacaggggttagtgaagggcttattaagttgtaggggaagcaagctgggaagaatcagatcagatattttcctgacaagaaaaaaatgaccctgtagacagcatcaaaatgtggtgttcttgttaagtaattgatcgtggtctttgctttaatcttagttccgccaggcacggtggctcacacctgtaatcccagcactttgggaggccgaggcgggcagatcacctgaggtcaggagttcgagaccagcgtggccaacatggtgaaaccccgtctctactaaagataaaaaaattagctgggtgtgttggtgggtgcctgtaatccagctactcgggaggctgaggcaggagaatcacttgaacccaggaggcagaggttgcagtgagctgagattgcgccactgtactccagcctgggcaacaaagcaagactctgtctcaaaaaaataaaaataaaaaaaatcttagttccatggaattttaagcactgttccccctctaacctatgtctaaagaattaaaagaatttggctgggtgcggtagctcatgcctgtaatcccaacactttgggaggctgaggcaggtggatcacgaggtcaggagatcgagaccatcctggctaacacggtgaaacctcgtctccactaaaaataccaaaaaaaatagctgggcatggtggcatgcgcctgtagtcccctgtagtcccagctactcgggaggctaaggcaggagaatcgtttgaacctgggaggcagaggttgcagtgagccgagatcatgtcactgcattccagcctgggcaacagaggaagactctgtctcaaaaaaataaaagaaaagaattttcactttttgcaaaattatctttttttactgcacccttaagtgtttgacacaaaaggaattgagagaacttcttaattttaaccacatcatcacttcacttctgaatgtgatcactgtcagtgttagatgctttttttttttttttttaggagacagggctctcactttgttgcccaggctggagttcagtggtgcaatgatagctcattatcacctcgaacttctggcttgagccatcgctccacctcagcctcctgagtagctaggactgcaggtgggcaccatcatgcctagctaattgttagatcctttttttttatgttctgcattttttcaattatttttacatatttctgtcttgatccatgcagttataggatatatccttaattttagaaagtaaggacttttcgaccaggcatggcggctcacgcctataatcccagcactttgggaggctgaggtgggcagatcacttgaggtcaggagttccagtccagcccggctaacatagtgaaaccccgtctccactaaaaaataaaaaatcagcccggcatggttgtgggcgcctgtaatcccagctactcaggaggctgaggtaggagaattgcttgaacctgggaggcggaggttgcagtgagctgagatggtgccattgcactccagcctgggcgacaagagcgaaactgcatctcaaaaacaaagatgcctagctttcaccttgttgatgtttttctaaattttggaataataaatttatataggaatactgcaagaatagtccatttttttctgatgtcccaacatcagcaaatatattaccaaatatatccatcacaagtaggaatacatggaaacattaatgccagccactaaccattcatgtttacccagtagtcccaataatagctttgtcacacaaaaacatgattatgttggctgggcacagtggctcctgtaatcttagcattttgggagcccaaggcaggaggatgacttgaggccaggagttcaagaccaggctgggtaatgtagcaagaccctgactttttttttttttttttttgagatggagtttcgctcttgttgcccaggctggagtacaatggcacgatctcggctcactgcaatctccacctcccaagtttaagtgattctcctgcctcagcctcccaagtagctggaattacaggcatgcagcaccattcccagctaaattttttgtatttttagtagagacaaggtttctccatgttggtcaggctgatctcgaactcccgacctcaggtgatctgcccgcctcagcctcccaaagtgctgggattacaggcgtgagccaccacgcccggccaagaccctgactttttaaaaaatgttaaacataggccgggtgcagtggctcacgcctgtaatcccagcactttgggaggccgaggtgggcggatcatttgaggtcaggagttcgagaccagcctggccaacttaatgaaaccccatctctgctaacaatacagaccaggcatggtggctcacacctgtaatcccagcactttgagagaccgaggcaggtggatcacctgaggtcgggagttcgagaccagcctgaccaacatggagaaaccccgtctctactaaaaatacaaaatagccaggtgtgatggcgcatgcctgtaaccccatctacttggaaggctgaggcaggagaatcacttgaatctgggaggcagaggttgcagtgagccgagatggcgccattgcactccagcctgggcaacaagagtgaaactccgtctcaaaaaaaaaaaaaaaaaaaaattagctgggcatggtggtgggcgcctgtaatcccagctatctgggaggctgagtctagagaatcatttgaacctgggaggcggaggttgcagtgagccgagatcgcaccattgcactccagcctgggcaacagtgagactccgtctcaaaataaaaaaacaaaaaaaatgtaaaaaataaataattgtattgaatttattagttgtgtctcagtctccttcagtctacagtttaggcttgcttttgcacctttgcattttaaggtaagaggctattgtgtaaactcgaattgggtttgttggtgtttcttcatgatttggttcaggctctgcattttgggcaggaatattcagaggtgatgctgtgttcctcccataggatcgtatcaggcgacacatgattatgaatttccccattattggtgatgtcacttagttgtgttgtctgccaggttctgccactgtaaagttaataagtattttgtagggaagtgctttgagactaaatatcctgttcctcatcaaacttctaccccctagtttcagtatctattgctgttttttgtctgaataactatgatagttgccaaatagtggtttctgatccttccattccttctacactgattggttggtattttgtacagaaaagctttctcatatctgatttacttgtctcaatatggacccatgggtatttgagtttcttgtggggttatttgttgttgtttttgagacaggctcacccaggctggagtgcagcagcacgatcactgcttactgcttactgcagcctcgacctcccatgctcaagtgattctcccaccccagcctcccaagtagatgggactacaggcatgtgccaccaagcctaatttttgtattttttgtagagacagggtttcaccatgtgtcccaggctggtcttgagctcctgagctcaagcaatcctcccacctcggcctcccaaagtgctgggatgagccaccgtgactggccccacttaatgggttttcagaggtgggagcaaagaatgaagggaggaagagagctcccatcttttccattaccgtatttacttaaaactggaaaaaactgaatcactgggatggtatttcatttatcttttgaaatgaagaatagatacattaatttaaatgattctctaaagactgtccttcagcatccctaaagcattgcaaaactataggcacagtttttattttatctttctggcacctggtttgggctttggcttagattaaaaagacgagccttctcctgcccctgctcccttttattccctgccatctgctaagctcgactttttatctctcaggccaaatttgactctgtaagggactttgcataacgtttcatcctcagaatcgctaatgatgggcagaggactgttacatgtgttgggagggattaaagtatatgacctcagtgccacttaaaaaataaatactgtctcaactatca

SEQ ID NO: 153557 - DNA, 564 bp, Homo sapiens
  Payload ID: 10202
  Gene Symbol: METTL2B
  Gene Name: methyltransferase like 2B
  ENST ID: ENST00000481392
  CDS Start-End: 1-453
gttcacgacctgtgtgatgaagagaagagttacccagtgcccaagggcagtcttgatattatcattctcatatttgttctttcagcagttgttccagacaagatgcagaaggctatcaacaggctgagcaggcttctgaaacctggggggatggtacttctgcgagattacggccgctatgacatggctcagcttcggtttaaaaaaggtcagtgtctatctggaaatttctatgtgagaggtgatggaaccagagtttacttcttcacacaagaggaactggacacgcttttcaccactgctggactggaaaaagttcagaatctggtggaccgccgactgcagttccgccaggcacggtggctcacacctgtaatcccagcactttgggaggccgaggcgggcagatcacctgaggtcaggagttcgagaccagcgtggccaacatggtgaaaccccgtctctactaaagataaaaaaattagctgggtgtgttggtgggtgcctgtaatccagctactcgggaggctgaggcaggagaatcacttgaacccaggaggcaga

SEQ ID NO: 153558 - DNA, 2015 bp, Homo sapiens
  Payload ID: 10203
  Gene Symbol: METTL3
  Gene Name: methyltransferase like 3
  Uniprot ID: Q86U44
  ENST ID: ENST00000298717
  CDS Start-End: 153-1895
aaatgacttttctgtcttgctcagctccaggggtcattttccggttagccttcggggtgtccgcgtgagaattggctatatcctggagcgagtgctgggaggtgctagtccgccgcgccttattcgagaggtgtcagggctgggagactaggatgtcggacacgtggagctctatccaggcccacaagaagcagctggactctctgcgggagaggctgcagcggaggcggaagcaggactcggggcacttggatctacggaatccagaggcagcattgtctccaaccttccgtagtgacagcccagtgcctactgcacccacctctggtggccctaagcccagcacagcttcagcagttcctgaattagctacagatcctgagttagagaagaagttgctacaccacctctctgatctggccttaacattgcccactgatgctgtgtccatctgtcttgccatctccacgccagatgctcctgccactcaagatggggtagaaagcctcctgcagaagtttgcagctcaggagttgattgaggtaaagcgaggtctcctacaagatgatgcacatcctactcttgtaacctatgctgaccattccaagctctctgccatgatgggtgctgtggcagaaaagaagggccctggggaggtagcagggactgtcacagggcagaagcggcgtgcagaacaggactcgactacagtagctgcctttgccagttcgttagtctctggtctgaactcttcagcatcggaaccagcaaaggagccagccaagaaatcaaggaaacatgctgcctcagatgttgatctggagatagagagccttctgaaccaacagtccactaaggaacaacagagcaagaaggtcagtcaggagatcctagagctattaaatactacaacagccaaggaacaatccattgttgaaaaatttcgctctcgaggtcgggcccaagtgcaagaattctgtgactatggaaccaaggaggagtgcatgaaagccagtgatgctgatcgaccctgtcgcaagctgcacttcagacgaattatcaataaacacactgatgagtctttaggtgactgctctttccttaatacatgtttccacatggatacctgcaagtatgttcactatgaaattgatgcttgcatggattctgaggcccctggcagcaaagaccacacgccaagccaggagcttgctcttacacagagtgtcggaggtgattccagtgcagaccgactcttcccacctcagtggatctgttgtgatatccgctacctggacgtcagtatcttgggcaagtttgcagttgtgatggctgacccaccctgggatattcacatggaactgccctatgggaccctgacagatgatgagatgcgcaggctcaacatacccgtactacaggatgatggctttctcttcctctgggtcacaggcagggccatggagttggggagagaatgtctaaacctctgggggtatgaacgggtagatgaaattatttgggtgaagacaaatcaactgcaacgcatcattcggacaggccgtacaggtcactggttgaaccatgggaaggaacactgcttggttggtgtcaaaggaaatccccaaggcttcaaccagggtctggattgtgatgtgatcgtagctgaggttcgttccaccagtcataaaccagatgaaatctatggcatgattgaaagactatctcctggcactcgcaagattgagttatttggacgaccacacaatgtgcaacccaactggatcacccttggaaaccaactggatgggatccacctactagacccagatgtggttgcacggttcaagcaaaggtacccagatggtatcatctctaaacctaagaatttatagaagcacttccttacagagctaagaatccatagccatggctctgtaagctaaacctgaagagtgatatttgtacaatagctttcttctttatttaaataaacatttgtattgtagttggga

SEQ ID NO: 153559 - DNA, 563 bp, Homo sapiens
  Payload ID: 10203
  Gene Symbol: METTL3
  Gene Name: methyltransferase like 3
  ENST ID: ENST00000377543
  CDS Start-End: 537-563
ccaaatttgtcttgaacacctggcatcaagctgtcctcttgcctaagcctcccaaagtgtttgaattacaggctggaattcagtggcgtgaacacagcttactgcagtctcgacctcagggctcaagtgatcctcctgcctcagcctcctcctgagtggctagcaccacagatctacggaatccagaggcagcattgtctccaaccttccgtagtgacagcccagtgcctactgcacccacctctggtggccctaagcccagcacagcttcagcagttcctgaattagctacagatcctgagttagagaagaagttgctacaccacctctctgatctggccttaacattgcccactgatgctgtgtccatctgtcttgccatctccacgccagatgctcctgccactcaagatggggtagaaagcctcctgcagaagtttgcagctcaggagttgattgaggtaaagcgaggtctcctacaagatgatgcacatcctactcttgtaacctatgctgaccattccaagctctctgccatgatgggtgctgtggcagaaaagaag

SEQ ID NO: 153560 - DNA, 1570 bp, Homo sapiens
  Payload ID: 10203
  Gene Symbol: METTL3
  Gene Name: methyltransferase like 3
  ENST ID: ENST00000544248
  CDS Start-End: 116-853
tttccggttagccttcggggtgtccgcgtgagaattggctatatcctggagcgagtgctgggaggtgctagtccgccgcgccttattcgagaggtgtcagggctgggagactaggatgtcggacacgtggagctctatccaggcccacaagaagcagctggactctctgcgggagaggctgcagcggaggcggaagcaggactcggggcacttggatctacggaatccagaggcagcattgtctccaaccttccgtagtgacagcccagtgcctactgcacccacctctggtggccctaagcccagcacagcttcagcagttcctgaattagctacagatcctgagttagagaagaagttgctacaccacctctctgatctggccttaacattgcccactgatgctgtgtccatctgtcttgccatctccacgccagatgctcctgccactcaagatggggtagaaagcctcctgcagaagtttgcagctcaggagttgattgaggtaaagcgaggtctcctacaagatgatgcacatcctactcttgtaacctatgctgaccattccaagctctctgccatgatgggtgctgtggcagaaaagaagggccctggggaggtagcagggactgtcacagggcagaagcggcgtgcagaacaggactcgactacagtagctgcctttgccagttcgttagtctctggtctgaactcttcagcatcggaaccagcaaaggagccagccaagaaatcaaggaaacatgctgcctcagatgttgatctggagatagagagccttctgaaccaacagtccactaaggaacaacagagcaagaagacgaattatcaataaacacactgatgagtctttaggtgactgctctttccttaatacatgtttccacatggatacctgcaagtatgttcactatgaaattgatgcttgcatggattctgaggcccctggcagcaaagaccacacgccaagccaggagcttgctcttacacagagtgtcggaggtgattccagtgcagaccgactcttcccacctcagtggatctgttgtgatatccgctacctggacgtcagtatcttgggcaagtttgcagttgtgatggctgacccaccctgggatattcacatggaactgccctatgggaccctgacagatgatgagatgcgcaggctcaacatacccgtactacaggatgatggctttctcttcctctgggtcacaggcagggccatggagttggggagagaatgtctaaacctctgggggtatgaacgggtagatgaaattatttgggtgaagacaaatcaactgcaacgcatcattcggacaggccgtacaggtcactggttgaaccatgggaaggaacactgcttggttggtgtcaaaggaaatccccaaggcttcaaccagggtctggattgtgatgtgatcgtagctgaggttcgttccaccagtcataaaccagatgaaatctatggcatgattgaaagactatctcctggcactcgcaagattgagttatttggacgaccacacaatgtgcaacccaactg

SEQ ID NO: 153561 - DNA, 1462 bp, Homo sapiens
  Payload ID: 10203
  Gene Symbol: METTL3
  Gene Name: methyltransferase like 3
  ENST ID: ENST00000539760
  CDS Start-End: 1-1009
agtgcctactgcacccacctctggtggccctaagcccagcacagcttcagcagttcctgaattagctacagatcctgagttagagaagaagttgctacaccacctctctgatctggccttaacattgcccactgatgctgtgtccatctgtcttgccatctccacgccagatgctcctgccactcaagatggggtagaaagcctcctgcagaagtttgcagctcaggagttgattgaggtaaagcgaggtctcctacaagatgatgcacatcctactcttgtaacctatgctgaccattccaagctctctgccatgatgggtgctgtggcagaaaagaagggccctggggaggtagcagggactgtcacagggcagaagcggcgtgcagaacaggactcgactacagtagctgcctttgccagttcgttagtctctggtctgaactcttcagcatcggaaccagcaaaggagccagccaagaaatcaaggaaacatgctgcctcagatgttgatctggagatagagagccttctgaaccaacagtccactaaggaacaacagagcaagaaggtcagtcaggagatcctagagctattaaatactacaacagccaaggaacaatccattgttgaaaaatttcgctctcgaggtcgggcccaagtgcaagaattctgtgactatggaaccaaggaggagtgcatgaaagccagtgatgctgatcgaccctgtcgcaagctgcacttcagacgaattatcaataaacacactgatgagtctttaggtgactgctctttccttaatacatgtttccacatggatacctgcaagtatgttcactatgaaattgatgcttgcatggattctgaggcccctggcagcaaagaccacacgccaagccaggagcttgctcttacacagagtgtcggaggtgattccagtgcagaccgactcttcccacctcagggccatggagttggggagagaatgtctaaacctctgggggtatgaacgggtagatgaaattatttgggtgaagacaaatcaactgcaacgcatcattcggacaggccgtacaggtcactggttgaaccatgggaaggaacactgcttggttcgttccaccagtcataaaccagatgaaatctatggcatgattgaaagactatctcctggcactcgcaagattgagttatttggacgaccacacaatgtgcaacccaactggatcacccttggaaaccaactggatgggatccacctactagacccagatgtggttgcacggttcaagcaaaggtacccagatggtatcatctctaaacctaagaatttatagaagcacttccttacagagctaagaatccatagccatggctctgtaagctaaacctgaagagtgatatttgtacaatagctttcttctttatttaaataaacatttgtattgtagttgggattctg

SEQ ID NO: 153562 - DNA, 2030 bp, Homo sapiens
  Payload ID: 10203
  Gene Symbol: METTL3
  Gene Name: methyltransferase like 3
  ENST ID: ENST00000537163
  CDS Start-End: 118-579
attttccggttagccttcggggtgtccgcgtgagaattggctatatcctggagcgagtgctgggaggtgctagtccgccgcgccttattcgagaggtgtcagggctgggagactaggatgtcggacacgtggagctctatccaggcccacaagaagcagctggactctctgcgggagaggctgcagcggaggcggaagcaggactcggggcacttggatctacggaatccagaggcagcattgtctccaaccttccgtagtgacagcccagtgcctactgcacccacctctggtggccctaagcccagcacagcttcagcagttcctgaattagctacagatcctgagttagagaagaagttgctacaccacctctctgatctggccttaacattgcccactgatgctgtgtccatctgtcttgccatctccacgccagatgctcctgccactcaagatggggtagaaagcctcctgcagaagtttgcagctcaggagttgattgagcatcggaaccagcaaaggagccagccaagaaatcaaggaaacatgctgcctcagatgttgatctggagatagagagccttctgaaccaacagtccactaaggaacaacagagcaagaaggtcagtcaggagatcctagagctattaaatactacaacagccaaggaacaatccattgttgaaaaatttcgctctcgaggtcgggcccaagtgcaagaattctgtgactatggaaccaaggaggagtgcatgaaagccagtgatgctgatcgaccctgtcgcaagctgcacttcagacgaattatcaataaacacactgatgagtctttaggtgactgctctttccttaatacatgtttccacatggatacctgcaagtatgttcactatgaaattgatgcttgcatggattctgaggcccctggcagcaaagaccacacgccaagccaggagcttgctcttacacagagtgtcggaggtgattccagtgcagaccgactcttcccacctcagtggatctgttgtgatatccgctacctggacgtcagtatcttgggcaagtttgcagttgtgatggctgacccaccctgggatattcacatggaactgccctatgggaccctgacagatgatgagatgcgcaggctcaacatacccgtactacaggatgatggctttctcttcctctgggtcacaggcagggccatggagttggggagagaatgtctaaacctctgggggtatgaacgggtagatgaaattatttgggtgaagacaaatcaactgcaacgcatcattcggacaggccgtacaggtcactggttgaaccatgggaaggaacactgcttggtgagcagcagtggggcccaattcaataggtggagcacaaagaagaatcatttgatttcttactgagaaaaagttcaaaggtgtggtttcataaggtaatctgttatctgtggtgagcaggttggtgtcaaaggaaatccccaaggcttcaaccagggtctggattgtgatgtgatcgtagctgaggtatgtgcttcccaggcctccaaagcttccacatttttgttggtatcagttattcatgttgggtgtattctcatcccagatttttctcatttagatcataaacataatagaaagggctagaattgcaatcttgtgtaacttaaaaagcagctagtttttatttcctaggttcgttccaccagtcataaaccagatgaaatctatggcatgattgaaagactatctcctggcactcgcaagattgagttatttggacgaccacacaatgtgcaacccaactggatcacccttggaaaccaactggatgggatccacctactagacccagatgtggttgcacggttcaagcaaaggtacccagatggtatcatctctaaacctaagaatttatagaagcacttccttacagagctaagaatccatagccatggctctgtaagctaaacctgaagagtgatatttgtacaatagctttcttctttatttaaa

SEQ ID NO: 153563 - DNA, 2124 bp, Homo sapiens
  Payload ID: 10203
  Gene Symbol: METTL3
  Gene Name: methyltransferase like 3
  ENST ID: ENST00000543235
  CDS Start-End: 88-864
tgagaattggctatatcctggagcgagtgctgggaggtgctagtccgccgcgccttattcgagaggtgtcagggctgggagactaggatgtcggacacgtggagctctatccaggcccacaagaagcagctggactctctgcgggagaggctgcagcggaggcggaagcaggactcggggcacttggatctacggaatccagaggcagcattgtctccaaccttccgtagtgacagcccagtgcctactgcacccacctctggtggccctaagcccagcacagcttcagcagttcctgaattagctacagatcctgagttagagaagaagttgctacaccacctctctgatctggccttaacattgcccactgatgctgtgtccatctgtcttgccatctccacgccagatgctcctgccactcaagatggggtagaaagcctcctgcagaagtttgcagctcaggagttgattgaggtaaagcgaggtctcctacaagatgatgcacatcctactcttgtaacctatgctgaccattccaagctctctgccatgatgggtgctgtggcagaaaagaagggccctggggaggtagcagggactgtcacagggcagaagcggcgtgcagaacaggactcgactacagtagctgcctttgccagttcgttagtctctggtctgaactcttcagcatcggaaccagcaaaggagccagccaagaaatcaaggaaacatgctgcctcagatgttgatctggagatagagagccttctgaaccaacagtccactaaggaacaacagagcaagaaggtcgggcccaagtgcaagaattctgtgactatggaaccaaggaggagtgcatgaaagccagtgatgctgatcgaccctgtcgcaagctgcacttcagacgaattatcaataaacacactgatgagtctttaggtgactgctctttccttaatacatgtttccacatggatacctgcaagtatgttcactatgaaattgatgcttgcatggattctgaggcccctggcagcaaagaccacacgccaagccaggagcttgctcttacacagagtgtcggaggtgattccagtgcagaccgactcttcccacctcagtggatctgttgtgatatccgctacctggacgtcagtatcttgggcaagtttgcagttgtgatggctgacccaccctgggatattcacatggaactgccctatgggaccctgacagatgatgagatgcgcaggctcaacatacccgtactacaggatgatggctttctcttcctctgggtcacaggcagggccatggagttggggagagaatgtctaaacctctgggggtatgaacgggtagatgaaattatttgggtgaagacaaatcaactgcaacgcatcattcggacaggccgtacaggtcactggttgaaccatgggaaggaacactgcttggtgagcagcagtggggcccaattcaataggtggagcacaaagaagaatcatttgatttcttactgagaaaaagttcaaaggtgtggtttcataaggtaatctgttatctgtggtgagcaggttggtgtcaaaggaaatccccaaggcttcaaccagggtctggattgtgatgtgatcgtagctgaggtatgtgcttcccaggcctccaaagcttccacatttttgttggtatcagttattcatgttgggtgtattctcatcccagatttttctcatttagatcataaacataatagaaagggctagaattgcaatcttgtgtaacttaaaaagcagctagtttttatttcctaggttcgttccaccagtcataaaccagatgaaatctatggcatgattgaaagactatctcctggcactcgcaagattgagttatttggacgaccacacaatgtgcaacccaactggatcacccttggaaaccaactggatgggatccacctactagacccagatgtggttgcacggttcaagcaaaggtacccagatggtatcatctctaaacctaagaatttatagaagcacttccttacagagctaagaatccatagccatggctctgtaagctaaacctgaagagtgatatttgtacaatagctttctt

SEQ ID NO: 153564 - DNA, 3601 bp, Homo sapiens
  Payload ID: 10204
  Gene Symbol: METTL4
  Gene Name: methyltransferase like 4
  ENST ID: ENST00000319888
  CDS Start-End: 800-2059
acttccatgcgaccgcctcgtcgctggaaggctgcgtgctggtcgcgcccagctgcgtcaccccaggaactggggtctgtgggccagtgtggccgtctctacgaagactggcacgacccctaaagttaggtcggaagacctgtgggcagcttgagcgccgaggagtgccctgaacgctcaactcgccctggaaacgtttttccgtacagcaacatggcggcgcccatggactcttagaaaaggagaaagctttttctctgtggactggaaggggcatttttcatgatcactatttagatgggtgctgttttcatgaggagagtctgggaaggcggcgtccgcttttctgacaagggaagaggctactttgtccttttaaggattcaatgacttcctgacttggaggatgtggacctagtggctagacccaaggaccaaagcaagaagtcgtggggggcccaggaagacaggaggatcacattgggattccagacataagatcaggttttaaccccctttggccaaattttggctgaaaatgttgaattatcaactctgaaattaaaaagaaagtttatattaaaacattgcaattttccttagaatttctgtatatattaacatcatgaatgataaattctcttcaatgtgcatgtcaggtttttgtacttgtatatcaaatctatctgtgtgtatgaagtgtatgtttattgaaatacaagatatttaagaagctgatctggaaagttggattttcattctagttcctaattcccagaggcttttttaaaggaagggaatgtctgtggtacaccagttgtcagctgggtggttactggatcatctttcttttatcaacaagataaactatcaacttcaccagcatcatgaaccttgttgccgtaaaaaggagttcactacttctgttcactttgagtctcttcaaatggattctgtgtcctcctctggagtctgtgctgcatttattgcttctgactcttccactaagccagagaatgatgatggaggaaattatgaaatgttcacacgaaaatttgtttttcgacctgaactgtttgatgtcaccaaaccttatataactccagctgttcataaagaatgccagcaaagtaatgaaaaggaagatctgatgaatggtgttaaaaaagaaatctccatttctattattgggaagaagcgtaaaagatgtgttgttttcaatcaaggtgaattggatgctatggaataccatacaaagatcagggagctgattttggatggatctttacagttgatccaggaaggtctcaaaagtggttttctttatccactttttgaaaaacaggacaagggtagtaagcccattactttaccacttgacgcctgcagtttgtcagaattatgtgaaatggcaaagcatttgccttctctgaatgaaatggaacatcagacattacaattggtggaagaggatacatctgttacagaacaggatttatttttgcgagttgttgaaaacaactctagctttacaaaagtgattactttaatgggacagaaatacctgctaccaccgaaaagcagttttcttttatctgacatttcttgtatgcaaccacttctaaactataggaaaacatttgatgtaattgtgatagatccaccatggcagaacaaatcagttaaaagaagtaataggtacagttatttgtcacccctgcaaatacagcaaatacctatccctaaattggctgctccaaactgtcttcttgttacttgggtgaccaatagacagaagcacctacgttttataaaggaagaactttatccctcttggtctgtggaggtagttgctgagtggcactgggtaaaaataaccaattcaggagaatttgtgttcccattagattctccacacaaaaagccctacgaaggtcttatactggggagggttcaagaaaaaactgctctaccattgagaggttttaaaagactacatcaagccagatggggaatatttggagttgtttgctcgaaatttacagccaggttggactagttggggcaatgaagttctcaaatttcagcatgtggattattttattgctgtggagtctggaagctgactatgatcttgattaaagtagtggtttcttcattgtttcctcaccacttttcccttaattctaagtcatttttttattttgttaccaacccatattcttagaatataaacaggacttgtttttttcagtaagggaccagaagtgactagccttcatgtaattttaagatgaattttacttgagttgcactaacattctatgttattctagactatacaaattaagtggtaagcagttataaagacggcaagaccatgctattgaaaaagttcagaaaacatacaccgtggaccagaggtcttaatcctatctatggatgtgttttgtgtgacccatacagtgttgtaaaaaacacttagaaccattattctaaaaaatggggctatttcacattaaagtccagatttctgcttctttttaaacatcagaggctctggctacacagaggcctttgttctttcctggcatcagtctgcaggaccaagcggtggtggctcacttgggaagagccttgtgctctccactttgccacagtaccactgccaccatgctgctcacttatgtcatccacttggcccttgtatgacctgaatttgcaacctctggtatactgttatgttctggagaaaatattcaaagatctgccaaatactgcattagtatactgagtttatacagcatttttgtagggttttaaattgcattcaaggtcactttccaagcactttctggttttgcttgtttttctagaagaaaatgaaaagctattccttataataaacatggcagcaagtaaacagtgtgattgtgaaaaaaatattatttatagattttctacaaataaatatttgtctaccaagtaaaatattttgactgaaatgattctttgaaatgcatattgatttattatgtattgactttttaaaaattgaggtataattttcacaaaattctccaattttcagtgtcaaattcagtgaattttgaaaacatatatacagttgtctgtctgccacagtgatcatgatacagaacactttctttaccctgaaaacttctcatttttccttttgcagtcaatcccctgctcctatccttggcccctggcaaacactggtttgctttctatcattagttctgctgtttgagaatttcatataaatggaatcatgcaatgtgtaatctattgtgcctggcttctttcacgtagcattttgagaaaagcatttatactatttacagattgttgacaaatatttatccactaagtaaaatgttagactgaaatgattctttgacaagcttgccaatttactgattttgtcaaagaaaaatatgttatttttgaagtttgttcatcctttgagtgtgtgagtatagtatcagaggcttaattttgtatttatggagctattctaacttgttatttaaaaggaaaaaggtattaaacttgaagcaaacttctcatgatctca

SEQ ID NO: 153565 - DNA, 2742 bp, Homo sapiens
  Payload ID: 10204
  Gene Symbol: METTL4
  Gene Name: methyltransferase like 4
  Uniprot ID: Q8N3J2
  ENST ID: ENST00000574538
  CDS Start-End: 777-2195
ctggaaggctgcgtgctggtcgcgcccagctgcgtcaccccaggaactggggtctgtgggccagtgtggccgtctctacgaagactggcacgacccctaaagttaggtcggaagacctgtgggcagcttgagcgccgaggagtgccctgaacgctcaactcgccctggaaacgtttttccgtacagcaacatggcggcgcccatggactcttagaaaaggagaaagctttttctctgtggactggaaggggcatttttcatgatcactatttagatgggtgctgttttcatgaggagagtctgggaaggcggcgtccgcttttctgacaagggaagaggctactttgtccttttaaggattcaatgacttcctgacttggaggatgtggacctagtggctagacccaaggaccaaagcaagaagtcgtggggggcccaggaagacaggaggatcacattgggattccagacataagatcaggttttaaccccctttggccaaattttggctgaaaatgttgaattatcaactctgaaattaaaaagaaagtttatattaaaacattgcaattttccttagaatttctgtatatattaacatcatgaatgataaattctcttcaatgtgcatgtcaggtttttgtacttgtatatcaaatctatctgtgtgtatgaagtgtatgtttattgaaatacaagatatttaagaagctgatctggaaagttggattttcattctagttcctaattcccagaggcttttttaaaggaagggaatgtctgtggtacaccagttgtcagctgggtggttactggatcatctttcttttatcaacaagataaactatcaacttcaccagcatcatgaaccttgttgccgtaaaaaggagttcactacttctgttcactttgagtctcttcaaatggattctgtgtcctcctctggagtctgtgctgcatttattgcttctgactcttccactaagccagagaatgatgatggaggaaattatgaaatgttcacacgaaaatttgtttttcgacctgaactgtttgatgtcaccaaaccttatataactccagctgttcataaagaatgccagcaaagtaatgaaaaggaagatctgatgaatggtgttaaaaaagaaatctccatttctattattgggaagaagcgtaaaagatgtgttgttttcaatcaaggtgaattggatgctatggaataccatacaaagatcagggagctgattttggatggatctttacagttgatccaggaaggtctcaaaagtggttttctttatccactttttgaaaaacaggacaagggtagtaagcccattactttaccacttgacgcctgcagtttgtcagaattatgtgaaatggcaaagcatttgccttctctgaatgaaatggaacatcagacattacaattggtggaagaggatacatctgttacagaacaggatttatttttgcgagttgttgaaaacaactctagctttacaaaagtgattactttaatgggacagaaatacctgctaccaccgaaaagcagttttcttttatctgacatttcttgtatgcaaccacttctaaactataggaaaacatttgatgtaattgtgatagatccaccatggcagaacaaatcagttaaaagaagtaataggtacagttatttgtcacccctgcaaatacagcaaatacctatccctaaattggctgctccaaactgtcttcttgttacttgggtgaccaatagacagaagcacctacgttttataaaggaagaactttatccctcttggtctgtggaggtagttgctgagtggcactgggtaaaaataaccaattcaggagaatttgtgttcccattagattctccacacaaaaagccctacgaaggtcttatactggggagggttcaagaaaaaactgctctaccattgaggaatgcagatgtaaacgtgctccccattccagaccacaaattaattgtcagcgtgccctgtactcttcactcacataagccaccgcttgctgaggttttaaaagactacatcaagccagatggggaatatttggagttgtttgctcgaaatttacagccaggttggactagttggggcaatgaagttctcaaatttcagcatgtggattattttattgctgtggagtctggaagctgactatgatcttgattaaagtagtggtttcttcattgtttcctcaccacttttcccttaattctaagtcatttttttattttgttaccaacccatattcttagaatataaacaggacttgtttttttcagtaagggaccagaagtgactagccttcatgtaattttaagatgaattttacttgagttgcactaacattctatgttattctagactatacaaattaagtggtaagcagttataaagacggcaagaccatgctattgaaaaagttcagaaaacatacaccgtggaccagaggtcttaatcctatctatggatgtgttttgtgtgacccatacagtgttgtaaaaaacacttagaaccattattctaaaaaatggggctatttcacattaaagtccagatttctgcttctttttaaacatcagaggctctggctacacagaggcctttgttctttcctggcatcagtctgcaggaccaagcggtggtggctcacttgggaagagccttgtgctctccactttgccacagtaccactgccacc

SEQ ID NO: 153566 - DNA, 544 bp, Homo sapiens
  Payload ID: 10204
  Gene Symbol: METTL4
  Gene Name: methyltransferase like 4
  ENST ID: ENST00000577166
  CDS Start-End: 274-544
tttttcatgatcactatttagatgggtgctgttttcatgaggagagtctgggaaggcggcgtccgcttttctgacaagggaagaggctactttgtccttttaaggattcaatgacttcctgacttggaggatgtggacctagtggctagacccaaggaccaaagcaagaagtcgtggggggcccaggaagacaggaggatcacattgggattccagacataagatcagaagcgtaaaagatgtgttgttttcaatcaaggtgaattggatgctatggaataccatacaaagatcagggagctgattttggatggatctttacagttgatccaggaaggtctcaaaagtggttttctttatccactttttgaaaaacaggacaagggtagtaagcccattactttaccacttgacgcctgcagtttgtcagaattatgtgaaatggcaaagcatttgccttctctgaatgaaatggaacatcagacattacaattggtggaagaggatacatctgttacagaacaggatttatttttgcgagttg

SEQ ID NO: 153567 - DNA, 1884 bp, Homo sapiens
  Payload ID: 10204
  Gene Symbol: METTL4
  Gene Name: methyltransferase like 4
  ENST ID: ENST00000576251
  CDS Start-End: 1-278
cttgtatgcaaccacttctaaactataggaaaacatttgatgtaattgtgatagatccaccatggcagaacaaatcagttaaaagaagtaataggtacagttatttgtcacccctgcaaatacagcaaatacctatccctaaattggctgctccaaactgtcttcttgttacttgggtgaccaatagacagaagcacctacgttttataaaggaagaactttatccctcttggtctgtggaggtagttgctgagtggcactgggtaaaaaggttttaaaagactacatcaagccagatggggaatatttggagttgtttgctcgaaatttacagccaggttggactagttggggcaatgaagttctcaaatttcagcatgtggattattttattgctgtggagtctggaagctgactatgatcttgattaaagtagtggtttcttcattgtttcctcaccacttttcccttaattctaagtcatttttttattttgttaccaacccatattcttagaatataaacaggacttgtttttttcagtaagggaccagaagtgactagccttcatgtaattttaagatgaattttacttgagttgcactaacattctatgttattctagactatacaaattaagtggtaagcagttataaagacggcaagaccatgctattgaaaaagttcagaaaacatacaccgtggaccagaggtcttaatcctatctatggatgtgttttgtgtgacccatacagtgttgtaaaaaacacttagaaccattattctaaaaaatggggctatttcacattaaagtccagatttctgcttctttttaaacatcagaggctctggctacacagaggcctttgttctttcctggcatcagtctgcaggaccaagcggtggtggctcacttgggaagagccttgtgctctccactttgccacagtaccactgccaccatgctgctcacttatgtcatccacttggcccttgtatgacctgaatttgcaacctctggtatactgttatgttctggagaaaatattcaaagatctgccaaatactgcattagtatactgagtttatacagcatttttgtagggttttaaattgcattcaaggtcactttccaagcactttctggttttgcttgtttttctagaagaaaatgaaaagctattccttataataaacatggcagcaagtaaacagtgtgattgtgaaaaaaatattatttatagattttctacaaataaatatttgtctaccaagtaaaatattttgactgaaatgattctttgaaatgcatattgatttattatgtattgactttttaaaaattgaggtataattttcacaaaattctccaattttcagtgtcaaattcagtgaattttgaaaacatatatacagttgtctgtctgccacagtgatcatgatacagaacactttctttaccctgaaaacttctcatttttccttttgcagtcaatcccctgctcctatccttggcccctggcaaacactggtttgctttctatcattagttctgctgtttgagaatttcatataaatggaatcatgcaatgtgtaatctattgtgcctggcttctttcacgtagcattttgagaaaagcatttatactatttacagattgttgacaaatatttatccactaagtaaaatgttagactgaaatgattctttgacaagcttgccaatttactgattttgtcaaagaaaaatatgttatttttgaagtttgttcatcctttgagtgtgtgagtatagtatcagaggcttaattttgtatttatggagctattctaacttgttatttaaaaggaaaaaggtattaaacttgaagcaaacttctcatg

SEQ ID NO: 153568 - DNA, 613 bp, Homo sapiens
  Payload ID: 10204
  Gene Symbol: METTL4
  Gene Name: methyltransferase like 4
  ENST ID: ENST00000574676
  CDS Start-End: 551-613
ctggtcgcgcccagctgcgtcaccccaggaactggggtctgtgggccagtgtggccgtctctacgaagactggcacgacccctaaagttaggtcggaagacctgtgggcagcttgagcgccgaggagtgccctgaacgctcaactcgccctggaaacgtttttccgtacagcaacatggcggcgcccatggactcttagaaaaggagaaagctttttctctgtggactggaaggggcatttttcatgatcactatttagatgggtgctgttttcatgaggagagtctgggaaggcggcgtccgcttttctgacaagggaagaggctactttgtccttttaaggattcaatgacttcctgacttggaggatgtggacctagtggctagacccaaggaccaaagcaagaagtcgtggggggcccaggaagacaggaggatcacattgggattccagacataagatcagataaactatcaacttcaccagcatcatgaaccttgttgccgtaaaaaggagttcactacttctgttcactttgagtctcttcaaatggattctgtgtcctcctctggagtctgtgctgcatttattgcttctgactcttccactaag

SEQ ID NO: 153569 - DNA, 506 bp, Homo sapiens
  Payload ID: 10204
  Gene Symbol: METTL4
  Gene Name: methyltransferase like 4
  ENST ID: ENST00000609769
  CDS Start-End: 1-427
gttgtcagctgggtggttactggatcatctttcttttatcaacaagataaactatcaacttcaccagcatcatgaaccttgttgccgtaaaaaggagttcactacttctgttcactttgagtctcttcaaatggattctgtgtcctcctctggagtctgtgctgcatttattgcttctgactcttccactaagccagagaatgatgatggaggaaattatgaaatgttcacacgaaaatttgtttttcgacctgaactgtttgatgtcaccaaaccttatataactccagctgttcataaagaatgccagcaaagtaatgaaaaggaagatctgatgaatggtgttaaaaaagaaatctccatttctattattgggaaggtagaaagttttaagaaatatttatttttctccagaaaacataattgagatttattatctaaatgtcttaaatatctggtgattcgttaagtataaagaagaatcagtaaaacccaaaaaggcttta

SEQ ID NO: 153570 - DNA, 1010 bp, Homo sapiens
  Payload ID: 10205
  Gene Symbol: METTL5
  Gene Name: methyltransferase like 5
  Uniprot ID: Q9NRN9
  ENST ID: ENST00000260953
  CDS Start-End: 318-947
cggcctggcgcttccggcaccggccgaggtgcgggtcgcctccagaggtgcgtggtcgtggcgcgagggatcctgaggctgctccagcagtgcgccgccgccgtctcctggggcggcttgggttagccgggaggtgggtcagaggctcgccccgtgccctgcgtccgggcgtctccttagggcgcgtcttcgggtccggccagcggtgctgaaaaagggagaaggttgggggtagggaggaaacaagatcccagttcaatagatttctccgcagatcctgtgccttcaaaccctacgagtccatactttaaaacaaaatgaagaaagtaaggcttaaggaactagagagtcgcctgcaacaagtggatggatttgaaaagcccaagctacttctggaacagtatcctaccaggccgcacattgcagcatgtatgctctatacaatccataacacttatgatgacattgaaaataaagtcgttgcagatctaggatgtggttgtggagtacttagcatcggaactgcaatgttaggagcagggttgtgtgttggatttgacatagatgaagacgcattggaaatatttaataggaatgcagaagagtttgagttaacaaatattgacatggttcaatgtgatgtgtgcttattatctaacagaatgtccaagtcattcgatacagtaattatgaatcctccctttgggaccaaaaataataaagggacagatatggcttttctaaagactgctttggaaatggcaagaacagcagtatattccttacacaaatcctcaactagagaacatgttcaaaagaaagctgcagaatggaaaatcaagatagatattatagcagaacttcgatatgacctgccagcatcatacaagtttcacaaaaagaaatcagtggacattgaagtggacctaattcggttttccttttaaaagccccgcaaacaaaagtcgtttaaaacctatttaaaatgaataaaaaattggtttactaaa

SEQ ID NO: 153571 - DNA, 629 bp, Homo sapiens
  Payload ID: 10205
  Gene Symbol: METTL5
  Gene Name: methyltransferase like 5
  ENST ID: ENST00000308099
  CDS Start-End: 78-572
ccggcaccggccgaggtgcgggtcgcctccagagatcctgtgccttcaaaccctacgagtccatactttaaaacaaaatgaagaaagtaaggcttaaggaactagagagtcgcctgcaacaagtggatggatttgaaaagcccaagctacttctggaacagtatcctaccaggccgcacattgcagcatgtatgctctatacaatccataacacttatgatgacattgaaaataaagtcgttgcagatctaggatgtggttgtggagtacttagcatcggaactgcaatgttaggagcagggttgtgtgttggatttgacatagatgaagacgcattggaaatatttaataggaatgcagaagagtttgagttaacaaatattgacatggttcaatgtgatgtgtgcttattatctaacagaatgtccaagtcattcgatacagtaattatgaatcctccctttgggaccaaaaataataaagaacttcgatatgacctgccagcatcatacaagtttcacaaaaagaaatcagtggacattgaagtggacctaattcggttttccttttaaaagccccgcaaacaaaagtcgtttaaaacctatttaaaatgaataaaaaattggttt

SEQ ID NO: 153572 - DNA, 800 bp, Homo sapiens
  Payload ID: 10205
  Gene Symbol: METTL5
  Gene Name: methyltransferase like 5
  Uniprot ID: Q9NRN9
  ENST ID: ENST00000392640
  CDS Start-End: 108-737
gaacgcgtgcgcgcgtgcggcctggcgcttccggcaccggccgaggtgcgggtcgcctccagagatcctgtgccttcaaaccctacgagtccatactttaaaacaaaatgaagaaagtaaggcttaaggaactagagagtcgcctgcaacaagtggatggatttgaaaagcccaagctacttctggaacagtatcctaccaggccgcacattgcagcatgtatgctctatacaatccataacacttatgatgacattgaaaataaagtcgttgcagatctaggatgtggttgtggagtacttagcatcggaactgcaatgttaggagcagggttgtgtgttggatttgacatagatgaagacgcattggaaatatttaataggaatgcagaagagtttgagttaacaaatattgacatggttcaatgtgatgtgtgcttattatctaacagaatgtccaagtcattcgatacagtaattatgaatcctccctttgggaccaaaaataataaagggacagatatggcttttctaaagactgctttggaaatggcaagaacagcagtatattccttacacaaatcctcaactagagaacatgttcaaaagaaagctgcagaatggaaaatcaagatagatattatagcagaacttcgatatgacctgccagcatcatacaagtttcacaaaaagaaatcagtggacattgaagtggacctaattcggttttccttttaaaagccccgcaaacaaaagtcgtttaaaacctatttaaaatgaataaaaaattggtttactaaa

SEQ ID NO: 153573 - DNA, 880 bp, Homo sapiens
  Payload ID: 10205
  Gene Symbol: METTL5
  Gene Name: methyltransferase like 5
  Uniprot ID: Q9NRN9
  ENST ID: ENST00000409965
  CDS Start-End: 188-817
gtgcgcgcgtgcggcctggcgcttccggcaccggccgaggtgcgggtcgcctccagaggtgcgtggtcgtggcgcgagggatcctgaggctgctccagcagtgcgccgccgccgtctcctggggcggcttgggttagccgggagatcctgtgccttcaaaccctacgagtccatactttaaaacaaaatgaagaaagtaaggcttaaggaactagagagtcgcctgcaacaagtggatggatttgaaaagcccaagctacttctggaacagtatcctaccaggccgcacattgcagcatgtatgctctatacaatccataacacttatgatgacattgaaaataaagtcgttgcagatctaggatgtggttgtggagtacttagcatcggaactgcaatgttaggagcagggttgtgtgttggatttgacatagatgaagacgcattggaaatatttaataggaatgcagaagagtttgagttaacaaatattgacatggttcaatgtgatgtgtgcttattatctaacagaatgtccaagtcattcgatacagtaattatgaatcctccctttgggaccaaaaataataaagggacagatatggcttttctaaagactgctttggaaatggcaagaacagcagtatattccttacacaaatcctcaactagagaacatgttcaaaagaaagctgcagaatggaaaatcaagatagatattatagcagaacttcgatatgacctgccagcatcatacaagtttcacaaaaagaaatcagtggacattgaagtggacctaattcggttttccttttaaaagccccgcaaacaaaagtcgtttaaaacctatttaaaatgaataaaaaattggtttactaaa

SEQ ID NO: 153574 - DNA, 936 bp, Homo sapiens
  Payload ID: 10205
  Gene Symbol: METTL5
  Gene Name: methyltransferase like 5
  ENST ID: ENST00000409837
  CDS Start-End: 82-678
gcttccggcaccggccgaggtgcgggtcgcctccagagatcctgtgccttcaaaccctacgagtccatactttaaaacaaaatgaagaaagtaaggcttaaggaactagagagtcgcctgcaacaagtggatggatttgaaaagcccaagctacttctggaacagtatcctaccaggccgcacattgcagcatgtatgctctatacaatccataacacttatgatgacattgaaaataaagtcgttgcagatctaggatgtggttgtggagtacttagcatcggaactgcaatgttaggagcagggttgtgtgttggatttgacatagatgaagacgcattggaaatatttaataggaatgcagaagagtttgagttaacaaatattgacatggttcaatgtgatgtgtgcttattatctaacagaatgtccaagtcattcgatacagtaattatgaatcctccctttgggaccaaaaataataaagggacagatatggcttttctaaagactgctttggaaatggcaagaacagcagtatattccttacacaaatcctcaactagagaacatgttcaaaagaaagctgcagaatggaaaatcaagatagatattatagcagaacttcgatatgacctgccagcatcatacaagtttcacaaaaagaaatcagtctgatcatctaaatcacccgaaaatttcagcaagcatccaatcttttcttctagagatttctataaaaatatacaaagtgatcaaaaagtttcttaaaagcaacaacagaccagaaatgactcacaccaccttatagctatacaagaaaaagactagaaaccaaaatgctattttaaagtagtttcttccgccggggcagcaagagcgaaactccatctcaaaaaataataataataataaataaataaagtagtttcatag

SEQ ID NO: 153575 - DNA, 1370 bp, Homo sapiens
  Payload ID: 10205
  Gene Symbol: METTL5
  Gene Name: methyltransferase like 5
  ENST ID: ENST00000410097
  CDS Start-End: 137-871
tccagaggtgcgtggtcgtggcgcgagggatcctgaggctgctccagcagtgcgccgccgccgtctcctggggcggcttgggttagccgggagatcctgtgccttcaaaccctacgagtccatactttaaaacaaaatgaagaaagtaaggcttaaggaactagagagtcgcctgcaacaagtggatggatttgaaaagcccaagctacttctggaacagtatcctaccaggccgcacattgcagcatgtatgctctatacaatccataacacttatgatgacattgaaaataaagtcgttgcagatctaggatgtggttgtggagtacttagcatcggaactgcaatgttaggagcagggttgtgtgttggatttgacatagatgaagacgcattggaaatatttaataggaatgcagaagagtttgagttaacaaatattgacatggttcaatgtgatgtgtgcttattatctaacagaatgtccaagtcattcgatacagtaattatgaatcctccctttgggaccaaaaataataaagggacagatatggcttttctaaagactgctttggaaatggcaagaacagcagtatattccttacacaaatcctcaactagagaacatgttcaaaagaaagctgcagaatggaaaatcaagatagatattatagcagaacttcgatatgacctgccagcatcatacaagtttcacaaaaagaaatcagtaagtctcttgattttggctggtctacattcggtattgaaaagctttctgggccggatgtggtggttcatgcctgtaatcccagctactcgggaggctgaggcaagagaatcgcttgaactcaggaggcagaggttgcagtgagctgagattgccccactgaactccagcctgcgcgataagagtgagactcagtctcgaaaaagaaaaaaaaaggaaagctttgtgacaagtaattatttctagtgttaccaactttcctgtgtaaatatacaaagccagcctaggagacaccataaatggcctgtgggaaaggcccatcgtcaatagctaatattctagttctttcctaaatgctttgggtacaaaaagaaaaaaaaaatcaaaaactgtttttgctcttttcatatagtatatattttattagttagtttgtactaatacattctcatattacaaaggcaatttaatggaagaatcttccttttgatatttgaatcatctgaaataacacaaacagaacaatacattcaaagaaatctcatttgcataacaaaaagacaagttaaacaacaaaaaaatttttcctttctcacaggtggacattgaagtggacctaattcggttttccttttaaaagccc

SEQ ID NO: 153576 - DNA, 472 bp, Homo sapiens
  Payload ID: 10205
  Gene Symbol: METTL5
  Gene Name: methyltransferase like 5
  ENST ID: ENST00000409340
  CDS Start-End: 77-409
ccgtctcctggggcggcttgggttagccgggagatcctgtgccttcaaaccctacgagtccatactttaaaacaaaatgaagaaagtaaggcttaaggaactagagagtcgcctgcaacaagtggatggatttgaaaagcccaagctacttctggaacagtatcctaccaggccgcacattgcagggacagatatggcttttctaaagactgctttggaaatggcaagaacagcagtatattccttacacaaatcctcaactagagaacatgttcaaaagaaagctgcagaatggaaaatcaagatagatattatagcagaacttcgatatgacctgccagcatcatacaagtttcacaaaaagaaatcagtggacattgaagtggacctaattcggttttccttttaaaagccccgcaaacaaaagtcgtttaaaacctatttaaaatgaataaaaaattggtttactaaa

SEQ ID NO: 153577 - DNA, 443 bp, Homo sapiens
  Payload ID: 10205
  Gene Symbol: METTL5
  Gene Name: methyltransferase like 5
  ENST ID: ENST00000442181
  CDS Start-End: 1-380
ttaataggaatgcagaagagtttgagttaacaaatattgacatggttcaatgtgatgtgtgcttattatctaacagaatgtccaagtcattcgatacagtaattatgaatcctccctttgggaccaaaaataataaagggacagatatggcttttctaaagactgctttggaaatggcaagaacagcagtatattccttacacaaatcctcaactagagaacatgttcaaaagaaagctgcagaatggaaaatcaagatagatattatagcaggtggcttttgttttacagaacttcgatatgacctgccagcatcatacaagtttcacaaaaagaaatcagtggacattgaagtggacctaattcggttttccttttaaaagccccgcaaacaaaagtcgtttaaaacctatttaaaatgaataaaaaattggtttactaaa

SEQ ID NO: 153578 - DNA, 464 bp, Homo sapiens
  Payload ID: 10205
  Gene Symbol: METTL5
  Gene Name: methyltransferase like 5
  ENST ID: ENST00000537825
  CDS Start-End: 1-264
caacaagtggatggatttgaaaagcccaagctacttctggaacagtatcctaccaggccgcacattgcagcatgtatgctctatacaatccataacacttatgatgacattgaaaataaagtcgttgcagatctaggatgtggttgtggagtacttagcatcggaactgcaatgttaggagcaggggacagatatggcttttctaaagactgctttggaaatggcaagaacagcagtatattccttacacaaatcctcaactagagaacatgttcaaaagaaagctgcagaatggaaaatcaagatagatattatagcagaacttcgatatgacctgccagcatcatacaagtttcacaaaaagaaatcagtggacattgaagtggacctaattcggttttccttttaaaagccccgcaaacaaaagtcgtttaaaacctatttaaaatgaataaaaaattggt

SEQ ID NO: 153579 - DNA, 235 bp, Homo sapiens
  Payload ID: 10205
  Gene Symbol: METTL5
  Gene Name: methyltransferase like 5
  ENST ID: ENST00000538491
  CDS Start-End: 90-235
ggcctggcgcttccggcaccggccgaggtgcgggtcgcctccagagatcctgtgccttcaaaccctacgagtccatactttaaaacaaaatgaagaaagtaaggcttaaggaactagagagtcgcctgcaacaagtggatggatttgaaaagcccaagctacttctggaacagtatcctaccaggccgcacattgcagaacttcgatatgacctgccagcatcatacaagtttca

SEQ ID NO: 153580 - DNA, 932 bp, Homo sapiens
  Payload ID: 10205
  Gene Symbol: METTL5
  Gene Name: methyltransferase like 5
  ENST ID: ENST00000614043
  CDS Start-End: 82-480
gcttccggcaccggccgaggtgcgggtcgcctccagagatcctgtgccttcaaaccctacgagtccatactttaaaacaaaatgaagaaagtaaggcttaaggaactagagagtcgcctgcaacaagtggatggatttgaaaagcccaagctacttctggaacagtatcctaccaggccgcacattgcagcatgtatgctctatacaatccataacacttatgatgacattgaaaataaagtcgttgcagatctaggatgtggttgtggagtacttagcatcggaactgcaatgttaggagcagggttgtgtgttggatttgacatagatgaagacgcattggaaatatttaataggaatgcagaagagtttgagttacaaatattgacatggttcaatgtgatgtgtgcttattatctaacagaatgtccaagtcattcgatacagaattatgaatcctccctttgggaccaaaaataataaagggacagatatggcttttctaaagactgctttggaaatggcaagaacagcagtatattccttacacaaatcctcaactagagaacatgttcaaaagaaagctgcagaatggaaaatcaagatagatattatagcagaacttcgatatgacctgccagcatcatacaagtttcacaaaaagaaatcagtctgatcatctaaatcacccgaaaatttcagcaagcatccaatcttttcttctagagatttctataaaaatatacaaagtgatcaaaaagtttcttaaaagcaacaacagaccagaaatgactcacaccaccttatagctatacaagaaaaagactagaaaccaaaatgctattttaaagtagtttcttccgccggggcagcaagagcgaaactccatctcaaaaaataataataataataaataaataaagtagtttcat

SEQ ID NO: 153581 - DNA, 1413 bp, Homo sapiens
  Payload ID: 10206
  Gene Symbol: METTL6
  Gene Name: methyltransferase like 6
  Uniprot ID: Q8TCB7
  ENST ID: ENST00000383789
  CDS Start-End: 256-978
agtggcgggggcggtgccatggcaaaagaactcccggataatccgaattcgtggtcctcagaattggtttagggttgtttcgcggttcttcccgtattctgcctccgaggcccagtggggctggctgtgggccccctgtgctgtttgaggcgtgaaactcacctcaggaaatgtatctgatccattagcgtggattcatattatttggtgatggagaatcttcagctgtgttaagtgttaccgtcagtttcagagatggcttctttgcaaaggaaagggctgcaggcaaggattctcacctctgaagaagaggagaaactgaaaagagaccaaactttggtgtctgattttaaacagcagaaattggaacaagaggctcagaaaaattgggatcttttttacaaaagaaatagcactaatttcttcaaagacagacactggaccaccagagagtttgaggagctaagatcatgtagagagtttgaagatcaaaagttaacaatgcttgaagctggctgtggggttggaaactgtttattcccacttttagaagaagatccgaatatctttgcctatgcctgtgatttttctccaagagccattgaatatgttaagcaaaatcctttatatgatacagaaagatgcaaggtattccagtgtgatctgactaaagatgatcttctggatcatgtaccgccagagtctgtggatgttgttatgttgatatttgtgctgtcagctgttcatcctgataagatgcaccttgtcttacaaaacatttacaagtgccatggctgctcttcagagcttcgccagccctgggacaaggatgattttgcagttacctgggatccatggagtcctgctataagggtcttgctgtgtcactcaggctggagtgcagtggcatggacgtggctcactgcagcctcaacttcctgggctcaagcagttctcccacctcagcctctgaagtagttgggactacaggacgcactaccagatccagctaatttttaatttttgtgtagagatggggtctcactatattgcccaggttggtctctaacattttaatcctgtgacactggacattccagggtgctcttggaggtactcaagaattgtcttcagggacgagcgaggtggctcacgcctgtaatcccaactttgggagactgaggtgggcaaattacttgaggtcaggagttcgagactagcctggccaacatggtgaaacctcatctctactaaaatacaaaaattagccgggcatggtggcgggcacctataatcccagctactcgggaggctgagacacgagaatcacttgaacgtgggagacggaggttgcagtgagctgagattatgccactgcactccagcctgggcgacagagcaagactccatctc

SEQ ID NO: 153582 - DNA, 1335 bp, Homo sapiens
  Payload ID: 10206
  Gene Symbol: METTL6
  Gene Name: methyltransferase like 6
  Uniprot ID: Q8TCB7
  ENST ID: ENST00000383790
  CDS Start-End: 242-1096
tgccatggcaaaagaactcccggataatccgaattcgtggtcctcagaattggtttagggttgtttcgcggttcttcccgtattctgcctccgaggcccagtggggctggctgtgggccccctgtgctgtttgaggcgtgaaactcacctcaggaaatgtatctgatccattagcgtggattcatattatttggtgatggagaatcttcagctgtgttaagtgttaccgtcagtttcagagatggcttctttgcaaaggaaagggctgcaggcaaggattctcacctctgaagaagaggagaaactgaaaagagaccaaactttggtgtctgattttaaacagcagaaattggaacaagaggctcagaaaaattgggatcttttttacaaaagaaatagcactaatttcttcaaagacagacactggaccaccagagagtttgaggagctaagatcatgtagagagtttgaagatcaaaagttaacaatgcttgaagctggctgtggggttggaaactgtttattcccacttttagaagaagatccgaatatctttgcctatgcctgtgatttttctccaagagccattgaatatgttaagcaaaatcctttatatgatacagaaagatgcaaggtattccagtgtgatctgactaaagatgatcttctggatcatgtaccgccagagtctgtggatgttgttatgttgatatttgtgctgtcagctgttcatcctgataagatgcaccttgtcttacaaaacatttacaaggtattaaaaccaggcaaaagtgtcttgtttcgtgactacggactgtatgatcatgccatgcttaggtttaaagccagcagcaaacttggagaaaacttttatgttagacaagatgggaccagatcatatttttttactgatgacttcctggctcagctctttatggacacaggttatgaagaagtggtaaacgagtatgtgtttcgagagacggtgaataaaaaagaaggcctgtgtgtgccaagagttttccttcagagcaaatttctaaagcctcctaagaacccatctcctgtggtcctgggcctggatcctaagtcctgacctttcatgaggttggcatttataccttcccttgaagaggaaaatttaaaatcactctttcgtctgggtgcggtggctcatgcctgtaatcccagcacttcgggaggccgaggttgggggatcatctgaggtcaggagtttgagaccagcctggccaacatggtgagaccccatctctactaaaaatacaaaaaaattagctgggcatagtggcgagtgcctgtaatcccagctactca

SEQ ID NO: 153583 - DNA, 564 bp, Homo sapiens
  Payload ID: 10206
  Gene Symbol: METTL6
  Gene Name: methyltransferase like 6
  ENST ID: ENST00000458728
  CDS Start-End: 1-316
attccagtgtgatctgactaaagatgatcttctggatcatgtaccgccagagtctgtggatgttgttatgttgatatttgtgctgtcagctgttcatcctgataagatgcaccttgtcttacaaaacatttacaaggtattaaaaccaggcaaaagtgtcttgtttcgtgactacggactgtatgatcatgccatgcttaggtttaaagccagcagcaaacttggagaaaacttttatgttagacaagatgggaccagatcatatttttttactgatggtctcaaacaaaagtctggaacctgggattctttgtaggatatctggctgtgcttttgtattatatgaaccacagaaaataatcttccagtatgatattgttttcagtatagtacctcaaccctaattttgcctggtaaccctttatccagagaccttttgttttcaacttacagtcttattctggggtgggggatgtacagtctggctgtgtggacttgcaggagagatttagggttctaacttcttcttactgacttccaaccaattctcctgtattcagtctt

SEQ ID NO: 153584 - DNA, 4020 bp, Homo sapiens
  Payload ID: 10206
  Gene Symbol: METTL6
  Gene Name: methyltransferase like 6
  Uniprot ID: Q8TCB7
  ENST ID: ENST00000443029
  CDS Start-End: 242-1096
tgccatggcaaaagaactcccggataatccgaattcgtggtcctcagaattggtttagggttgtttcgcggttcttcccgtattctgcctccgaggcccagtggggctggctgtgggccccctgtgctgtttgaggcgtgaaactcacctcaggaaatgtatctgatccattagcgtggattcatattatttggtgatggagaatcttcagctgtgttaagtgttaccgtcagtttcagagatggcttctttgcaaaggaaagggctgcaggcaaggattctcacctctgaagaagaggagaaactgaaaagagaccaaactttggtgtctgattttaaacagcagaaattggaacaagaggctcagaaaaattgggatcttttttacaaaagaaatagcactaatttcttcaaagacagacactggaccaccagagagtttgaggagctaagatcatgtagagagtttgaagatcaaaagttaacaatgcttgaagctggctgtggggttggaaactgtttattcccacttttagaagaagatccgaatatctttgcctatgcctgtgatttttctccaagagccattgaatatgttaagcaaaatcctttatatgatacagaaagatgcaaggtattccagtgtgatctgactaaagatgatcttctggatcatgtaccgccagagtctgtggatgttgttatgttgatatttgtgctgtcagctgttcatcctgataagatgcaccttgtcttacaaaacatttacaaggtattaaaaccaggcaaaagtgtcttgtttcgtgactacggactgtatgatcatgccatgcttaggtttaaagccagcagcaaacttggagaaaacttttatgttagacaagatgggaccagatcatatttttttactgatgacttcctggctcagctctttatggacacaggttatgaagaagtggtaaacgagtatgtgtttcgagagacggtgaataaaaaagaaggcctgtgtgtgccaagagttttccttcagagcaaatttctaaagcctcctaagaacccatctcctgtggtcctgggcctggatcctaagtcctgacctttcatgaggtctcaaacaaaagtctggaacctgggattctttgtaggatatctggctgtgcttttgtattatatgaaccacagaaaataatcttccagtatgatattgttttcagtatagtacctcaaccctaattttgcctggtaaccctttatccagagaccttttgttttcaacttacagtcttattctggggtgggggatgtacagtctggctgtgtggacttgcaggagagatttagggttctaacttcttcttactgacttccaaccaattctcctgtattcagtcttatacacacccccacttatactagacgtagctggtactaccaaagcctggtcacaaaactctatgggagtctcaatgcaagttgagttgcttcttgactttcatccctgctggcttaagactcagcttcacaagcctgctaagtcagttgctatttatcctgttttctagcccttcaaaattttaaatgaaaatttacatttttaattgacaaataatatatatatgggataaatatgatgttttgatagtaatagatgtatacattgtggaatgattatatgaagctaattagcatatcacactcctcacatacttctttttctttgtattgagaacatgtaaaatctattcttggccaagcatggtggctcacacctgtaattccaacactttgagaggccaaggcaggaagattgcttgagcccaggaattcaggggttccagacaccagcctgggcaacatagcaataccctgtctctaataaaaaaaaaaaaaagtaaaaataaatgtgtaatttaaaaaattcattattgttattatttttacaattttgaaactgtaggggccaggaacaaacttcccctttgccctctgaagaataactaaaaaatcactcaccaaatgcagattaataggagaaatggaataaaaacttagtaattgttttccttggtggatcccttaggtctttatgtagatagggaaaaggtttcttctagcatctgttgattgctaaggacatttaattcaaaatactcattataccagggagccatatctgggggtaaaattccagatgctccttcaaagtatacattattattgactatggtcaccatgtacagtagatctcaaaaacgtattccccctggctaactgaaatgtgtgccctttggtcaacatctcccctactcctctcctcccccagcctctggtaaccaccattctactttctgctgctgtgagttcaactttttaaaattccacgtataagtgaaatcatgtggtatttgtctttctgaatctggcttatttcacttagcataatatcttccaggttcacccatgttgttgcaaatgatagaatgtccttgtttctaatgttctcccaaatttaatcagttgtatggggtttatgtgataaaaatatccttttgctgtcattttcgtggggtttccagaaggatcctaactaggtacacatgcttagtctgtcttttttttttttttttttttgaagcaagtctccctctgttgccaggctggagtgcagtggcctgatcatgactcattgcaacctctgcctcccaggcccaagcaatcctcctacctcagcctccaagtagctgggactgaaggtgtgtgccagcatgtgtggctaattttatttttgtaaagacagagtctccttatattgcccaggctggtctcaaactcctgggttcgagatcctcctgcctctgcctcccaaagtgctgggattacaggcatgagccatggtgcctggtctagtctgtcatctttaaacaattgggttgggaaggaaaaggtagcacatagatagatgatttaagcagaaatagataagcataattgtccactgtaaaggggctgaatgatctggagaatggaggcatctcaggaaaactgaacttggtggtgtgtgcttaggactaatgaaaagtggccgggcacagatgctcatgcctataatcccagcacttcgggagggtgagagggagtataatttgaggccaggaattcaaggttgcagtgagccatgattgtgccactgttctccagcctgggcagcagagtgagaccccgactcttaaaaaaaaaaaaaaaagaaccaaagaaatgttagttccagggattcccagggacatgggcagggtccaagaatgatgctgagttaaggttaggtggctattcagaaagctacttcgacttgtatcccatattatggatcaaggaccttaaaaatagccatactttttttttgttctagtaactcaatttgtaggattgtttcctaagagataatctgacatattcaaggacttcttcacaaagatattcattagctgcattatttatagtaccaaacattataaatagtctaaaccagagatccacaagctatggctataacagtgacaaggaggcctagcgtgactaactccattttgctcctaacccccctgcagcgataacctgtatcttttaggttaactgcttttgcttatctctgcacataggccaagctaactatagaaggaatttagtttatagtttagagcaaggatggtaatagtgcctcccccaaaactaacccctgaggagataaggaggatgtatgcaagtaataatgttatgttaaagatttataagagcactgtgacctgaccaaggacaaagtttcaccacctccttggacccttgccaccacccagatgtgatcactggccacttcttgacctcaactccctccctcttcccccttcctctcacgtaaaaggagcctgaaatttgtattgacttaaaaatggttcttcaggacactactcttccattttcttggtttgctggctctctgaataaaagtcactttccttgcctcaa

SEQ ID NO: 153585 - DNA, 1221 bp, Homo sapiens
  Payload ID: 10206
  Gene Symbol: METTL6
  Gene Name: methyltransferase like 6
  ENST ID: ENST00000450816
  CDS Start-End: 264-983
ctagcggaagtggcgggggcggtgccatggcaaaagaactcccggataatccgaattcgtggtcctcagaattggtttagggttgtttcgcggttcttcccgtattctgcctccgaggcccagtggggctggctgtgggccccctgtgctgtttgaggcgtgaaactcacctcaggaaatgtatctgatccattagcgtggattcatattatttggtgatggagaatcttcagctgtgttaagtgttaccgtcagtttcagagatggcttctttgcaaaggaaagggctgcaggcaaggattctcacctctgaagaagaggagaaactgaaaagagaccaaactttggtgtctgattttaaacagcagaaattggaacaagaggctcagaaaaattgggatcttttttacaaaagaaatagcactaatttcttcaaagacagacactggaccaccagagagtttgaggagctaagatcatgtagagagcaaaatcctttatatgatacagaaagatgcaaggtattccagtgtgatctgactaaagatgatcttctggatcatgtaccgccagagtctgtggatgttgttatgttgatatttgtgctgtcagctgttcatcctgataagatgcaccttgtcttacaaaacatttacaaggtattaaaaccaggcaaaagtgtcttgtttcgtgactacggactgtatgatcatgccatgcttaggtttaaagccagcagcaaacttggagaaaacttttatgttagacaagatgggaccagatcatatttttttactgatgacttcctggctcagctctttatggacacaggttatgaagaagtggtaaacgagtatgtgtttcgagagacggtgaataaaaaagaaggcctgtgtgtgccaagagttttccttcagagcaaatttctaaagcctcctaagaacccatctcctgtggtcctgggcctggatcctaagtcctgacctttcatgaggttggcatttataccttcccttgaagaggaaaatttaaaatcactctttcgtctgggtgcggtggctcatgcctgtaatcccagcacttcgggaggccgaggttgggggatcatctgaggtcaggagtttgagaccagcctggccaacatggtgagaccccatctctactaaaaatacaaaaaaattagctgggcatagtggcgagtgcctgtaatcccagctactc

SEQ ID NO: 153586 - DNA, 615 bp, Homo sapiens
  Payload ID: 10206
  Gene Symbol: METTL6
  Gene Name: methyltransferase like 6
  ENST ID: ENST00000453819
  CDS Start-End: 1-477
ttattcccacttttagaagaagatccgaatatctttgcctatgcctgtgatttttctccaagagccattgaatatgttaagcaaaatcctttatatgatacagaaagatgcaaggtattccagtgtgatctgactaaagatgatcttctggatcatgtaccgccagagtctgtggatgttgttatgttgatatttgtgctgtcagctgttcatcctgataagatgcaccttgtcttacaaaacatttacaagtgccatggctgctcttcagagcttcgccagccctgggacaaggatgattttgcagttacctgggatccatggagtcctgctataaggctgcttggagaaggcttgcgacatgtgcacgagaccctgaaacaagccctctactgcacaatatttacccagcacctggaaggcacagacctggcccctgcccttgaagagctcacaagccttctctggtgtcagtgactcccctaatgagcttgggttaatggacagcctctgacatgccatgtggattccctactaggaattgtgctggaataagagggagggcaagtcagaaacttcttgtccagttaaaaataaagcaaatttgacagtata

SEQ ID NO: 153587 - DNA, 880 bp, Homo sapiens
  Payload ID: 10206
  Gene Symbol: METTL6
  Gene Name: methyltransferase like 6
  ENST ID: ENST00000598878
  CDS Start-End: 468-880
ctagctggggagggagaggccatatgagtggagggacctgtggaggaaaaattattattactaccttgatgtccgctgaaccaaagtggatggaaatttctcaggacatattcatccaaactacaaaaacagctcttctacaggtctacttaaactttgaaagatgagattgttcaaaaatgacacgagaaaatcacccatcaccactaagttaaagacttgaatatgtgagagttccagagcctcaaactcctactacagtcactgatccataacattttcctcttgcaatggactccacgccaaagtagctcagtcttgcggcatgtttgtgcaccaaaaaccccctgtgctgtttgaggcgtgaaactcacctcaggaaatgtatctgatccattagcgtggattcatattatttggtgatggagaatcttcagctgtgttaagtgttaccgtcagtttcagagatggcttctttgcaaaggaaagggctgcaggcaaggattctcacctctgaagaagaggagaaactgaaaagagaccaaactttggtgtctgattttaaacagcagaaattggaacaagaggctcagaaaaattgggatcttttttacaaaagaaatagcactaatttcttcaaagacagacactggaccaccagagagtttgaggagctaagatcatgtagagagcaaaatcctttatatgatacagaaagatgcaaggtattccagtgtgatctgactaaagatgatcttctggatcatgtaccgccagagtctgtggatgttgttatgttgatatttgtgctgtcagctgttcatcctgataagatgcaccttgtcttacaaaacatttacaagtgccatggctgctcttc

SEQ ID NO: 153588 - DNA, 3390 bp, Homo sapiens
  Payload ID: 10207
  Gene Symbol: METTL7A
  Gene Name: methyltransferase like 7A
  Uniprot ID: Q9H8H3
  ENST ID: ENST00000332160
  CDS Start-End: 289-1023
agaaggggaaacaggaatcgattaggaataaaggattataatccactttccttctgaggaaaagctgggaaccttctcattttgccttatgaaaactaagctgaatcgactgctgccaaacatctattaggcaaaattggcctcttgcccatgatttgactttccagcacagccagttctttttctcctctgcagctgattggctctggagtgtggccagaagcctctctcctgcaattaaaggagtcgggtctctaactgttgatctgtttttttcccttctgagcaatggagcttaccatctttatcctgagactggccatttacatcctgacatttcccttgtacctgctgaactttctgggcttgtggagctggatatgcaaaaaatggttcccctacttcttggtgaggttcactgtgatatacaacgaacagatggcaagcaagaagcgggagctcttcagtaacctgcaggagtttgcgggcccctccgggaaactctccctgctggaagtgggctgtggcacgggggccaacttcaagttctacccacctgggtgcagggtgacctgtattgaccccaaccccaactttgagaagtttttgatcaagagcattgcagagaaccgacacctgcagtttgagcgctttgtggtagctgccggggagaacatgcaccaggtggctgatggctctgtggatgtggtggtctgcaccctggtgctgtgctctgtgaagaaccaggagcggattctccgcgaggtgtgcagagtgctgagaccgggaggggctttctatttcatggagcatgtggcagctgagtgttcgacttggaattacttctggcaacaagtcctggatcctgcctggcaccttctgtttgatgggtgcaacctgaccagagagagctggaaggccctggagcgggccagcttctctaagctgaagctgcagcacatccaggccccactgtcctgggagttggtgcgccctcatatctatggatatgctgtgaaatagtgtgagctggcagttaagagctgaatggctcaaagaatttaaagcttcagttttacatttaaaatgctaagtgggagaagagaaaccttttttttggggggcggtttttttggtttgttgttggttttttttttttttttggcgggaagaaagagttttgctcttgttgcccaggctggagtgcaatgacgtgatctccgctcactgcaacctccacctcgcgggtttaagcgattcttctgcctcagcctccctagtagctgggattacaggtgcccaccaccatgcccagctaatttgtatttttagttgagacagggtttcactacgttggccaggctggtcttgaactcctgatctcaggcaatccacccacctcagcctcccaaagtgctgggatgacaggcgtgagcaaccgcacccagcttaaggtttttttgttttgttttgagacggagttttcgctcttgttgcccaggctggagtgcaatgctgtgatctcagcttaccacaacctccacctcccgggttcaagtgattcacctgcctcagcctcctgagtagctggtattacaggcatgcgtcaccacgccggctaattttgtacttttagtagagatggtgtttccccacgttggtcagtctggtctcaaattcctgacctcaggtgatctgcctgcctcggcctcccaaagtgctgtgattacagacgtcagccaccatgcctggcctgaaaccttttttaggtaaagttgaattccatccttaaaagtttctgttatatcctatttagccattttctattgtctcccaaagaattcacatcaaaaaaacagctttgaactcccccttcaaaggaaacagtcgactttcataattagcatctaccattatccccaaatcttattttattcattgacttgaaattttttccaattgcttttttttttttttttttaaggttaagagcagaggtttactaggccaaagaaagagaatagctctctgttgcagagaggggtcctggagaaatgggttaccccagttgtcttatttaaatggttacccatcagattttaattttatcttctctttgagagcttggtaataagaagcacttaaatcactccaaagaagactttaaaaagggagcagtgaaaaggtcttaataatttattgattgaattaagaaatactagctaattaagaatctgagtctaaacagcacagattttttctttctgcttttaaattgtgttttaaaaaaagagacagggggctgggcgtggtggctcacgcctgtaatcctagcactttgggaggccgaggcgggtggatcacgaggtaggagttaaagaccagcctggccaacatggcaaaaccctactaaagatacaaaaaaaaaaaaaaattagccaggcgtggtggtgggtgcctgtaatcccaggtacttggaaggctgaggcaggagaatctcttgaacccagaaggcgaaggttgcagtgaaccgagatcatgccattgtactctagcctgggtgacaagagcaagactccgtctcaaaaaaaaaaaaaaaaaaaaaaagaagtagagacagggagacagggtctcactgtgttgcctaggccggtcttgaactcctgggctcaagtgattctcccaccttgacctcctaaattgttgggattacaggtgtgagacagtgcacctggccgaaatagctcaagtttctgaaaaacaaatctgaatctatttgttattcttagcgtcactggtctggctttcagaattaacatacaaggttgccacacctagttctgcccagctttatgtcttttattccagtattccaccaaagtttgttttcctgcattccagttctcaagtcttaagataaagattgtacttgacagtttagtatatccataaaactatttgaggtggttaaggttcttgggttcattttccttaatactttgctgaatattgtagattgtaggcaatgaaaaagtctactaaattaggaaaaccttgaataattaggtatcctaggtaagagcccctaaacatcaagcaatctgtgagtctgtaaagaaataaatattttttggattattcttatctaattccacccctgttggaagatgatttctttgttctttgcaactatggaagctgtgaaaatcatcacaagtgcctctgaaagcgagtgttaggttggttagagggtttaatattttctgcaatggtttgtaggaattttaataaatgtagtatattttctgagatgattttgtaaaagtactattttaaatatcaaatcaaccaataaattcacatttgtgttaggaacagaaatatggttta

SEQ ID NO: 153589 - DNA, 1825 bp, Homo sapiens
  Payload ID: 10207
  Gene Symbol: METTL7A
  Gene Name: methyltransferase like 7A
  Uniprot ID: Q9H8H3
  ENST ID: ENST00000547104
  CDS Start-End: 57-791
tgcaattaaaggagtcgggtctctaactgttgatctgtttttttcccttctgagcaatggagcttaccatctttatcctgagactggccatttacatcctgacatttcccttgtacctgctgaactttctgggcttgtggagctggatatgcaaaaaatggttcccctacttcttggtgaggttcactgtgatatacaacgaacagatggcaagcaagaagcgggagctcttcagtaacctgcaggagtttgcgggcccctccgggaaactctccctgctggaagtgggctgtggcacgggggccaacttcaagttctacccacctgggtgcagggtgacctgtattgaccccaaccccaactttgagaagtttttgatcaagagcattgcagagaaccgacacctgcagtttgagcgctttgtggtagctgccggggagaacatgcaccaggtggctgatggctctgtggatgtggtggtctgcaccctggtgctgtgctctgtgaagaaccaggagcggattctccgcgaggtgtgcagagtgctgagaccgggaggggctttctatttcatggagcatgtggcagctgagtgttcgacttggaattacttctggcaacaagtcctggatcctgcctggcaccttctgtttgatgggtgcaacctgaccagagagagctggaaggccctggagcgggccagcttctctaagctgaagctgcagcacatccaggccccactgtcctgggagttggtgcgccctcatatctatggatatgctgtgaaatagtgtgagctggcagttaagagctgaatggctcaaagaatttaaagcttcagttttacatttaaaatgctaagtgggagaagagaaaccttttttttggggggcggtttttttggtttgttgttggttttttttttttttttggcaggagaatctcttgaacccagaaggcgaaggttgcagtgaaccgagatcatgccattgtactctagcctgggtgacaagagcaagactccgtctcaaaaaaaaaaaaaaaaaaaaaaagaagtagagacagggagacagggtctcactgtgttgcctaggccggtcttgaactcctgggctcaagtgattctcccaccttgacctcctaaattgttgggattacaggtgtgagacagtgcacctggccgaaatagctcaagtttctgaaaaacaaatctgaatctatttgttattcttagcgtcactggtctggctttcagaattaacatacaaggttgccacacctagttctgcccagctttatgtcttttattccagtattccaccaaagtttgttttcctgcattccagttctcaagtcttaagataaagattgtacttgacagtttagtatatccataaaactatttgaggtggttaaggttcttgggttcattttccttaatactttgctgaatattgtagattgtaggcaatgaaaaagtctactaaattaggaaaaccttgaataattaggtatcctaggtaagagcccctaaacatcaagcaatctgtgagtctgtaaagaaataaatattttttggattattcttatctaattccacccctgttggaagatgatttctttgttctttgcaactatggaagctgtgaaaatcatcacaagtgcctctgaaagcgagtgttaggttggttagagggtttaatattttctgcaatggtttgtaggaattttaataaatgtagtatattttctgagatgattttgtaaaagtactattttaaatatcaaatcaaccaataaattcacatttgtgttaggaacagaa

SEQ ID NO: 153590 - DNA, 1846 bp, Homo sapiens
  Payload ID: 10207
  Gene Symbol: METTL7A
  Gene Name: methyltransferase like 7A
  ENST ID: ENST00000550097
  CDS Start-End: 1-733
ggagcttaccatctttatcctgagactggccatttacatcctgacatttcccttgtacctgctgaactttctgggcttgtggagctggatatgcaaaaaatggttcccctacttcttggtgaggttcactgtgatatacaacgaacagatggcaagcaagaagcgggagctcttcagtaacctgcaggagtttgcgggcccctccgggaaactctccctgctggaagtgggctgtggcacgggggccaacttcaagttctacccacctgggtgcagggtgacctgtattgaccccaaccccaactttgagaagtttttgatcaagagcattgcagagaaccgacacctgcagtttgagcgctttgtggtagctgccggggagaacatgcaccaggtggctgatggctctgtggatgtggtggtctgcaccctggtgctgtgctctgtgaagaaccaggagcggattctccgcgaggtgtgcagagtgctgagaccgggaggggctttctatttcatggagcatgtggcagctgagtgttcgacttggaattacttctggcaacaagtcctggatcctgcctggcaccttctgtttgatgggtgcaacctgaccagagagagctggaaggccctggagcgggccagcttctctaagctgaagctgcagcacatccaggccccactgtcctgggagttggtgcgccctcatatctatggatatgctgtgaaatagtgtgagctggcagttaagagctgaatggctcaaagaatttaaagcttcagttttacatttaaaatgctaagtgggagaagagaaaccttttttttggggggcggtttttttggtttgttgttggttttttttttttttttggcgggaagaaagagttttgctcttgttgcccaggctggagtgcaatgacgtgatctccgctcactgcaacctccacctcgcgggtttaagcgattcttctgcctcagcctccctagtagctgggattacaggtacttggaaggctgaggcaggagaatctcttgaacccagaaggcgaaggttgcagtgaaccgagatcatgccattgtactctagcctgggtgacaagagcaagactccgtctcaaaaaaaaaaaaaaaaaaaaaaagaagtagagacagggagacagggtctcactgtgttgcctaggccggtcttgaactcctgggctcaagtgattctcccaccttgacctcctaaattgttgggattacaggtgtgagacagtgcacctggccgaaatagctcaagtttctgaaaaacaaatctgaatctatttgttattcttagcgtcactggtctggctttcagaattaacatacaaggttgccacacctagttctgcccagctttatgtcttttattccagtattccaccaaagtttgttttcctgcattccagttctcaagtcttaagataaagattgtacttgacagtttagtatatccataaaactatttgaggtggttaaggttcttgggttcattttccttaatactttgctgaatattgtagattgtaggcaatgaaaaagtctactaaattaggaaaaccttgaataattaggtatcctaggtaagagcccctaaacatcaagcaatctgtgagtctgtaaagaaataaatattttttggattattcttatctaattccacccctgttggaagatgatttctttgttctttgcaactatggaagctgtgaaaatcatcacaagtgcctctgaaagcgagtgttaggttggttagagggtttaatattttctgcaatggtttgtaggaattttaataaatgtagtatattttctgaga

SEQ ID NO: 153591 - DNA, 4076 bp, Homo sapiens
  Payload ID: 10207
  Gene Symbol: METTL7A
  Gene Name: methyltransferase like 7A
  Uniprot ID: Q9H8H3
  ENST ID: ENST00000548553
  CDS Start-End: 982-1716
taaagagatagagtctcactatgttgcccagacaggatttgaattcctgggctcaaggtatgcttctgtcttagctcctcagtagctgagaccatgggcacccaccactgtgcccagattcgggctttcttgtaaaaagcggatggatgcttgaaactattttctgaatccctttggctcccaaatgtgaatattctgggaaatatttttatccaaattagctgagtaatcgagtagttaggcacattttgaagactgaggcttgtcctttaaaagaagggcagcccacaaactgacttccttgagccaaaaattgttttaaaaggggaagtacagcccaaaacagtgattttaaaatatcaacaaaaagagtcaaattctgtaaaatatttaaagagatttattctgagccaaatatgagtgaccatgtcctgtgacacagccctcgggaaatcctgagaacatgtgcccaaggtggtcagggtacagcttggttttctacattttagggagacatgaggcttcaatcaaatacatttaagaaatacattggttcagtccagaaaggcaggacaacccgacgcgaggcagggagcttccaggttatagaggtcactggagagcccggtggggtgtaagtacactgcgcttataaaactctagcaggaagctagcagctgtctccaaacccagagaaggggaaacaggaatcgattaggaataaaggattataatccactttccttctgaggaaaagctgggaaccttctcattttgccttatgaaaactaagctgaatcgactgctgccaaacatctattaggcaaaattggcctcttgcccatgatttgactttccagcacagccagttctttttctcctctgcagctgattggctctggagtgtggccagaagcctctctcctgcaattaaaggagtcgggtctctaactgttgatctgtttttttcccttctgagcaatggagcttaccatctttatcctgagactggccatttacatcctgacatttcccttgtacctgctgaactttctgggcttgtggagctggatatgcaaaaaatggttcccctacttcttggtgaggttcactgtgatatacaacgaacagatggcaagcaagaagcgggagctcttcagtaacctgcaggagtttgcgggcccctccgggaaactctccctgctggaagtgggctgtggcacgggggccaacttcaagttctacccacctgggtgcagggtgacctgtattgaccccaaccccaactttgagaagtttttgatcaagagcattgcagagaaccgacacctgcagtttgagcgctttgtggtagctgccggggagaacatgcaccaggtggctgatggctctgtggatgtggtggtctgcaccctggtgctgtgctctgtgaagaaccaggagcggattctccgcgaggtgtgcagagtgctgagaccgggaggggctttctatttcatggagcatgtggcagctgagtgttcgacttggaattacttctggcaacaagtcctggatcctgcctggcaccttctgtttgatgggtgcaacctgaccagagagagctggaaggccctggagcgggccagcttctctaagctgaagctgcagcacatccaggccccactgtcctgggagttggtgcgccctcatatctatggatatgctgtgaaatagtgtgagctggcagttaagagctgaatggctcaaagaatttaaagcttcagttttacatttaaaatgctaagtgggagaagagaaaccttttttttggggggcggtttttttggtttgttgttggttttttttttttttttggcgggaagaaagagttttgctcttgttgcccaggctggagtgcaatgacgtgatctccgctcactgcaacctccacctcgcgggtttaagcgattcttctgcctcagcctccctagtagctgggattacaggtgcccaccaccatgcccagctaatttgtatttttagttgagacagggtttcactacgttggccaggctggtcttgaactcctgatctcaggcaatccacccacctcagcctcccaaagtgctgggatgacaggcgtgagcaaccgcacccagcttaaggtttttttgttttgttttgagacggagttttcgctcttgttgcccaggctggagtgcaatgctgtgatctcagcttaccacaacctccacctcccgggttcaagtgattcacctgcctcagcctcctgagtagctggtattacaggcatgcgtcaccacgccggctaattttgtacttttagtagagatggtgtttccccacgttggtcagtctggtctcaaattcctgacctcaggtgatctgcctgcctcggcctcccaaagtgctgtgattacagacgtcagccaccatgcctggcctgaaaccttttttaggtaaagttgaattccatccttaaaagtttctgttatatcctatttagccattttctattgtctcccaaagaattcacatcaaaaaaacagctttgaactcccccttcaaaggaaacagtcgactttcataattagcatctaccattatccccaaatcttattttattcattgacttgaaattttttccaattgcttttttttttttttttttaaggttaagagcagaggtttactaggccaaagaaagagaatagctctctgttgcagagaggggtcctggagaaatgggttaccccagttgtcttatttaaatggttacccatcagattttaattttatcttctctttgagagcttggtaataagaagcacttaaatcactccaaagaagactttaaaaagggagcagtgaaaaggtcttaataatttattgattgaattaagaaatactagctaattaagaatctgagtctaaacagcacagattttttctttctgcttttaaattgtgttttaaaaaaagagacagggggctgggcgtggtggctcacgcctgtaatcctagcactttgggaggccgaggcgggtggatcacgaggtaggagttaaagaccagcctggccaacatggcaaaaccctactaaagatacaaaaaaaaaaaaaaattagccaggcgtggtggtgggtgcctgtaatcccaggtacttggaaggctgaggcaggagaatctcttgaacccagaaggcgaaggttgcagtgaaccgagatcatgccattgtactctagcctgggtgacaagagcaagactccgtctcaaaaaaaaaaaaaaaaaaaaaaagaagtagagacagggagacagggtctcactgtgttgcctaggccggtcttgaactcctgggctcaagtgattctcccaccttgacctcctaaattgttgggattacaggtgtgagacagtgcacctggccgaaatagctcaagtttctgaaaaacaaatctgaatctatttgttattcttagcgtcactggtctggctttcagaattaacatacaaggttgccacacctagttctgcccagctttatgtcttttattccagtattccaccaaagtttgttttcctgcattccagttctcaagtcttaagataaagattgtacttgacagtttagtatatccataaaactatttgaggtggttaaggttcttgggttcattttccttaatactttgctgaatattgtagattgtaggcaatgaaaaagtctactaaattaggaaaaccttgaataattaggtatcctaggtaagagcccctaaacatcaagcaatctgtgagtctgtaaagaaataaatattttttggattattcttatctaattccacccctgttggaagatgatttctttgttctttgcaactatggaagctgtgaaaatcatcacaagtgcctctgaaagcgagtgttaggttggttagagggtttaatattttctgcaatggtttgtaggaattttaataaatgtagtatattttctgagatgattttgtaaaagtactattttaaatatcaaatcaaccaataaattcacatttgtgttaggaacagaaata

SEQ ID NO: 153592 - DNA, 618 bp, Homo sapiens
  Payload ID: 10207
  Gene Symbol: METTL7A
  Gene Name: methyltransferase like 7A
  ENST ID: ENST00000550502
  CDS Start-End: 79-618
acatttaagaaatacattggttcagtccagaaaggcaggacaacccgacgcgaggcagggagcttccaggttatagcaatggagcttaccatctttatcctgagactggccatttacatcctgacatttcccttgtacctgctgaactttctgggcttgtggagctggatatgcaaaaaatggttcccctacttcttggtgaggttcactgtgatatacaacgaacagatggcaagcaagaagcgggagctcttcagtaacctgcaggagtttgcgggcccctccgggaaactctccctgctggaagtgggctgtggcacgggggccaacttcaagttctacccacctgggtgcagggtgacctgtattgaccccaaccccaactttgagaagtttttgatcaagagcattgcagagaaccgacacctgcagtttgagcgctttgtggtagctgccggggagaacatgcaccaggtggctgatggctctgtggatgtggtggtctgcaccctggtgctgtgctctgtgaagaaccaggagcggattctccgcgaggtgtgcagagtgctgagaccgggaggggctttctatttcatggagcatgtggcagctgagtgt

SEQ ID NO: 153593 - DNA, 1506 bp, Homo sapiens
  Payload ID: 10208
  Gene Symbol: METTL7B
  Gene Name: methyltransferase like 7B
  Uniprot ID: Q6UX53
  ENST ID: ENST00000394252
  CDS Start-End: 210-944
aaaagtcattgaagagcttgtggggctgtgggacctgcgccctctggaggaattccatacacccactcaactctggcaaataggaaattgtcaagtaggagacaaggagcaaagtcctatcacagcgggaggggacgccagcgcctgcagaggctgagcagggaaaaagccagtgccccagcggaagcacagctcagagctggtctgccatggacatcctggtcccactcctgcagctgctggtgctgcttcttaccctgcccctgcacctcatggctctgctgggctgctggcagcccctgtgcaaaagctacttcccctacctgatggccgtgctgactcccaagagcaaccgcaagatggagagcaagaaacgggagctcttcagccagataaaggggcttacaggagcctccgggaaagtggccctactggagctgggctgcggaaccggagccaactttcagttctacccaccgggctgcagggtcacctgcctagacccaaatccccactttgagaagttcctgacaaagagcatggctgagaacaggcacctccaatatgagcggtttgtggtggctcctggagaggacatgagacagctggctgatggctccatggatgtggtggtctgcactctggtgctgtgctctgtgcagagcccaaggaaggtcctgcaggaggtccggagagtactgagaccgggaggtgtgctctttttctgggagcatgtggcagaaccatatggaagctgggccttcatgtggcagcaagttttcgagcccacctggaaacacattggggatggctgctgcctcaccagagagacctggaaggatcttgagaacgcccagttctccgaaatccaaatggaacgacagccccctcccttgaagtggctacctgttgggccccacatcatgggaaaggctgtcaaataatctttcccaagctccaaggcactcatttgctccttccccagcctccaattagaacaagccacccaccagcctatctatcttccactgagagggacctagcagaatgagagaagacattcatgtaccacctactagtccctctctccccaacctctgccagggcaatctctaacttcaatcccgccttcgacagtgaaaaagctctacttctacgctgacccagggaggaaacactaggaccctgttgtatcctcaactgcaagtttctggactagtctcccaacgtttgcctcccaatgttgtccctttccttcgttcccatggtaaagctcctctcgctttcctcctgaggctacacccatgcgtctctaggaactggtcacaaaagtcatggtgcctgcatccctgccaagcccccctgaccctctctccccactaccaccttcttcctgagctgggggcaccagggagaatcagagatgctggggatgccagagcaagactcaaagaggcagaggttttgttctcaaatattttttaataaatagacgaaaccacgaaa

SEQ ID NO: 153594 - DNA, 1368 bp, Homo sapiens
  Payload ID: 10208
  Gene Symbol: METTL7B
  Gene Name: methyltransferase like 7B
  ENST ID: ENST00000614691
  CDS Start-End: 78-908
ggacgccagcgcctgcagaggctgagcagggaaaaagccagtgccccagcggaagcacagctcagagctggtctgccatggacatcctggtcccactcctgcagctgctggtgctgcttcttaccctgcccctgcacctcatggctctgctgggctgctggcagcccctgtgcaaaagctacttcccctacctgatggccgtgctgactcccaagagcaaccgcaagatggagagcaagaaacgggagctcttcagccagataaaggggcttacaggagcctccgggaaagtggccctactggagctgggctgcggaaccggagccaactttcagttctacccaccgggctgcagggtcacctgcctagacccaaatccccactttgagaagttcctgacaaagagcatggctgagaacaggcacctccaatatgagcggtttgtggtggctcctggagaggacatgagacagctggctgatggctccatggatgtggtggtctgcactctggtgctgtgctctgtgcagagcccaaggaaggtcctgcaggaggtccggagagtactgagaccgggaggtgtgctctttttctgggagcatgtggcagaaccatatggaagctgggccttcatgtggcagcaagttttcgagcccacctggaaacacattggggatggctgctgcctcaccagagagacctggaaggatcttgagaacgcccagttctccgaaatccaaatggaacgacagccccctcccttgaagtggctacctgttgggccccacatcatgggaaaggctgtcaaatctttcccaagctccaaggcactcatttgctccttccccagcctccaattagaacaagccacccaccagcctatctatcttccactgagagggacctagcagaatgagagaagacattcatgtaccacctactagtccctctctccccaacctctgccagggcaatctctaacttcaatcccgccttcgacagtgaaaaagctctacttctacgctgacccagggaggaaacactaggaccctgttgtatcctcaactgcaagtttctggactagtctcccaacgtttgcctcccaatgttgtccctttccttcgttcccatggtaaagctcctctcgctttcctcctgaggctacacccatgcgtctctaggaactggtcacaaaagtcatggtgcctgcatccctgccaagcccccctgaccctctctccccactaccaccttcttcctgagctgggggcaccagggagaatcagagatgctggggatgccagagcaagactcaaagaggcagaggttttgttctcaaatattttttaataaatagacgaaaccacg

SEQ ID NO: 153595 - DNA, 8203 bp, Homo sapiens
  Payload ID: 10209
  Gene Symbol: METTL8
  Gene Name: methyltransferase like 8
  ENST ID: ENST00000375258
  CDS Start-End: 217-1353
gctgggcagagccctgggggcgcggtgctgccgcctccaggtctccgccccgtgtgtgcgccctgcacttagggatccctccctcactgccccggtactcacaagcttctcggccccgaccttcgccctgggaggttctggccaggtgccgggaggggcgctgtgtcgagggcgatccccccaaagcagcgtcccgtgctaaaggtactgcttaggatgaatatgatttggagaaattccatttcttgtctaaggctaggaaaggtgccacacagataccaaagtggttaccacccagtggcccctctgggatcaaggattttaactgacccagccaaagtttttgaacacaacatgtgggatcacatgcagtggtctaaggaagaagaagcagcagccagaaaaaaagtaaaagaaaactcagctgtgcgagtccttctggaagagcaagttaagtatgagagagaagctagtaaatactgggacacattttacaagattcataagaataagtttttcaaggatcgtaattggctgttgagggaatttcctgaaattcttccagttgatcaaaaacctgaagagaaggcgagagaatcatcatgggatcatgtaaaaactagtgctacaaatcgtttctcaagaatgcactgtcctactgtgcctgatgaaaaaaatcattatgagaaaagttctggttcttcagaaggtcaaagcaaaacagaatctgatttttccaacctagactctgaaaaacacaaaaaaggacctatggagactggattgtttcctggtagcaatgccactttcaggatactagaggttggttgtggagctggaaatagtgtgtttccaattttgaacactttggagaactctccggagtcctttctgtattgttgtgattttgcttctggagctgtggagctcgtaaagtcacactcgtcctacagagcaacccagtgttttgcctttgttcatgatgtatgtgatgatggcttaccttacccttttccagatgggatcctggatgtcattctccttgtctttgtgctctcttctattcatcctgacaggatgcaaggtgttgtaaaccgactgtccaagttactgaaacctgggggaatgctgttatttcgagactatggaagatatgataagactcagcttcgttttaaaaagggacattgtttatctgaaaatttttatgttcgaggagatggtaccagagcatatttctttacaaaaggggaagtccacagtatgttctgcaaagccagtttagatgaaaagcaaaatctggttgatcgccgcttacaagttaataggaaaaaacaagtgaaaatgcaccgagtgtggattcaaggcaaattccagaaaccattgcaccagactcagaatagctccaatatggtatctacactcctttcacaagactgaactttgtaacatgttaaggtacaaagccagaggactgtgctattcaaggactactgtaagtctattgtttctcaaaagacaatgagaaaaaaagaagagaatttgtatttcctgccgttttgtcataggtgagctcctttgtgcattttaagcacatgtaagtggttcagcacagtatgcctttttctgtgctttgaaaacttgatatgctcaagcttgtttgaatttattacatctaaccattttgcttgttccttgatttttataagcattcaattaagttagtattatgtcaagtaattttgagaaaatgtaacttgacattttttgcaagtaaaaaaaattgtttatttgtttaggcttagtaaaccagttcccaaacacagtcagactcttcccattgtcatctgattgcagagagaaagcacaccttatttccagggaaagctacaacaagcccaaggtcaaagtgtattattttttgtcttgttgttgtctattttctcccaatttttttttgaaattcagaggctcatatctgaaatagaattttagttcctctttcctttcctaaaattggggaagtacagcccatgctgacattattttcaggctattcttagatatacaagttgttaggccaggtgcaatggctcgcacctgtaatcccagcactttggggggctgaggcaggcagatcggttgagctcaggagttcaagaccagcctggacaacatggcaaaaccctgtctctcccaagaatacaaaaattagccaggcatggtggcacacacctgtggtcccagctactcaggagactgaggtgggaggatcgcttgagcctcggaggcggaggttgcagtgagctgagattgtaccactgcgctccaaactgggtgacatggtgagaccttgtctccaaaaaaaaaaaaaaaaaaaaaaaaggtatgtaagctgacaagctcttgtatcaagggcttttgaaccagagcaacttcatcttgaatagggactgtgtaaaatgaagctgagacctactaggctgcaatcccaggaggttaagacattcttagtcacaggatgagataggaagtcagtacaagatacaggtcatacagaccttgctgataaaacaggttgcagtgaagaagccggccaaatgccaccaaaaccaagatggcaatgagagtgtcctctggctgtcctcactgctacactcccaccagtgccatgatagtttacaaatgccatggcaacatcaggaagttacccatatggtctacaaaggggaggcctgaataatccaccccttgtgtagcatataatcaagaaataaccttaaaaatgggcaaccagtagcccttggggctgctctgcctatggagtagccattctttatgttttactttttttttttttttttttttgagatggagtcttgctctggcacccaggctggagtgcagtggcgtgatctcagctcactgccagctccacctcccgggttcacgccattctcttgcttcagcctcctgagtagctgggactacaagcacccaccaccatgcccagctaattttttttttttttgtatttttagtagagacggggtttcaccatgttagccaggatggtctcaatctcctgaccttgtgatccgcccgcctcggcctcccaaagtgctgggattacaggtgtgagccaccgcgcccagcctattctttacttaaacttgttttcactttgctgtatggactcaattctttcttgcacaagatccaagaatcctctcttggcgtctggatccagaccctttctggtatcagtggtaagctctgtttaagacaactgtcatacccaagagaattcttaaattgtggcagttaaaaatgtatttatcccctcgagggccgggcgcagtcgctcaagcccgtaatcccagcactttgggaggccgaggaggcggatcatgaggtcaggagttcaagaccagcctgaccaacactgtgaaaccctgtctctactaaaaatacaaaaaaaattagccaggcgtggtggtgggcacctgtaatcccagctactcgggaggctgaggcaggagaatcacttgaacccgggaggcagaggttgcagtgagccgagatgacaccactgccctccagcctgggtgacagttgttagactgcgtatcaaaaaaaaaaaaaaaaatttatttactcccttgcttcaaaaaggacataagttggcttgcaaatcacattttgtagaaatgaagtttttaagattagtctcatactcattacataatatttattgactacttacatattgagtgctaaattcagtggaataatatgaacaataaagacccagccttgtttatgctcttcagggagcataaatagagtacagctggcaaaacaaaatgtgcatatcccaaacctgtaaatcatgatctaagacaatatacaaacactcaaatagggaacttaccagctagcagactttgattatgaaccacagaacctagaataaataaatactctcttgaaagaaccatcattggaataattaagttccaactgttttttctttctgaattcacttaaaatccaatttctagaagaatatcattggtccagctttagtcattggttcatctcttaacaggctggggcagggcagcttaattgatgatgccaccagaatgggcaacatgggaaaaaccctatctctaccaaaaatacaaaaattagccagtgatggtggcacgcacctgttgtcccagctactcaggaggctgagctgggaggatcttttgagcctgggaggcagaggttgcagtgagctgagatcgcaccactgcactccaacctggagtggaaggaaatttcacttcctggaatggaagaaagttcttcaaaggaaaatcaagacactgctgtcaaaaaacaccaggggagggatgctgtccagtcacagccaacacatcatatagcagtggtagcagtagtaatagtatttccagagagagagagagagattagctctgaaaaagaatggagaagaatcaggtttcttgggggaggtaggtctcaggctagttcttgaatgtacattctcagcagatggtgagaagacaagtgtggtgtgggacattaatgatgagggataggtagaaaagatgggaagggggtcagcttgtagataacctagactagcaggtgtatgacttctagtctctgaactggagccatctgagatcagtttgagatatggtgtcttataaatgtattgagagaggttgaggagttgtctatagaatggaatggagtgaggtcagagatcagtggcaaggaagaccacataaaggtttttgcacaaacttgccttgatggcaagtcctcaaaagtacaattatcaagctttctgtttaaacatgcataagtcagtaaatataaacattaaaatttgcccaagactcttaactcagttgtatttcataattaaagtgtacattaaaaagccaaactagtcatgaaagtattacatacagcaagggcagtttagataagttaatgttgctatgggaaccccagcagatctccttgtgtctccgtttaaaaatcatggcccaaggtggtttcaaaaacaacagaaggtaaaattattctcacattctcacacatgtaaattgtactgtctctctcagttctaaatagcggattcaagccagcctcttgactggcacagtaaaattcggcttcgtgtctttctataatgtattacagcatgtgagttaacctttagaagcttcaaaaatacatcaaccaaatttggactgtgagacacaaactggtctcttttgggctctgtccagcatagccttcctattccacatggctgcgcagcagggccatttccaccagtgtcttctgcttgcctggtcagtctttctgtctcttaacctacctacaacaacttccttctcggggtttgctgctagatagaaatgtagattttggcacagaaagaaaagggaaagacctatttggaattttgtctatagatgttaagaaatcatgaagcgttgcaaatgtaactgcttgggtattagtttaaaatatttgataactgcatgaaattctaatttacccctcacatccataaagctaggaccagttggttaggcagagtttgatatttaaaaattcatcttctgagagagctgaatttcaaaaggaccattttctttccaggagtaaaaggtatattctttcatcttcttacagtacagaaacaatggaatatattgtttaaatgcacccttcatttttttctccatttctaaaaattcacttttgagcatcgtccaaatgtaaaaattctcacacatgaggaactgtttccgaaggttgtgagaaagtcaagataacagtttctattattaaaagttttgcattcggtatgacacatttgcctgtattgaaacacccatttaacattgacttctgagaacttatttgctttgcctctctcgattccatatgctttgtctacaaattgtgaacacgtcccggtttctacccgtgtgtgattctaagtcgttgctgtactctagcttgtacgtgaaaattcacccatatgcagatagctgccctcttggaggcaaaacttaaagctatcagaaccatctggattgttaaaccccaaaacttccaactcatcaaagtcctgaagcctgaatagatcacacattgttacttctaattggttttgatgtttgttatgctcctcacaagtgcagataacttcacatttgcatcactaatcgacctctttcaaagcctctgctcctcctgcttcctgcctctgttagtcatcaggagacttagtgttggcgtgggtattttccccgcttgtgaaagtgcattgtcaattctagagcattaaatatatgtgaggtattgttattaatctacaaggcagtacacacagtattccagcaacagtgactttttcaaaggttttatgagacattgtaagaaagacagtatctttccatggaaaaaagtgttgcctcagagtcaaacaggaagcatgggtcctagttcctattgaactgcttagctactcttaatttagctctgaatgctagattttgtgtatactatacacattatttaatcctcaaactcctaggaattcattttgatgataaccatttacagaagagatgttgggtaacttgctcaggataccacatctagtaagtagcagagtcacaactcggacccagaactctctgattccaaaacctctacttgctgctcttgtaatggatgggcccaaatgctgctgggaaaggcaccagggaagaaagagctttctgagtcaagcagaaaacgatagcagtggagaggagtttgtttcagacgaccttcaaggttatggctcattctagatccaatcattctagcaaataagtaggttacacttgtccacaattacaaattggaaaagaagagaaggaaaggaactgagaggaatgacaaagcaaaaagctttcaatcagttcttttcagcattctgcttctgcctagttctgcactcgccccaccccctcaggcttcagccttccacttggcatccctcctcgcagagcactctcacttgcatactcctcgcttaaagaaaaaaagcattctgtactgcagtggggaaaaaaaacccttaaaatgtcttcaaaaggattcagctctagggtaatgtaaaatatgtgaaatcaggaggtgtccataataaaatatgagtgaaaacatcgttatttaaaacattgtatgtacattaatgccacattaataccaattcaggcatgaaatgttgagcatttcttggaatacggtttcttggaatatggttggggatttgagaggcgcaaaggtacccgcaagatggctttggtgtagttataaatataaatagaagtaaaataacagttgcatcttcatttataatgaatctatattgtggcctcaaagctacagagaaaagtggatgccaaaatctgtctttcattaacatatgtcttaaatgacaaggaagaggtgttgaagataaaattactttttcctatgagtatgaatcagcaacatgcagtaacaagcaagtaataatagttctgcgtgtgagtgcctacagagggtaagaaaaatagcatcagattgaaaaagcaagtgcacctgcagaagggacccaggaggctgcagagcacagctcccttgagcatcatctcaaagtgtctcagagcacagtgaccctaattctggcaagtcaggttggcatgagatggatggagcacactgaaatctccagatggtcagacagcccaccctcagctgcccctggagctcggcaaaggcaagctacaaggcactgctacttggccaagagtttaaaacaacagcttctgattctacagtgtctgtggtttcacaaccacttaaccttaagtaaggaacagctagagttagctgaatgaataaatacacgttaacgttacataaagagggaaaaaaagcaatacttgagcacatagacttcaaatagtgtccagctagctgtgtccttggcatcccagtgatctgggtctttatctttgattttctccagcaggtaggcactgagtagatccagggcccagggcgggaaatgcttctgtatcagatgttacctatcaaataaaatgagcctttgattgcc

SEQ ID NO: 153596 - DNA, 828 bp, Homo sapiens
  Payload ID: 10209
  Gene Symbol: METTL8
  Gene Name: methyltransferase like 8
  ENST ID: ENST00000392599
  CDS Start-End: 149-828
ttagggatccctccctcactgccccggtactcacaagcttctcggccccgaccttcgccctgggaggttctggccaggtgccgggaggggcgctgtgtcgagggcgatccccccaaagcagcgtcccgtgctaaaggtactgcttaggatgaatatgatttggagaaattccatttcttgtctaaggctaggaaaggtgccacacagataccaaagtggttaccacccagtggcccctctgggatcaaggattttaactgacccagccaaagtttttgaacacaacatgtgggatcacatgcagtggtctaaggaagaagaagcagcagccagaaaaaaagtaaaagaaaactcagctgtgcgagtccttctggaagagcaagttaagtatgagagagaagctagtaaatactgggacacattttacaagattcataagaataagtttttcaaggatcgtaattggctgttgagggaatttcctgaaattcttccagttgatcaaaaacctgaagagaaggcgagagaatcatcatgggatcatgtaaaaactagtgctacaaatcgtttctcaagaatgcactgtcctactgtgcctgatgaaaaaaatcattatgagaaaagttctggttcttcagaaggtcaaagcaaaacagaatctgatttttccaacctagactctgaaaaacacaaaaaaggacctatggagactggattgtttcctggtagcaatgccactttcaggatactagagtcacactcgtcctacagagcaacccagtgttttgcctttgttcatgatgtatgtgatgatggcttaccttaccc

SEQ ID NO: 153597 - DNA, 1697 bp, Homo sapiens
  Payload ID: 10209
  Gene Symbol: METTL8
  Gene Name: methyltransferase like 8
  Uniprot ID: Q9H825
  ENST ID: ENST00000392604
  CDS Start-End: 342-1217
agctgggcagagccctgggggcgcggtgctgccgcctccaggtctccgccccgtgtgtgcgccctgcacttagggatccctccctcactgccccggtactcacaagcttctcggccccgaccttcgccctgggaggttctggccaggtgccgggaggggcgctgtgtcgagggcgatccccccaaagcagcgtcccgtgctaaagaaacagagcctcactctgtcacctaggctggagtgcagtggtgcaattatggctcactgcagtttcaacctcccagattccagtcatcctcctgcctcagccacccaagaagctgggaccacaggtactgcttaggatgaatatgatttggagaaattccatttcttgtctaaggctaggaaaggtgccacacagataccaaagtggttaccacccagtggcccctctgggatcaaggattttaactgacccagccaaagtttttgaacacaacatgtgggatcacatgcagtggtctaaggaagaagaagcagcagccagaaaaaaagtaaaagaaaactcagctgtgcgagtccttctggaagagcaagttaagtatgagagagaagctagtaaatactgggacacattttacaagattcataagaataagtttttcaaggatcgtaattggctgttgagggaatttcctgaaattcttccagttgatcaaaaacctgaagagaaggcgagagaatcatcatgggatcatgtaaaaactagtgctacaaatcgtttctcaagaatgcactgtcctactgtgcctgatgaaaaaaatcattatgagaaaagttctggttcttcagaaggtcaaagcaaaacagaatctgatttttccaacctagactctgaaaaacacaaaaaaggacctatggagactggattgtttcctggtagcaatgccactttcaggatactagaggttggttgtggagctggaaatagtgtgtttccaattttgaacactttggagaactctccggagtcctttctgtattgttgtgattttgcttctggagctgtggagctcgtaaagtcacactcgtcctacagagcaacccagtgttttgcctttgttcatgatgtatgtgatgatggcttaccttacccttttccagatgggatcctggatgtcattctccttgtctttgtgctctcttctattcatcctgacaggacattgtttatctgaaaatttttatgttcgaggagatggtaccagagcatatttctttacaaaaggggaagtccacagtatgttctgcaaagccagtttagatgaaaagcaaaatctggttgatcgccgcttacaagttaataggaaaaaacaagtgaaaatgcaccgagtgtggattcaaggcaaattccagaaaccattgcaccagactcagaatagctccaatatggtatctacactcctttcacaagactgaactttgtaacatgttaaggtacaaagccagaggactgtgctattcaaggactactgtaagtctattgtttctcaaaagacaatgagaaaaaaagaagagaatttgtatttcctgccgttttgtcataggtgagctcctttgtgcattttaagcacatgtaagtggttcagcacagtatgcctttttctgtgctttgaaaacttgatatgctcaagcttgtttgaatttattacatctaa

SEQ ID NO: 153598 - DNA, 578 bp, Homo sapiens
  Payload ID: 10209
  Gene Symbol: METTL8
  Gene Name: methyltransferase like 8
  ENST ID: ENST00000442778
  CDS Start-End: 120-578
aaaaccgcatccccgcaggaggctcggccgccgcgcgcccgcggccctccgtcccgccccggccggctggcggtcacctggcacaccagcgcccgcaggatgcccaggtactgcttaggatgaatatgatttggagaaattccatttcttgtctaaggctaggaaaggtgccacacagataccaaagtggttaccacccagtggcccctctgggatcaaggattttaactgacccagccaaagtttttgaacacaacatgtgggatcacatgcagtggtctaaggaagaagaagcagcagccagaaaaaaagtaaaagaaaactcagctgtgcgagtccttctggaagagcaagttaagtatgagagagaagctagtaaatactgggacacattttacaagattcataagaataagtttttcaaggatcgtaattggctgttgagggaatttcctgaaattcttccagttgatcaaaaacctgaagagaaggcgagagaatcatcatgggatcatgtaaaaactagtgctacaaatcgtttctcaagaatgcactgtcctactgtgcctgatgaaaaa

SEQ ID NO: 153599 - DNA, 981 bp, Homo sapiens
  Payload ID: 10209
  Gene Symbol: METTL8
  Gene Name: methyltransferase like 8
  ENST ID: ENST00000438609
  CDS Start-End: 1-643
tgaaaaacacaaaaaaggacctatggagactggattgtttcctggtagcaatgccactttcaggatactagaggttggttgtggagctggaaatagtgtgtttccaattttgaacactttggagaactctccggagtcctttctgtattgttgtgattttgcttctggagctgtggagctcgtaaaggtatgctactcctgggaatcataccaactgatgcctaagtcacactcgtcctacagagcaacccagtgttttgcctttgttcatgatgtatgtgatgatggcttaccttacccttttccagatgggatcctggatgtcattctccttgtctttgtgctctcttctattcatcctgacaggatgcaaggtgttgtaaaccgactgtccaagttactgaaacctgggggaatgctgttatttcgagactatggaagatatgataagactcagcttcgttttaaaaagggacattgtttatctgaaaatttttatgttcgaggagatggtaccagagcatatttctttacaaaaggggaagtccacagtatgttctgcaaagccagtttagatgaaaagcaaaatctggttgatcgccgcttacaagttaataggaaaaaacaagtgaaaatgcaccgagtgtggattcaaggcaaattccagaaaccattgcaccagactcagaatagctccaatatggtatctacactcctttcacaagactgaactttgtaacatgttaaggtacaaagccagaggactgtgctattcaaggactactgtaagtctattgtttctcaaaagacaatgagaaaaaaagaagagaatttgtatttcctgccgttttgtcataggtgagctcctttgtgcattttaagcacatgtaagtggttcagcacagtatgcctttttctgtgctttgaaaacttgatatgctcaagcttgtttgaatttattacatctaaccattttgcttg

SEQ ID NO: 153600 - DNA, 2246 bp, Homo sapiens
  Payload ID: 10209
  Gene Symbol: METTL8
  Gene Name: methyltransferase like 8
  Uniprot ID: Q9H825
  ENST ID: ENST00000447486
  CDS Start-End: 359-1084
cttctctgtgctgcgagtggctagctgggcagagccctgggggcgcggtgctgccgcctccaggtctccgccccgtgtgtgcgccctgcacttagggatccctccctcactgccccggtactcacaagcttctcggccccgaccttcgccctgggaggttctggccaggtgccgggaggggcgctgtgtcgagggcgatccccccaaagcagcgtcccgtgctaaagaaacagagcctcactctgtcacctaggctggagtgcagtggtgcaattatggctcactgcagtttcaacctcccagattccagtcatcctcctgcctcagccacccaagaagctgggaccacagggatcacatgcagtggtctaaggaagaagaagcagcagccagaaaaaaagtaaaagaaaactcagctgtgcgagtccttctggaagagcaagttaagtatgagagagaagctagtaaatactgggacacattttacaagattcataagaataagtttttcaaggatcgtaattggctgttgagggaatttcctgaaattcttccagttgatcaaaaacctgaagagaaggcgagagaatcatcatgggatcatgtaaaaactagtgctacaaatcgtttctcaagaatgcactgtcctactgtgcctgatgaaaaaaatcattatgagaaaagttctggttcttcagaaggtcaaagcaaaacagaatctgatttttccaacctagactctgaaaaacacaaaaaaggacctatggagactggattgtttcctggtagcaatgccactttcaggatactagaggttggttgtggagctggaaatagtgtgtttccaattttgaacactttggagaactctccggagtcctttctgtattgttgtgattttgcttctggagctgtggagctcgtaaagtcacactcgtcctacagagcaacccagtgttttgcctttgttcatgatgtatgtgatgatggcttaccttacccttttccagatgggatcctggatgtcattctccttgtctttgtgctctcttctattcatcctgacaggacattgtttatctgaaaatttttatgttcgaggagatggtaccagagcatatttctttacaaaaggggaagtccacagtatgttctgcaaagccagtttagatgaaaagcaaaatctggttgatcgccgcttacaagttaataggaaaaaacaagtgaaaatgcaccgagtgtggattcaaggcaaattccagaaaccattgcaccagactcagaatagctccaatatggtatctacactcctttcacaagactgaactttgtaacatgttaaggtacaaagccagaggactgtgctattcaaggactactgtaagtctattgtttctcaaaagacaatgagaaaaaaagaagagaatttgtatttcctgccgttttgtcataggtgagctcctttgtgcattttaagcacatgtaagtggttcagcacagtatgcctttttctgtgctttgaaaacttgatatgctcaagcttgtttgaatttattacatctaaccattttgcttgttccttgatttttataagcattcaattaagttagtattatgtcaagtaattttgagaaaatgtaacttgacattttttgcaagtaaaaaaaattgtttatttgtttaggcttagtaaaccagttcccaaacacagtcagactcttcccattgtcatctgattgcagagagaaagcacaccttatttccagggaaagctacaacaagcccaaggtcaaagtgtattattttttgtcttgttgttgtctattttctcccaatttttttttgaaattcagaggctcatatctgaaatagaattttagttcctctttcctttcctaaaattggggaagtacagcccatgctgacattattttcaggctattcttagatatacaagttgttaggccaggtgcaatggctcgcacctgtaatcccagcactttggggggctgaggcaggcagatcggttgagctcaggagttcaagaccagcctggacaacatggcaaaaccctgtctctcccaagaatacaaaaattagccaggcatggtggcacacacctgtggtcccagctactcaggagactgaggtgggaggatcgcttgagcctcggaggcggaggttgcagtgagctgagattgtaccactgcgctccaaactgggtgacatggtgagaccttgtctcc

SEQ ID NO: 153601 - DNA, 558 bp, Homo sapiens
  Payload ID: 10209
  Gene Symbol: METTL8
  Gene Name: methyltransferase like 8
  ENST ID: ENST00000453846
  CDS Start-End: 244-558
aaaaccgcatccccgcaggaggctcggccgccgcgcgcccgcggccctccgtcccgccccggccggctggcggtcacctggcacaccagcgcccgcaggatgcccagaaacagagcctcactctgtcacctaggctggagtgcagtggtgcaattatggctcactgcagtttcaacctcccagattccagtcatcctcctgcctcagccacccaagaagctgggaccacaggtactgcttaggatgaatatgatttggagaaattccatttcttgtctaaggctaggaaaggtgccacacagataccaaagtggttaccacccagtggcccctctgggatcaaggattttaactgacccagccaaagtttttgaacacaacatgtgggatcacatgcagtggtctaaggaagaagaagcagcagccagaaaaaaagtaaaagaaaactcagctgtgcgagtccttctggaagagcaagttaagtatgagagagaagctagtaaatactgggacacattttacaagattcataagaataagtttttcaaggatcgtaat

SEQ ID NO: 153602 - DNA, 563 bp, Homo sapiens
  Payload ID: 10209
  Gene Symbol: METTL8
  Gene Name: methyltransferase like 8
  ENST ID: ENST00000442541
  CDS Start-End: 315-563
actcacaagcttctcggccccgaccttcgccctgggaggttctggccaggtgccgggaggggcgctgtgtcgagggcgatccccccaaagcagcgtcccgtgctaaaggtaccccagggtactgcctcccacatctcagtgcaggctggatgaattggccttgtctgtgtttcctgtctgagtgtgagtgtgagtgctccctgcgatggaatgtcgtcgtgtccaagggttggttcccaccttgcaccctgagctgaggggataggcttcagccaccctcgaccctgaactggaataattaggtactgcttaggatgaatatgatttggagaaattccatttcttgtctaaggctaggaaaggtgccacacagataccaaagtggttaccacccagtggcccctctgggatcaaggattttaactgacccagccaaagtttttgaacacaacatgtgggatcacatgcagtggtctaaggaagaagaagcagcagccagaaaaaaagtaaaagaaaactcagctgtgcgagtccttctggaagagcaagttaagtatgagaga

SEQ ID NO: 153603 - DNA, 8132 bp, Homo sapiens
  Payload ID: 10209
  Gene Symbol: METTL8
  Gene Name: methyltransferase like 8
  ENST ID: ENST00000612742
  CDS Start-End: 142-1365
taaagggaggccccagcgcgttaaaaccgcatccccgcaggaggctcggccgccgcgcgcccgcggccctccgtcccgccccggccggctggcggtcacctggcacaccagcgcccgcaggatgcccaggtactgcttaggatgaatatgatttggagaaattccatttcttgtctaaggctaggaaaggtgccacacagataccaaagtggttaccacccagtggcccctctgggatcaaggattttaactgacccagccaaagtttttgaacacaacatgtgggatcacatgcagtggtctaaggaagaagaagcagcagccagaaaaaaagtaaaagaaaactcagctgtgcgagtccttctggaagagcaagttaagtatgagagagaagctagtaaatactgggacacattttacaagattcataagaataagtttttcaaggatcgtaattggctgttgagggaatttcctgaaattcttccagttgatcaaaaacctgaagagaaggcgagagaatcatcatgggatcatgtaaaaactagtgctacaaatcgtttctcaagaatgcactgtcctactgtgcctgatgaaaaaaatcattatgagaaaagttctggttcttcagaaggtcaaagcaaaacagaatctgatttttccaacctagactctgaaaaacacaaaaaaggacctatggagactggattgtttcctggtagcaatgccactttcaggatactagaggttggttgtggagctggaaatagtgtgtttccaattttgaacactttggagaactctccggagtcctttctgtattgttgtgattttgcttctggagctgtggagctcgtaaagtcacactcgtcctacagagcaacccagtgttttgcctttgttcatgatgtatgtgatgatggcttaccttacccttttccagatgggatcctggatgtcattctccttgtctttgtgctctcttctattcatcctgacaggatgcaaggtgttgtaaaccgactgtccaagttactgaaacctgggggaatgctgttatttcgagactatggaagatatgataagactcagcttcgttttaaaaagggacattgtttatctgaaaatttttatgttcgaggagatggtaccagagcatatttctttacaaaaggggaagtccacagtatgttctgcaaagccagtttagatgaaaagcaaaatctggttgatcgccgcttacaagttaataggaaaaaacaagtgaaaatgcaccgagtgtggattcaaggcaaattccagaaaccattgcaccagactcagaatagctccaatatggtatctacactcctttcacaagactgaactttgtaacatgttaaggtacaaagccagaggactgtgctattcaaggactactgtaagtctattgtttctcaaaagacaatgagaaaaaaagaagagaatttgtatttcctgccgttttgtcataggtgagctcctttgtgcattttaagcacatgtaagtggttcagcacagtatgcctttttctgtgctttgaaaacttgatatgctcaagcttgtttgaatttattacatctaaccattttgcttgttccttgatttttataagcattcaattaagttagtattatgtcaagtaattttgagaaaatgtaacttgacattttttgcaagtaaaaaaaattgtttatttgtttaggcttagtaaaccagttcccaaacacagtcagactcttcccattgtcatctgattgcagagagaaagcacaccttatttccagggaaagctacaacaagcccaaggtcaaagtgtattattttttgtcttgttgttgtctattttctcccaatttttttttgaaattcagaggctcatatctgaaatagaattttagttcctctttcctttcctaaaattggggaagtacagcccatgctgacattattttcaggctattcttagatatacaagttgttaggccaggtgcaatggctcgcacctgtaatcccagcactttggggggctgaggcaggcagatcggttgagctcaggagttcaagaccagcctggacaacatggcaaaaccctgtctctcccaagaatacaaaaattagccaggcatggtggcacacacctgtggtcccagctactcaggagactgaggtgggaggatcgcttgagcctcggaggcggaggttgcagtgagctgagattgtaccactgcgctccaaactgggtgacatggtgagaccttgtctccaaaaaaaaaaaaaaaaaaaaaaaaggtatgtaagctgacaagctcttgtatcaagggcttttgaaccagagcaacttcatcttgaatagggactgtgtaaaatgaagctgagacctactaggctgcaatcccaggaggttaagacattcttagtcacaggatgagataggaagtcagtacaagatacaggtcatacagaccttgctgataaaacaggttgcagtgaagaagccggccaaatgccaccaaaaccaagatggcaatgagagtgtcctctggctgtcctcactgctacactcccaccagtgccatgatagtttacaaatgccatggcaacatcaggaagttacccatatggtctacaaaggggaggcctgaataatccaccccttgtgtagcatataatcaagaaataaccttaaaaatgggcaaccagtagcccttggggctgctctgcctatggagtagccattctttatgttttactttttttttttttttttttttgagatggagtcttgctctggcacccaggctggagtgcagtggcgtgatctcagctcactgccagctccacctcccgggttcacgccattctcttgcttcagcctcctgagtagctgggactacaagcacccaccaccatgcccagctaattttttttttttttgtatttttagtagagacggggtttcaccatgttagccaggatggtctcaatctcctgaccttgtgatccgcccgcctcggcctcccaaagtgctgggattacaggtgtgagccaccgcgcccagcctattctttacttaaacttgttttcactttgctgtatggactcaattctttcttgcacaagatccaagaatcctctcttggcgtctggatccagaccctttctggtatcagtggtaagctctgtttaagacaactgtcatacccaagagaattcttaaattgtggcagttaaaaatgtatttatcccctcgagggccgggcgcagtcgctcaagcccgtaatcccagcactttgggaggccgaggaggcggatcatgaggtcaggagttcaagaccagcctgaccaacactgtgaaaccctgtctctactaaaaatacaaaaaaaattagccaggcgtggtggtgggcacctgtaatcccagctactcgggaggctgaggcaggagaatcacttgaacccgggaggcagaggttgcagtgagccgagatgacaccactgccctccagcctgggtgacagttgttagactgcgtatcaaaaaaaaaaaaaaaaatttatttactcccttgcttcaaaaaggacataagttggcttgcaaatcacattttgtagaaatgaagtttttaagattagtctcatactcattacataatatttattgactacttacatattgagtgctaaattcagtggaataatatgaacaataaagacccagccttgtttatgctcttcagggagcataaatagagtacagctggcaaaacaaaatgtgcatatcccaaacctgtaaatcatgatctaagacaatatacaaacactcaaatagggaacttaccagctagcagactttgattatgaaccacagaacctagaataaataaatactctcttgaaagaaccatcattggaataattaagttccaactgttttttctttctgaattcacttaaaatccaatttctagaagaatatcattggtccagctttagtcattggttcatctcttaacaggctggggcagggcagcttaattgatgatgccaccagaatgggcaacatgggaaaaaccctatctctaccaaaaatacaaaaattagccagtgatggtggcacgcacctgttgtcccagctactcaggaggctgagctgggaggatcttttgagcctgggaggcagaggttgcagtgagctgagatcgcaccactgcactccaacctggagtggaaggaaatttcacttcctggaatggaagaaagttcttcaaaggaaaatcaagacactgctgtcaaaaaacaccaggggagggatgctgtccagtcacagccaacacatcatatagcagtggtagcagtagtaatagtatttccagagagagagagagagattagctctgaaaaagaatggagaagaatcaggtttcttgggggaggtaggtctcaggctagttcttgaatgtacattctcagcagatggtgagaagacaagtgtggtgtgggacattaatgatgagggataggtagaaaagatgggaagggggtcagcttgtagataacctagactagcaggtgtatgacttctagtctctgaactggagccatctgagatcagtttgagatatggtgtcttataaatgtattgagagaggttgaggagttgtctatagaatggaatggagtgaggtcagagatcagtggcaaggaagaccacataaaggtttttgcacaaacttgccttgatggcaagtcctcaaaagtacaattatcaagctttctgtttaaacatgcataagtcagtaaatataaacattaaaatttgcccaagactcttaactcagttgtatttcataattaaagtgtacattaaaaagccaaactagtcatgaaagtattacatacagcaagggcagtttagataagttaatgttgctatgggaaccccagcagatctccttgtgtctccgtttaaaaatcatggcccaaggtggtttcaaaaacaacagaaggtaaaattattctcacattctcacacatgtaaattgtactgtctctctcagttctaaatagcggattcaagccagcctcttgactggcacagtaaaattcggcttcgtgtctttctataatgtattacagcatgtgagttaacctttagaagcttcaaaaatacatcaaccaaatttggactgtgagacacaaactggtctcttttgggctctgtccagcatagccttcctattccacatggctgcgcagcagggccatttccaccagtgtcttctgcttgcctggtcagtctttctgtctcttaacctacctacaacaacttccttctcggggtttgctgctagatagaaatgtagattttggcacagaaagaaaagggaaagacctatttggaattttgtctatagatgttaagaaatcatgaagcgttgcaaatgtaactgcttgggtattagtttaaaatatttgataactgcatgaaattctaatttacccctcacatccataaagctaggaccagttggttaggcagagtttgatatttaaaaattcatcttctgagagagctgaatttcaaaaggaccattttctttccaggagtaaaaggtatattctttcatcttcttacagtacagaaacaatggaatatattgtttaaatgcacccttcatttttttctccatttctaaaaattcacttttgagcatcgtccaaatgtaaaaattctcacacatgaggaactgtttccgaaggttgtgagaaagtcaagataacagtttctattattaaaagttttgcattcggtatgacacatttgcctgtattgaaacacccatttaacattgacttctgagaacttatttgctttgcctctctcgattccatatgctttgtctacaaattgtgaacacgtcccggtttctacccgtgtgtgattctaagtcgttgctgtactctagcttgtacgtgaaaattcacccatatgcagatagctgccctcttggaggcaaaacttaaagctatcagaaccatctggattgttaaaccccaaaacttccaactcatcaaagtcctgaagcctgaatagatcacacattgttacttctaattggttttgatgtttgttatgctcctcacaagtgcagataacttcacatttgcatcactaatcgacctctttcaaagcctctgctcctcctgcttcctgcctctgttagtcatcaggagacttagtgttggcgtgggtattttccccgcttgtgaaagtgcattgtcaattctagagcattaaatatatgtgaggtattgttattaatctacaaggcagtacacacagtattccagcaacagtgactttttcaaaggttttatgagacattgtaagaaagacagtatctttccatggaaaaaagtgttgcctcagagtcaaacaggaagcatgggtcctagttcctattgaactgcttagctactcttaatttagctctgaatgctagattttgtgtatactatacacattatttaatcctcaaactcctaggaattcattttgatgataaccatttacagaagagatgttgggtaacttgctcaggataccacatctagtaagtagcagagtcacaactcggacccagaactctctgattccaaaacctctacttgctgctcttgtaatggatgggcccaaatgctgctgggaaaggcaccagggaagaaagagctttctgagtcaagcagaaaacgatagcagtggagaggagtttgtttcagacgaccttcaaggttatggctcattctagatccaatcattctagcaaataagtaggttacacttgtccacaattacaaattggaaaagaagagaaggaaaggaactgagaggaatgacaaagcaaaaagctttcaatcagttcttttcagcattctgcttctgcctagttctgcactcgccccaccccctcaggcttcagccttccacttggcatccctcctcgcagagcactctcacttgcatactcctcgcttaaagaaaaaaagcattctgtactgcagtggggaaaaaaaacccttaaaatgtcttcaaaaggattcagctctagggtaatgtaaaatatgtgaaatcaggaggtgtccataataaaatatgagtgaaaacatcgttatttaaaacattgtatgtacattaatgccacattaataccaattcaggcatgaaatgttgagcatttcttggaatacggtttcttggaatatggttggggatttgagaggcgcaaaggtacccgcaagatggctttggtgtagttataaatataaatagaagtaaaataacagttgcatcttcatttataatgaatctatattgtggcctcaaagctacagagaaaagtggatgccaaaatctgtctttcattaacatatgtcttaaatgacaaggaagaggtgttgaagataaaattactttttcctatgagtatgaatcagcaacatgcagtaacaagcaagtaataatagttctgcgtgtgagtgcctacagagggtaagaaaaatagcatcagattgaaaaagcaagtgcacctgcagaagggacccaggaggctgcagagcacagctcccttgagcatcatctcaaagtgtctcagagcacagtgaccctaattctggcaagtcaggttggcatgagatggatggagcacactgaaatctccagatggtcagacagcccaccctcagctgcccctggagctcggcaaaggcaagctacaaggcactgctacttggccaagagtttaaaacaacagcttctgattctacagtgtctgtggtttcacaaccacttaaccttaagtaaggaacagctagagttagctgaatgaataaatacacgttaacgttacataaagagggaaaaaaagcaatacttgagcacatagacttcaaatagtgtccagctagctgtgtccttggcatcccagtgatctgggtctttatctttgattttctccagcaggtaggcactgagtagatccagggcccagggcgggaaatgcttctgtatcagatgttacctatcaaataaaatgagcctttgattgcctcct

SEQ ID NO: 153604 - DNA, 3256 bp, Homo sapiens
  Payload ID: 10210
  Gene Symbol: METTL9
  Gene Name: methyltransferase like 9
  Uniprot ID: Q9H1A3
  ENST ID: ENST00000358154
  CDS Start-End: 259-1215
ggccgctcgtaagtgctccggatggaaactggtgcagggggcagcggcgttccgcggccggaagggaagggggaggtgccgaggctgcgcgccggctgctcctccccacccccagcctttgccctgaagggggctggatgggcaaggcggccgcgatggctcgagctcgggcggtggcggcggtggccggaggcggcggtgcctcctcctcctcgccccggcgccggcggtgatccgagcgagcggccgcggcccccgatgagactgctggcgggctggctgtgcctgagcctggcgtccgtgtggctggcgcggaggatgtggacgctgcggagcccgctcacccgctccctgtacgtgaacatgactagcggcccgggtgggccggcggcggccgcgggcggcaggaaggagaaccaccagtggtatgtgtgcaacagagagaaattatgcgaatcactccaggctgtctttgttcagagttaccttgatcaaggaacacagatcttcttaaacaacagcattgagaaatcgggctggctatttatccaattatatcattcttttgtgtcatctgtttttagcctgtttatgtctagaacatctatcaatgggttgctaggaagaggctcaatgtttgtgttttcaccagatcagtttcagagactgcttaaaattaatccagactggaaaacccacagacttcttgatttaggtgctggagatggagaagtcacaaaaatcatgagccctcattttgaagaaatctatgccactgagctttctgaaactatgatatggcagcttcagaaaaagaaatacagagtccttggtataaatgaatggcagaatacggggttccagtatgatgtcatcagctgcctgaacttgctggaccgctgtgatcagcccctgactttgttaaaagatatcagaagtgtcttggagccaactagaggcagggtcatccttgcccttgtcctcccctttcatccctatgtggaaaacgtaggtggcaagtgggagaaaccatcagaaattttggaaatcaaaggacagaactgggaagaacaagtgaatagtctgcctgaagttttcagaaaagctggttttgttatcgaagctttcaccagactaccatacctgtgtgaaggcgacatgtataatgactactacgttctggatgacgctgtctttgttctcaaaccagtataaacacgtggaggtcgaagtcttcagagtccgcaccctccgggatgtgcccttggaagagggtctgtgttcacaattacgtgaagggaggacccttggggaccgccattctaaatatcatgtaggaatttaaaaagccaaaatactaattatttctttgtagtgtgtaaaggaatgtttttaaaagacaaaaacccaactctttgtggatttttatcaactctttactcagagccactctccaatgcaggtcacactccaattatgatggaagatattttttatacttaattgcagtagggactcattcccagacaaagcaatagtcacgacttcatggaaccaatcaatggattgttttttgaagactggcaataaagctgtccattcaattccaaatactggttttaaggtatagccactgatattctttcatgtttagaaattctttctgttattattcaagaaaatgtttttaatcatgctaataaacttttttggagatgactttggcatcatgtttgaattcatataaagctcccctagcattttttattggtttggcttcaggagtacccaaatagtagcattatgagaatgacgcagacaatttgaataggggggaaggaaggcttcagacttgggggaaggggagattattgcaaattgcagtgaacactgagtcagtaaaaaaaaaaaacagaaacaaaaacccagcctcattcagatacagaacttcagggacccctccccccacccccccagttaatgctgctgtgaaaaatgcaaaataacctggttctgactttgtgatcactcatgtcccatacactgaactttgtttttttctggacaatctcaggttctcagaattgaaacattcagttttgtctactgacaaaatgcaactaaaaatgttttaattcaacttcttactctacacttatatacctctctcccagagcttggctcttccctgaaatccttaaaggagtttattatttgccaagaatatggtttgatgaagaccgtgtcagactcatgcattctggaatccgtgagtgcctccaaccataaacccagaaatgctgccatagaggaacccattagcaagatcaataaccatcgtggatattccaaagagcagagcatttaacccagaatctgaaatctcagtaataacagaaatgtcaatatgagattgtggttattaacaatatgttatcctcactactttatttcttttttcatccaggtgtttcattaagtattctcatttatatgctcatagaagtcatcagatcaacacattcactccaacacctgggtataaaggcgaattaaaacctgaagaattactttattattcattaagaactgcattcccacatcctcacaccaatatcttccactgttactgtgcagtcataataagagttgggttatgtgatttatgcaaaattgttattggtgtgttctaatgatttttttccaggaattcaagtaagtgaagtacaaatacttagcaccatagattgtaaaaatagaaagaggaaatgagaaaacttaatgtcgttcttgtacagttgagttttgcttctttataaactgtctgttaaaatcaggggttgctgttagactgtcaagcagaagtgatggatgttcaaggaggcaggttgccccaaagtgttttctaactttcaagtagagaactttatgctctaataagaaaaatacaactcattcttaaccacccccccaaaacagagaaaacacatacatttatgcattttaaagataaaaagtagtttctcaaaaaaatctgaagttctctgaaaaccagcttattaaaagtgctgttttgtggtgaaaattgaaaccaaatccactcacatttcctatcgggtcttgaaattcttggtggtgtgtcaccattccactagatggcagtgttgcttactgagtgtcaatggcttttttccccgtaaatggaatcatgtttttctcccccaaagtacaataaagctgccttgtctgcaccatt

SEQ ID NO: 153605 - DNA, 1817 bp, Homo sapiens
  Payload ID: 10210
  Gene Symbol: METTL9
  Gene Name: methyltransferase like 9
  Uniprot ID: Q9H1A3
  ENST ID: ENST00000396014
  CDS Start-End: 177-1130
ggctgcgcgccggctgctcctccccacccccagcctttgccctgaagggggctggatgggcaaggcggccgcgatggctcgagctcgggcggtggcggcggtggccggaggcggcggtgcctcctcctcctcgccccggcgccggcggtgatccgagcgagcggccgcggcccccgatgagactgctggcgggctggctgtgcctgagcctggcgtccgtgtggctggcgcggaggatgtggacgctgcggagcccgctcacccgctccctgtacgtgaacatgactagcggcccgggtgggccggcggcggccgcgggcggcaggaaggagaaccaccagtggtatgtgtgcaacagagagaaattatgcgaatcactccaggctgtctttgttcagagttaccttgatcaaggaacacagatcttcttaaacaacagcattgagaaatcgggctggctatttatccaattatatcattcttttgtgtcatctgtttttagcctgtttatgtctagaacatctatcaatgggttgctaggaagaggctcaatgtttgtgttttcaccagatcagtttcagagactgcttaaaattaatccagactggaaaacccacagacttcttgatttaggtgctggagatggagaagtcacaaaaatcatgagccctcattttgaagaaatctatgccactgagctttctgaaactatgatatggcagcttcagaaaaagaaatacagagtccttggtataaatgaatggcagaatacggggttccagtatgatgtcatcagctgcctgaacttgctggaccgctgtgatcagcccctgactttgttaaaagatatcagaagtgtcttggagccaactagaggcagggtcatccttgcccttgtcctcccctttcatccctatgtggaaaacggtggcaagtgggagaaaccatcagaaattttggaaatcaaaggacagaactgggaagaacaagtgaatagtctgcctgaagttttcagaaaagctggttttgttatcgaagctttcaccagactaccatacctgtgtgaaggcgacatgtataatgactactacgttctggatgacgctgtctttgttctcaaaccagtataaacacgtggaggtcgaagtcttcagagtccgcaccctccgggatgtgcccttggaagagggtctgtgttcacaattacgtgaagggaggacccttggggaccgccattctaaatatcatgtaggaatttaaaaagccaaaatactaattatttctttgtagtgtgtaaaggaatgtttttaaaagacaaaaacccaactctttgtggatttttatcaactctttactcagagccactctccaatgcaggtcacactccaattatgatggaagatattttttatacttaattgcagtagggactcattcccagacaaagcaatagtcacgacttcatggaaccaatcaatggattgttttttgaagactggcaataaagctgtccattcaattccaaatactggttttaaggtatagccactgatattctttcatgtttagaaattctttctgttattattcaagaaaatgtttttaatcatgctaataaacttttttggagatgactttggcatcatgtttgaattcatataaagctcccctagcattttttattggtttggcttcaggagtacccaaatagtagcattatgagaatgacgcagacaatttgaataggggggaaggaaggcttcagacttgggggaaggggagattattgcaaattgcagtgaacactgagtcagtaa

SEQ ID NO: 153606 - DNA, 785 bp, Homo sapiens
  Payload ID: 10210
  Gene Symbol: METTL9
  Gene Name: methyltransferase like 9
  ENST ID: ENST00000562961
  CDS Start-End: 368-785
ggaaaggcaacttaatctggtcactggagtgttaaattctgttgcttactttgctatttgggtttgtttggtgattttgagttaaggcattggattatgtgactgttttcttgtctaaaaacaaggatgctgctagctgtttgccttctgatgttgaatctcagtgaaagagaggccagcagagctttctaaatctcggtggtatgtgtgcaacagagagaaattatgcgaatcactccaggctgtctttgttcagagttaccttgatcaaggaacacagatcttcttaaacaacagcattgagaaatcgggctggctatttatccaattatatcattcttttgtgtcatctgtttttagcctgtttatgtctagaacatctatcaatgggttgctaggaagaggctcaatgtttgtgttttcaccagatcagtttcagagactgcttaaaattaatccagactggaaaacccacagacttcttgatttaggtgctggagatggagaagtcacaaaaatcatgagccctcattttgaagaaatctatgccactgagctttctgaaactatgatatggcagcttcagaaaaagaaatacagagtccttggtataaatgaatggcagaatacggggttccagtatgatgtcatcagctgcctgaacttgctggaccgctgtgatcagcccctgactttgttaaaagatatcagaagtgtcttggagccaactagaggcagggtcatccttgcccttgtcctcccctttcatccctatgtggaaaacg

SEQ ID NO: 153607 - DNA, 763 bp, Homo sapiens
  Payload ID: 10210
  Gene Symbol: METTL9
  Gene Name: methyltransferase like 9
  ENST ID: ENST00000567404
  CDS Start-End: 35-763
aggctctctgagaagagacagcaaagcttcttagatggatcgaaagaccacgagctgggataccaagttctatgaaaagtggtatgtgtgcaacagagagaaattatgcgaatcactccaggctgtctttgttcagagttaccttgatcaaggaacacagatcttcttaaacaacagcattgagaaatcgggctggctatttatccaattatatcattcttttgtgtcatctgtttttagcctgtttatgtctagaacatctatcaatgggttgctaggaagaggctcaatgtttgtgttttcaccagatcagtttcagagactgcttaaaattaatccagactggaaaacccacagacttcttgatttaggtgctggagatggagaagtcacaaaaatcatgagccctcattttgaagaaatctatgccactgagctttctgaaactatgatatggcagcttcagaaaaagaaatacagagtccttggtataaatgaatggcagaatacggggttccagtatgatgtcatcagctgcctgaacttgctggaccgctgtgatcagcccctgactttgttaaaagatatcagaagtgtcttggagccaactagaggcagggtcatccttgcccttgtcctcccctttcatccctatgtggaaaacgtaggtggcaagtgggagaaaccatcagaaattttggaaatcaaaggacagaactgggaagaacaagtgaatagtctgcctgaagttttcagaaaagct

SEQ ID NO: 153608 - DNA, 376 bp, Homo sapiens
  Payload ID: 10210
  Gene Symbol: METTL9
  Gene Name: methyltransferase like 9
  ENST ID: ENST00000568826
  CDS Start-End: 1-376
agagttaccttgatcaaggaacacagatcttcttaaacaacagcattgagaaatcgggctggctatttatccaattatatcattcttttgtgtcatctgtttttagcctgtttatgtctagaacatctatcaatggagtccttggtataaatgaatggcagaatacggggttccagtatgatgtcatcagctgcctgaacttgctggaccgctgtgatcagcccctgactttgttaaaagatatcagaagtgtcttggagccaactagaggcagggtcatccttgcccttgtcctcccctttcatccctatgtggaaaacgtaggtggcaagtgggagaaaccatcagaaattttggaaatcaaaggacagaactg

SEQ ID NO: 153609 - DNA, 480 bp, Homo sapiens
  Payload ID: 10210
  Gene Symbol: METTL9
  Gene Name: methyltransferase like 9
  ENST ID: ENST00000569290
  CDS Start-End: 1-385
accagatcagtttcagagactgcttaaaattaatccagactggaaaacccacagacttcttgatttaggtgctggagatggagaagtcacaaaaatcatgagccctcattttgaagaaatctatgccactgagctttctgaaactatgatatggcagcttcagaaaaagaaatacagagtccttggtataaatgaatggcagaatacggggttccagtatgatgtcatcagctgcctgaacttgctggaccgctgtgatcagcccctgactttgttaaaagatatcagaagtgtcttggagccaactagaggcagggtcatccttgcccttgtcctcccctttcatccctatgtggaaaacggtaagtgtggtcagtcaggctagctcttactgaggatagctgtttattggtatttgtgattttgtgctgtgtacaattaaatattgtctagtatgtcttataatagcctgcagtttaa

SEQ ID NO: 153610 - DNA, 447 bp, Homo sapiens
  Payload ID: 10210
  Gene Symbol: METTL9
  Gene Name: methyltransferase like 9
  ENST ID: ENST00000570074
  CDS Start-End: 17-202
gcggccgcggcccccgatgagactgctggcgggctggctgtgcctgagcctggcgtccgtgtggctggcgcggaggatgtggacgctgcggagcccgctcacccgctcccttggtatgtgtgcaacagagagaaattatgcgaatcactccaggctgtctttgttcagagttaccttgatcaaggaacacagatcttcttaaacaacagcattgagaaatcgggctggctatttatccaattatatcattcttttgtgtcatctgtttttagcctgtttatgtctagaacatctatcaatgggttgctaggaagaggctcaatgtttgtgttttcaccagatcagtttcagagactgcttaaaattaatccagactggaaaacccacagacttcttgatttaggtgctggagatggagaagtcacaaaaatcatgagccctcatttt

SEQ ID NO: 153611 - DNA, 701 bp, Homo sapiens
  Payload ID: 10210
  Gene Symbol: METTL9
  Gene Name: methyltransferase like 9
  ENST ID: ENST00000562379
  CDS Start-End: 143-367
ctttgccctgaagggggctggatgggcaaggcggccgcgatggctcgagctcgggcggtggcggcggtggccggaggcggcggtgcctcctcctcctcgccccggcgccggcggtgatccgagcgagcggccgcggcccccgatgagactgctggcgggctggctgtgcctgagcctggcgtccgtgtggctggcgcggaggatgtggacgctgcggagcccgctcacccgctccctgtacgtgaacatgactagcggcccgggtgggccggcggcggccgcgggcggcaggaaggagaaccaccaggttgctaggaagaggctcaatgtttgtgttttcaccagatcagtttcagagactgcttaaaattaatccagactggaaaacccacagacttcttgatttaggtgctggagatggagaagtcacaaaaatcatgagccctcattttgaagaaatctatgccactgagctttctgaaactatgatatggcagcttcagaaaaagaaatacagagtccttggtataaatgaatggcagaatacggggttccagtatgatgtcatcagctgcctgaacttgctggaccgctgtgatcagcccctgactttgttaaaagatatcagaagtgtcttggagccaactagaggcagggtcatccttgcccttgtcctcccctttcatccctatgtggaaaac

SEQ ID NO: 153612 - DNA, 2890 bp, Homo sapiens
  Payload ID: 10210
  Gene Symbol: METTL9
  Gene Name: methyltransferase like 9
  ENST ID: ENST00000615720
  CDS Start-End: 1-849
atgtggacgctgcggagcccgctcacccgctccctgtacgtgaaggagaaccaccagtggtatgtgtgcaacagagagaaattatgcgaatcactccaggctgtctttgttcagagttaccttgatcaaggaacacagatcttcttaaacaacagcattgagaaatcgggctggctatttatccaattatatcattcttttgtgtcatctgtttttagcctgtttatgtctagaacatctatcaatgggttgctaggaagaggctcaatgtttgtgttttcaccagatcagtttcagagactgcttaaaattaatccagactggaaaacccacagacttcttgatttaggtgctggagatggagaagtcacaaaaatcatgagccctcattttgaagaaatctatgccactgagctttctgaaactatgatatggcagcttcagaaaaagaaatacagagtccttggtataaatgaatggcagaatacggggttccagtatgatgtcatcagctgcctgaacttgctggaccgctgtgatcagcccctgactttgttaaaagatatcagaagtgtcttggagccaactagaggcagggtcatccttgcccttgtcctcccctttcatccctatgtggaaaacgtaggtggcaagtgggagaaaccatcagaaattttggaaatcaaaggacagaactgggaagaacaagtgaatagtctgcctgaagttttcagaaaagctggttttgttatcgaagctttcaccagactaccatacctgtgtgaaggcgacatgtataatgactactacgttctggatgacgctgtctttgttctcaaaccagtataaacacgtggaggtcgaagtcttcagagtccgcaccctccgggatgtgcccttggaagagggtctgtgttcacaattacgtgaagggaggacccttggggaccgccattctaaatatcatgtaggaatttaaaaagccaaaatactaattatttctttgtagtgtgtaaaggaatgtttttaaaagacaaaaacccaactctttgtggatttttatcaactctttactcagagccactctccaatgcaggtcacactccaattatgatggaagatattttttatacttaattgcagtagggactcattcccagacaaagcaatagtcacgacttcatggaaccaatcaatggattgttttttgaagactggcaataaagctgtccattcaattccaaatactggttttaaggtatagccactgatattctttcatgtttagaaattctttctgttattattcaagaaaatgtttttaatcatgctaataaacttttttggagatgactttggcatcatgtttgaattcatataaagctcccctagcattttttattggtttggcttcaggagtacccaaatagtagcattatgagaatgacgcagacaatttgaataggggggaaggaaggcttcagacttgggggaaggggagattattgcaaattgcagtgaacactgagtcagtaaaaaaaaaaaacagaaacaaaaacccagcctcattcagatacagaacttcagggacccctccccccacccccccagttaatgctgctgtgaaaaatgcaaaataacctggttctgactttgtgatcactcatgtcccatacactgaactttgtttttttctggacaatctcaggttctcagaattgaaacattcagttttgtctactgacaaaatgcaactaaaaatgttttaattcaacttcttactctacacttatatacctctctcccagagcttggctcttccctgaaatccttaaaggagtttattatttgccaagaatatggtttgatgaagaccgtgtcagactcatgcattctggaatccgtgagtgcctccaaccataaacccagaaatgctgccatagaggaacccattagcaagatcaataaccatcgtggatattccaaagagcagagcatttaacccagaatctgaaatctcagtaataacagaaatgtcaatatgagattgtggttattaacaatatgttatcctcactactttatttcttttttcatccaggtgtttcattaagtattctcatttatatgctcatagaagtcatcagatcaacacattcactccaacacctgggtataaaggcgaattaaaacctgaagaattactttattattcattaagaactgcattcccacatcctcacaccaatatcttccactgttactgtgcagtcataataagagttgggttatgtgatttatgcaaaattgttattggtgtgttctaatgatttttttccaggaattcaagtaagtgaagtacaaatacttagcaccatagattgtaaaaatagaaagaggaaatgagaaaacttaatgtcgttcttgtacagttgagttttgcttctttataaactgtctgttaaaatcaggggttgctgttagactgtcaagcagaagtgatggatgttcaaggaggcaggttgccccaaagtgttttctaactttcaagtagagaactttatgctctaataagaaaaatacaactcattcttaaccacccccccaaaacagagaaaacacatacatttatgcattttaaagataaaaagtagtttctcaaaaaaatctgaagttctctgaaaaccagcttattaaaagtgctgttttgtggtgaaaattgaaaccaaatccactcacatttcctatcgggtcttgaaattcttggtggtgtgtcaccattccactagatggcagtgttgcttactgagtgtcaatggcttttttccccgtaaatggaatcatgtttttctcccccaaagtacaataaagctgccttgtctgcaccatt

SEQ ID NO: 153613 - DNA, 1823 bp, Homo sapiens
  Payload ID: 10211
  Gene Symbol: MVD
  Gene Name: mevalonate (diphospho) decarboxylase
  Uniprot ID: P53602
  ENST ID: ENST00000301012
  CDS Start-End: 31-1233
gtggagctggggtcactgcgcggtgggaccatggcctcggagaagccgctggcggcagtcacttgtacagcgccggtcaacatcgcggtcatcaagtactggggcaagcgcgatgaagagctggttctgcccatcaactcctccctgagcgtcactctgcaccaggaccagttaaaaaccaccacaacagccgtcatcagcaaggacttcaccgaggaccggatttggctgaatggccgggaggaggatgtggggcagccgcggctgcaggcctgcctgcgggagatccgctgcctggcccggaagcggaggaactcacgggatggggacccgctgccctccagcctcagctgcaaggtgcacgtggcatcggtgaacaacttccccacggctgcgggcctggcctcctcagcggcgggctatgcctgcctagcctacaccctggcccgtgtctacggcgtggagagtgacctctcagaagtggctcgccggggctcaggcagcgcctgccggagcctgtatgggggctttgtggagtggcagatgggagagcaggccgacgggaaggacagcatcgctcggcaagtggcccccgagtcacactggcctgaactccgcgtgctcatccttgtggtgagcgctgagaagaagctgacaggcagtaccgtgggcatgcgggccagtgtggagaccagccccctgcttcggttccgggccgagtccgtggtgcccgcgcgcatggcggagatggcccgctgcatccgggagcgagacttccccagcttcgcccagctgaccatgaaggacagcaaccagttccacgccacctgcctcgacaccttcccgcccatctcttacctcaatgccatctcctggcgcatcatccacctggtgcaccgcttcaacgcccaccacggggacaccaaggtggcgtacacctttgacgcgggccccaatgccgtgatcttcaccctggacgacactgtggctgagtttgtggctgctgtgtggcacggctttcccccaggctcgaatggagacacgtttctgaaggggctgcaggtgaggccggcccctctctcagctgagcttcaggctgcgctggccatggagccgacccccggtggggtcaaatacatcattgtcactcaggtggggccagggcctcaaatcctggatgacccctgcgcccacctcctgggtcctgacggcctgccgaagccagctgcctgactgcctcagcagggaccgcatgccgcttggagaaggggtggcctcgccggagctagggagcggatgtggtgggctggccggactcctgggacatgtgggtggtggcttgaccccgggcccatgggcagcttgctgtggggcagtgcagggagtcctgcggccgcccaggtgtcaggagaggtccccgccgagtgcttcagctgccctaagctgcaccagcgctttgccaagatgggatggggagggggtatgagaactggcagagcctcggtgcagcagggctgaagggctttctcaccccagctctggctatgcccagttctctgagaaaggagctcagtggggaggtggtccctccagcggaccagggaaggggtcaccgtgctgggagcagcctccttgggcctcaggaaaccaccaagtgcctcggatggtggctgcccacggcgcttctgctgagaccctgcccccggcccaggtgtctcggagggtggctgcccacggcctgggtgtggctggaatggtggcaggagtgggcaccagtgcggccccggtggccatggggaataaaccagcattgctgcctccgg

SEQ ID NO: 153614 - DNA, 870 bp, Homo sapiens
  Payload ID: 10211
  Gene Symbol: MVD
  Gene Name: mevalonate (diphospho) decarboxylase
  ENST ID: ENST00000569177
  CDS Start-End: 58-870
gggtgggatcgcgggccgtaagtggctgtggagctggggtcactgcgcggtgggaccatggcctcggagaagccgctggcggcagtcacttgtacagcgccggtcaacatcgcggtcatcaagtactggggcaagcgcgatgaagagctggttctgcccatcaactcctccctgagcgtcactctgcaccaggaccagttaaaaaccaccacaacagccgtcatcagcaaggacttcaccgaggaccggatttggctgaatggccgggaggaggatgtggggcagccgcggctgcaggcctgcctgcgggagatccgctgcctggcccggaagcggaggaactcacgggatggggacccgctgccctccagcctcagctgcaaggtgcacgtggcatcggtgaacaacttccccacggctgcgggcctggcctcctcagcggcgggctatgcctgcctagttgcagctggcgtggggctctcgcctgtaatcccagtacttaagaggctgatgggggagaagcactgtaggccaggagttcaagaccagcctgggcaacatacctacaccctggcccgtgtctacggcgtggagagtgacctctcagaagtggctcgccggggctcaggcagcgcctgccggagcctgtatgggggctttgtggagtggcagatgggagagcaggccgacgggaaggacagcatcgctcggcaagtggcccccgagtcacactggcctgaactccgcgtgctcatccttgtggtgagcgctgagaagaagctgacaggcagtaccgtgggcatgcgggccagtgtggagaccagccccctgcttcggttccgggccgagtccgtggtgcccgcgcgcatg

SEQ ID NO: 153615 - DNA, 853 bp, Homo sapiens
  Payload ID: 10211
  Gene Symbol: MVD
  Gene Name: mevalonate (diphospho) decarboxylase
  ENST ID: ENST00000568133
  CDS Start-End: 3-278
ccatggcctcggagaagccgctggcggcagtcacttgtacagcgccggtcaacatcgcggtcatcaagtactggggcaagcgcgatgaagagctggttctgcccatcaactcctccctgagcgtcactctgcaccaggaccagttaaaaaccaccacaacagccgtcatcagcaaggacttcaccgaggaccggatttggctgaatggccgggaggaggatgtggggcagccgcggctgcaggcctgcctgcgggagagtgagctggggtccccataagcccatccctccctgttgtcagcagggtccgagcatccagaaagtgcttctgcctctgtgcccctcctgaggcagcaggcggggtggctgggaaccagacatgcccgctgggccgccagctccagggcagtggcccacctcaatgaccagctgggcttggtccgctgcctggcccggaagcggaggaactcacgggatggggacccgctgccctccagcctcagctgcaaggtgcacgtggcatcggtgaacaacttccccacggctgcgggcctggcctcctcagcggcgggctatgcctgcctagcctacaccctggcccgtgtctacggcgtggagagtgacctctcagaagtggctcgccggggctcaggcagcgcctgccggagcctgtatgggggctttgtggagtggcagatgggagagcaggccgacgggaaggacagcatcgctcggcaagtggcccccgagtcacactggcctgaactccgcgtgctcatccttgtggtgagcgctgagaagaagctgacaggcagtaccgtgggcatgcgggccagtgtggagaccagccccct

SEQ ID NO: 153616 - DNA, 507 bp, Homo sapiens
  Payload ID: 10211
  Gene Symbol: MVD
  Gene Name: mevalonate (diphospho) decarboxylase
  ENST ID: ENST00000565610
  CDS Start-End: 69-194
agaggcctctggggtgggatcgcgggccgtaagtggctgtggagctggggtcactgcgcggtgggaccatggcctcggagaagccgctggcggcagtcacttgtacagcgccggtcaacatcgcggtcatcaagtacttagagatggggtttcaccgtgttagccaggctggtctgaagctcctgacctcgtgatctgcccacctcagcctcccaaagtgctgggattacagactgtcactgcgacacccaggctggagtgcaatggcgtgatctcggctcactgcaacctccgcttcccgggttcaaccgattctcctgcctcagcctctcgagtagctgggactacagggggcaagcgcgatgaagagctggttctgcccatcaactcctccctgagcgtcactctgcaccaggaccagttaaaaaccaccacaacagccgtcatcagcaaggacttcaccgaggaccggatttggctgaatggccgggaggaggatgtggggca

SEQ ID NO: 153617 - DNA, 758 bp, Homo sapiens
  Payload ID: 10211
  Gene Symbol: MVD
  Gene Name: mevalonate (diphospho) decarboxylase
  ENST ID: ENST00000567064
  CDS Start-End: 12-167
gcggtgggaccatggcctcggagaagccgctggcggcagtcacttgtacagcgccggtcaacatcgcggtcatcaagtactggtcgcccggcgcctgcccattagcgattaccgaactatcgaaatcatcaatcatcgattcccatgaatcggggcaagcgcgatgaagagctggttctgcccatcaactcctccctgagcgtcactctgcaccaggaccagttaaaaaccaccacaacagccgtcatcagcaaggacttcaccgaggaccggatttggctgaatggccgggaggaggatgtggggcagccgcggctgcaggcctgcctgcgggagatccgctgcctggcccggaagcggaggaactcacgggatggggacccgctgccctccagcctcagctgcaaggtgcacgtggcatcggtgaacaacttccccacggctgcgggcctggcctcctcagcggcgggctatgcctgcctagcctacaccctggcccgtgtctacggcgtggagagtgacctctcagaagtggctcgccggggctcaggcagcgcctgccggagcctgtatgggggctttgtggagtggcagatgggagagcaggccgacgggaaggacagcatcgctcggcaagtggcccccgagtcacactggcctgaactccgcgtgctcatccttgtggtgagcgctgagaagaagctgacaggcagtaccgtgggcatgcgggccagtgtggagaccagccccctgcttcg

SEQ ID NO: 153618 - DNA, 1814 bp, Homo sapiens
  Payload ID: 10211
  Gene Symbol: MVD
  Gene Name: mevalonate (diphospho) decarboxylase
  ENST ID: ENST00000620002
  CDS Start-End: 544-960
gtggagctggggtcactgcgcggtgggaccatggcctcggagaagccgctggcggcagtcacttgtacagcgccggtcaacatcgcggtcatcaagtactggggcaagcgcgatgaagagctggttctgcccatcaactcctccctgagcgtcactctgcaccaggaccagttaaaaaccaccacaacagccgtcatcagcaaggacttcaccgaggaccggatttggctgaatggccgggaggaggatgtggggcagccgcggctgcaggcctgcctgcgggagatccgctgcctggcccggaagcggaggaactcacgggatggggacccgctgccctccagcctcagctgcaaggtgcacgtggcatcggtgaacaacttccccacggctgcgggcctggcctcctcagcggcgggctatgcctgcctagcctacaccctggcccgtgtctacggcgtggagagtgacctctcagaagtggctcgccggggctcaggcagcgcctgccggagcctgtatgggggctttgtggagtggcagatgggagagcaggccgacgggaaggacagcatcgctcggcaagtggcccccgagtcacactggcctgaactccgcgtgctcatccttgtggtgagcgctgagaagaagctgacaggcagtaccgtgggcatgcgggccagtgtggagaccagccccctgcttcggttccgggccgagtccgtggtgcccgcgcatggcggagatggcccgctgcatccgggagcgagacttccccagcttcgcccagctgaccatgaaggacagcaaccagttccacgccacctgcctcgacaccttcccccatctcttacctcaatgccatctcctggcgcatcatccacctggtgcaccgcttcaacgcccaccacggggacaccaaggtggcgtacacctttgacgcgggccccaatgccgtgatcttcaccctggacgacactgtggctgagtttgtggctgctgtgtggcacggctttcccccaggctcgaatggagacacgtttctgaaggggctgcaggtgaggccggcccctctctcagctgagcttcaggctgcgctggccatggagccgacccccggtggggtcaaatacatcattgtcactcaggtggggccagggcctcaaatcctggatgacccctgcgcccacctcctgggtcctgacggcctgccgaagccagctgcctgactgcctcagcagggaccgcatgccgcttggagaaggggtggcctcgccggagctagggagcggatgtggtgggctggccggactcctgggacatgtgggtggtggcttgaccccgggcccatgggcagcttgctgtggggcagtgcagggagtcctgcggccgcccaggtgtcaggagaggtccccgccgagtgcttcagctgccctaagctgcaccagcgctttgccaagatgggatggggagggggtatgagaactggcagagcctcggtgcagcagggctgaagggctttctcaccccagctctggctatgcccagttctctgagaaaggagctcagtggggaggtggtccctccagcggaccagggaaggggtcaccgtgctgggagcagcctccttgggcctcaggaaaccaccaagtgcctcggatggtggctgcccacggcgcttctgctgagaccctgcccccggcccaggtgtctcggagggtggctgcccacggcctgggtgtggctggaatggtggcaggagtgggcaccagtgcggccccggtggccatggggaataaaccagcattgctgcc

SEQ ID NO: 153619 - DNA, 1956 bp, Homo sapiens
  Payload ID: 10212
  Gene Symbol: MVK
  Gene Name: mevalonate kinase
  Uniprot ID: Q03426
  ENST ID: ENST00000228510
  CDS Start-End: 77-1267
tggggagctgctccggcttcggcgcggaggggcggcggccggggaggcggcggcggcggcaggattcccaggagccatgttgtcagaagtcctactggtgtctgctccggggaaagtcatccttcatggagaacatgccgtggtacatggcaaggtagcactggctgtatccttgaacttgagaacattcctccggcttcaaccccacagcaatgggaaagtggacctcagcttacccaacattggtatcaagcgggcctgggatgtggccaggcttcagtcactggacacaagctttctggagcaaggtgatgtcacaacacccacctcagagcaagtggagaagctaaaggaggttgcaggcttgcctgacgactgtgctgtcaccgagcgcctggctgtgctggcctttctttacttatacctgtccatctgccggaagcagagggccctgccgagcctggatatcgtagtgtggtcggagctgccccccggggcgggcttgggctccagcgccgcctactcggtgtgtctggcagcagccctcctgactgtgtgcgaggagatcccaaacccgctgaaggacggggattgcgtcaacaggtggaccaaggaggatttggagctaattaacaagtgggccttccaaggggagagaatgattcacgggaacccctccggagtggacaatgctgtcagcacctggggaggagccctccgataccatcaagggaagatttcatccttaaagaggtcgccagctctccagatcctgctgaccaacaccaaagtccctcgcaataccagggcccttgtggctggcgtcagaaacaggctgctcaagttcccagagatcgtggcccccctcctgacctcaatagatgccatctccctggagtgtgagcgcgtgctgggagagatgggggaagccccagccccggagcagtacctcgtgctggaagagctcattgacatgaaccagcaccatctgaatgccctcggcgtgggccacgcctctctggaccagctctgccaggtgaccagggcccgcggacttcacagcaagctgactggcgcaggcggtggtggctgtggcatcacactcctcaagccagggctggagcagccagaagtggaggccacgaagcaggccctgaccagctgtggctttgactgcttggaaaccagcatcggtgcccccggcgtctccatccactcagccacctccctggacagccgagtccagcaagccctggatggcctctgagaggagcccacgacactgcagccccacccagatgcccctttctggattattctgggggctgcagttcgactctgtgctggccagcgagcgcccagctcctgacactgctggagaggccccagccgcttggcgatgccagccaagctctgcagtcccagcggtgggacctagggaggcatggtctgccctctgcatcctctggagccagccgagcaggaggcctaggagggtcctctgagactccagacctgaggcgagaagggctgcttccctgaagctcccacagtcccatctgcttcaggcccccgccttggcctgtgttcttcctggccgcctgggtccaatgctcaggtgctggggcctggttcccggagaagtgtgccttctctctcccttttcagggaccgccccctgtctctcagggccaggcctctccctcctccaggaagccttcccctaccccttgtcgcccctccctcccagagcacctgctgtctgggtggctcactcagcacttggtgtggccttcccttctacctagcgggatggggctcccccaggggctgtcccggaggcggtgggcctggttaaataaggcagggtttatatgcactttcttccgatctgtacctgagaggtttgtggaaaagatggcaaatggggaataaaaagattttgtgtcaacagta

SEQ ID NO: 153620 - DNA, 1770 bp, Homo sapiens
  Payload ID: 10212
  Gene Symbol: MVK
  Gene Name: mevalonate kinase
  ENST ID: ENST00000392727
  CDS Start-End: 52-1086
ggaggggcggcggccggggaggcggcggcggcggcaggattcccaggagccatgttgtcagaagtcctactggtgtctgctccggggaaagtcatccttcatggagaacatgccgtggtacatggcaaggtagcactggctgtatccttgaacttgagaacattcctccggcttcaaccccacagcaatgggaaagtggacctcagcttacccaacattggtatcaagcgggcctgggatgtggccaggcttcagtcactggacacaagctttctggagcaaggtgatgtcacaacacccacctcagagcaagtggagaagctaaaggaggttgcaggcttgcctgacgactgtgctgtcaccgagcgcctggctgtgctggcctttctttacttatacctgtccatctgccggaagcagaggtggaccaaggaggatttggagctaattaacaagtgggccttccaaggggagagaatgattcacgggaacccctccggagtggacaatgctgtcagcacctggggaggagccctccgataccatcaagggaagatttcatccttaaagaggtcgccagctctccagatcctgctgaccaacaccaaagtccctcgcaataccagggcccttgtggctggcgtcagaaacaggctgctcaagttcccagagatcgtggcccccctcctgacctcaatagatgccatctccctggagtgtgagcgcgtgctgggagagatgggggaagccccagccccggagcagtacctcgtgctggaagagctcattgacatgaaccagcaccatctgaatgccctcggcgtgggccacgcctctctggaccagctctgccaggtgaccagggcccgcggacttcacagcaagctgactggcgcaggcggtggtggctgtggcatcacactcctcaagccagggctggagcagccagaagtggaggccacgaagcaggccctgaccagctgtggctttgactgcttggaaaccagcatcggtgcccccggcgtctccatccactcagccacctccctggacagccgagtccagcaagccctggatggcctctgagaggagcccacgacactgcagccccacccagatgcccctttctggattattctgggggctgcagttcgactctgtgctggccagcgagcgcccagctcctgacactgctggagaggccccagccgcttggcgatgccagccaagctctgcagtcccagcggtgggacctagggaggcatggtctgccctctgcatcctctggagccagccgagcaggaggcctaggagggtcctctgagactccagacctgaggcgagaagggctgcttccctgaagctcccacagtcccatctgcttcaggcccccgccttggcctgtgttcttcctggccgcctgggtccaatgctcaggtgctggggcctggttcccggagaagtgtgccttctctctcccttttcagggaccgccccctgtctctcagggccaggcctctccctcctccaggaagccttcccctaccccttgtcgcccctccctcccagagcacctgctgtctgggtggctcactcagcacttggtgtggccttcccttctacctagcgggatggggctcccccaggggctgtcccggaggcggtgggcctggttaaataaggcagggtttatatgcactttcttccgatctgtacctgagaggtttgtggaaaagatggcaaatggggaataaaaagattttgtgtcaa

SEQ ID NO: 153621 - DNA, 1644 bp, Homo sapiens
  Payload ID: 10212
  Gene Symbol: MVK
  Gene Name: mevalonate kinase
  ENST ID: ENST00000447878
  CDS Start-End: 96-347
cgctctgggttgtgggagttggggagctgctccggcttcggcgcggaggggcggcggccggggaggcggcggcggcggcaggattcccaggagccatgttgtcagaagtcctactggtgtctgctccggggaaagtcatccttcatggagaacatgccgtggtacatggcaaggtagcactggctgtatccttgaacttgagaacattcctccggcttcaaccccacagcaatgggaaagtggacctcagcttacccaacattggtatcaagcgggcctgggatgtggccaggcttcagtcactggacacaagctttctgggtggaccaaggaggatttggagctaattaacaagtgggccttccaaggggagagaatgattcacgggaacccctccggagtggacaatgctgtcagcacctggggaggagccctccgataccatcaagggaagatttcatccttaaagaggtcgccagctctccagatcctgctgaccaacaccaaagtccctcgcaataccagggcccttgtggctggcgtcagaaacaggctgctcaagttcccagagatcgtggcccccctcctgacctcaatagatgccatctccctggagtgtgagcgcgtgctgggagagatgggggaagccccagccccggagcagtacctcgtgctggaagagctcattgacatgaaccagcaccatctgaatgccctcggcgtgggccacgcctctctggaccagctctgccaggtgaccagggcccgcggacttcacagcaagctgactggcgcaggcggtggtggctgtggcatcacactcctcaagccagggctggagcagccagaagtggaggccacgaagcaggccctgaccagctgtggctttgactgcttggaaaccagcatcggtgcccccggcgtctccatccactcagccacctccctggacagccgagtccagcaagccctggatggcctctgagaggagcccacgacactgcagccccacccagatgcccctttctggattattctgggggctgcagttcgactctgtgctggccagcgagcgcccagctcctgacactgctggagaggccccagccgcttggcgatgccagccaagctctgcagtcccagcggtgggacctagggaggcatggtctgccctctgcatcctctggagccagccgagcaggaggcctaggagggtcctctgagactccagacctgaggcgagaagggctgcttccctgaagctcccacagtcccatctgcttcaggcccccgccttggcctgtgttcttcctggccgcctgggtccaatgctcaggtgctggggcctggttcccggagaagtgtgccttctctctcccttttcagggaccgccccctgtctctcagggccaggcctctccctcctccaggaagccttcccctaccccttgtcgcccctccctcccagagcacctgctgtctgggtggctcactcagcacttggtgtggccttcccttctacctagcgggatggggctcccccaggggctgtcccggaggcggtgggcctggttaaataaggcagggtttatatgcactttcttccgatctgtacctgagaggtttgtggaaaagatggcaaat

SEQ ID NO: 153622 - DNA, 886 bp, Homo sapiens
  Payload ID: 10212
  Gene Symbol: MVK
  Gene Name: mevalonate kinase
  ENST ID: ENST00000546277
  CDS Start-End: 285-886
gattcacggcaggtgttcgagttgcccttcccgccagccactcacctgtccccgtcttccacgccctgagggccgcggctctggaaacggggatacaggagcctggcggcgccgaagcacccgcgcaggccaagacggctccccaggccaagacggctccccaggccgcacacagccatgagccaggctgcttgacgggacctgaccccgccaggttcccgtccagtccgcggggtgactccacccacagctggccgcgccaccgctcaggattcccaggagccatgttgtcagaagtcctactggtgtctgctccggggaaagtcatccttcatggagaacatgccgtggtacatggcaaggtagcactggctgtatccttgaacttgagaacattcctccggcttcaaccccacagcaatgggaaagtggacctcagcttacccaacattggtatcaagcgggcctgggatgtggccaggcttcagtcactggacacaagctttctggagcaaggtgatgtcacaacacccacctcagagcaagtggagaagctaaaggaggttgcaggcttgcctgacgactgtgctgtcaccgagcgcctggctgtgctggcctttctttacttatacctgtccatctgccggaagcagagggccctgccgagcctggatatcgtagtgtggtcggagctgccccccggggcgggcttgggctccagcgccgcctactcggtgtgtctggcagcagccctcctgactgtgtgcgaggagatcccaaacccgctgaaggacggggattgcgtcaacaggtggaccaaggaggatttggagctaattaacaagtgggccttccaaggggagagaatgattcacgggaacccctc

SEQ ID NO: 153623 - DNA, 608 bp, Homo sapiens
  Payload ID: 10212
  Gene Symbol: MVK
  Gene Name: mevalonate kinase
  ENST ID: ENST00000539696
  CDS Start-End: 161-508
tgggagttggggagctgctccggcttcggcgcggaggggcggcggccggggaggcggcggcggcggcagaaacaggctgctcaagttcccagagatcgtggcccccctcctgacctcaatagatgccatctccctggagtgtgagcgcgtgctgggagagatgggggaagccccagccccggagcagtacctcgtgctggaagagctcattgacatgaaccagcaccatctgaatgccctcggcgtgggccacgcctctctggaccagctctgccaggtgaccagggcccgcggacttcacagcaagctgactggcgcaggcggtggtggctgtggcatcacactcctcaagccagggctggagcagccagaagtggaggccacgaagcaggccctgaccagctgtggctttgactgcttggaaaccagcatcggtgcccccggcgtctccatccactcagccacctccctggacagccgagtccagcaagccctggatggcctctgagaggagcccacgacactgcagccccacccagatgcccctttctggattattctgggggctgcagttcgactctgtgctggccagcgagcgcccagctcct

SEQ ID NO: 153624 - DNA, 834 bp, Homo sapiens
  Payload ID: 10212
  Gene Symbol: MVK
  Gene Name: mevalonate kinase
  ENST ID: ENST00000539335
  CDS Start-End: 323-834
cgcggtgacctcacggcggtgtgacgtacccatggcgacgacaccacgattcacggcaggtgttcgagttgcccttcccgccagccactcacctgtccccgtcttccacgccctgagggccgcggctctggaaacggggatacaggagcctggcggcgccgaagcacccgcgcaggccaagacggctccccaggccaagacggctccccaggccgcacacagccatgagccaggctgcttgacgggacctgaccccgccaggttcccgtccagtccgcggggtgactccacccacagctggccgcgccaccgctcaggagccatgttgtcagaagtcctactggtgtctgctccggggaaagtcatccttcatggagaacatgccgtggtacatggcaaggtagcactggctgtatccttgaacttgagaacattcctccggcttcaaccccacagcaatgggaaagtggacctcagcttacccaacattggtatcaagcgggcctgggatgtggccaggcttcagtcactggacacaagctttctggagcaaggtgatgtcacaacacccacctcagagcaagtggagaagctaaaggaggttgcaggcttgcctgacgactgtgctgtcaccgagcgcctggctgtgctggcctttctttacttatacctgtccatctgccggaagcagagggccctgccgagcctggatatcgtagtgtggtcggagctgccccccggggcgggcttgggctccagcgccgcctactcggtgtgtctggcagcagccctcctgactgtgtgcgaggagatcccaaacccgctgaaggacgg

SEQ ID NO: 153625 - DNA, 2747 bp, Homo sapiens
  Payload ID: 10212
  Gene Symbol: MVK
  Gene Name: mevalonate kinase
  Uniprot ID: Q03426
  ENST ID: ENST00000539575
  CDS Start-End: 17-1207
aggattcccaggagccatgttgtcagaagtcctactggtgtctgctccggggaaagtcatccttcatggagaacatgccgtggtacatggcaaggtagcactggctgtatccttgaacttgagaacattcctccggcttcaaccccacagcaatgggaaagtggacctcagcttacccaacattggtatcaagcgggcctgggatgtggccaggcttcagtcactggacacaagctttctggagcaaggtgatgtcacaacacccacctcagagcaagtggagaagctaaaggaggttgcaggcttgcctgacgactgtgctgtcaccgagcgcctggctgtgctggcctttctttacttatacctgtccatctgccggaagcagagggccctgccgagcctggatatcgtagtgtggtcggagctgccccccggggcgggcttgggctccagcgccgcctactcggtgtgtctggcagcagccctcctgactgtgtgcgaggagatcccaaacccgctgaaggacggggattgcgtcaacaggtggaccaaggaggatttggagctaattaacaagtgggccttccaaggggagagaatgattcacgggaacccctccggagtggacaatgctgtcagcacctggggaggagccctccgataccatcaagggaagatttcatccttaaagaggtcgccagctctccagatcctgctgaccaacaccaaagtccctcgcaataccagggcccttgtggctggcgtcagaaacaggctgctcaagttcccagagatcgtggcccccctcctgacctcaatagatgccatctccctggagtgtgagcgcgtgctgggagagatgggggaagccccagccccggagcagtacctcgtgctggaagagctcattgacatgaaccagcaccatctgaatgccctcggcgtgggccacgcctctctggaccagctctgccaggtgaccagggcccgcggacttcacagcaagctgactggcgcaggcggtggtggctgtggcatcacactcctcaagccagggctggagcagccagaagtggaggccacgaagcaggccctgaccagctgtggctttgactgcttggaaaccagcatcggtgcccccggcgtctccatccactcagccacctccctggacagccgagtccagcaagccctggatggcctctgagaggagcccacgacactgcagccccacccagatgcccctttctggattattctgggggctgcagttcgactctgtgctggccagcgagcgcccagctcctgacactgctggagaggccccagccgcttggcgatgccagccaagctctgcagtcccagcggtgggacctagggaggcatggtctgccctctgcatcctctggagccagccgagcaggaggcctaggagggtcctctgagactccagacctgaggcgagaagggctgcttccctgaagctcccacagtcccatctgcttcaggcccccgccttggcctgtgttcttcctggccgcctgggtccaatgctcaggtgctggggcctggttcccggagaagtgtgccttctctctcccttttcagggaccgccccctgtctctcagggccaggcctctccctcctccaggaagccttcccctaccccttgtcgcccctccctcccagagcacctgctgtctgggtggctcactcagcacttggtgtggccttcccttctacctagcgggatggggctcccccaggggctgtcccggaggcggtgggcctggttaaataaggcagggtttatatgcactttcttccgatctgtacctgagaggtttgtggaaaagatggcaaatggggaataaaaagattttgtgtcaacagtagagactccaggccaccagcacctccctctgtccctgtcccctctccagctgtttcctccatggagctcttcagcaatggagggaaatagggtttggggtcactttgttgtgcgtcttggggatgaggtggcttttcccagatggcccttgctggagagggactgggacacggctctcagtccatcagcacaactctaggctgctgctgcggagggagaagttgagcttcctagctccagaatcacaagcacccacgagagcacagacctgtgtaagacaggaaagcagaacctgccatcgctcctggggcgcgccttcctttctgaaatgaactggctggatggagaaaacagactcaaatgttctggcccgggtgcctggcactccccacccccgccccccaccggccctatttgaactttatattgcagtcagcttggtgctttccgaaatgccattagccatcaggaaacccttgtagttggtgccttgccagccagaacctctgggacccacggacctgcaaagaggccgagtggaaaggtgggggccggcgcagggatttcaggatgaggtgaaagcgattcagtgcgcgtctgcccttggccactagggggcagctggcggccttccctgctgttgtcttcctgcagggtgagaggagcaggagccgagctccacccccacgccagccttgggcccggcctgggatcactgctgggaacgtgagagtgaagggaggacgcctaccccagcttaacttgtagaaatggccccagatcactgatggctgttccctgccccttcccttcaaaacacaacgcataaagcagtaatactaattaatactg

SEQ ID NO: 153626 - DNA, 702 bp, Homo sapiens
  Payload ID: 10212
  Gene Symbol: MVK
  Gene Name: mevalonate kinase
  ENST ID: ENST00000545774
  CDS Start-End: 57-308
ggcgcggaggggcggcggccggggaggcggcggcggcggcaggattcccaggagccatgttgtcagaagtcctactggtgtctgctccggggaaagtcatccttcatggagaacatgccgtggtacatggcaaggtagcactggctgtatccttgaacttgagaacattcctccggcttcaaccccacagcaatgggaaagtggacctcagcttacccaacattggtatcaagcgggcctgggatgtggccaggcttcagtcactggacacaagctttctgggtggaccaaggaggatttggagctaattaacaagtgggccttccaaggggagagaatgattcacgggaacccctccggagtggacaatgctgtcagcacctggggaggagccctccgataccatcaagggaagatttcatccttaaagaggtaacctgggggtggagcagcacattcagccatggctgcattgatgtgtgcagggggcagagctctgcacctttgggaagtaccataggaggcaggtgtccctggctcttcatcccccaatgtggccctcacagtgcactagctgcaaggaagcaggggtggtggggaagacctgctctctccttctccccttcagctcttaaattgcagagatatcagaaagggaaagtcatgcatggctgtgcccgtagactctcagctgctcattca

SEQ ID NO: 153627 - DNA, 1296 bp, Homo sapiens
  Payload ID: 10212
  Gene Symbol: MVK
  Gene Name: mevalonate kinase
  ENST ID: ENST00000537237
  CDS Start-End: 75-428
gggagctgctccggcttcggcgcggaggggcggcggccggggaggcggcggcggcggcaggattcccaggagccatgttgtcagaagtcctactggtgtctgctccggggaaagtcatccttcatggagaacatgccgtggtacatggcaaggtagcactggctgtatccttgaacttgagaacattcctccggcttcaaccccacagcaatgggaaagtggacctcagcttacccaacattggtatcaagcgggcctgggatgtggccaggcttcagtcactggacacaagctttctggggtctcactctgttatgcagcctggagtacagtggtgcgaccacagctcactgtttcttcaacctcctgggctcaagcgatcctcctgcctcagccttctgagtagctgggaccacagagcaaggtgatgtcacaacacccacctcagagcaagtggagaagctaaaggaggttgcaggcttgcctgacgactgtgctgtcaccgagcgcctggctgtgctggcctttctttacttatacctgtccatctgccggaagcagagggccctgccgagcctggatatcgtagtgtggtcggagctgccccccggggcgggcttgggctccagcgccgcctactcggtgtgtctggcagcagccctcctgactgtgtgcgaggagatcccaaacccgctgaaggacggggattgcgtcaacaggtggaccaaggaggatttggagctaattaacaagtgggccttccaaggggagagaatgattcacgggaacccctccggagtggacaatgctgtcagcacctggggaggagccctccgataccatcaagggaagatttcatccttaaagagttcccagagatcgtggcccccctcctgacctcaatagatgccatctccctggagtgtgagcgcgtgctgggagagatgggggaagccccagccccggagcagtacctcgtgctggaagagctcattgacatgaaccagcaccatctgaatgccctcggcgtgggccacgcctctctggaccagctctgccaggtgaccagggcccgcggacttcacagcaagctgactggcgcaggcggtggtggctgtggcatcacactcctcaagccagggctggagcagccagaagtggaggccacgaagcaggccctgaccagctgtggctttgactgcttggaaaccagcatcggtgcccccggcgtctccatccactcagccacctccctggacagccgagtccagcaagccctggatggcctctgagagg

SEQ ID NO: 153628 - DNA, 1591 bp, Homo sapiens
  Payload ID: 10212
  Gene Symbol: MVK
  Gene Name: mevalonate kinase
  ENST ID: ENST00000629016
  CDS Start-End: 17-268
aggattcccaggagccatgttgtcagaagtcctactggtgtctgctccggggaaagtcatccttcatggagaacatgccgtggtacatggcaaggtagcactggctgtatccttgaacttgagaacattcctccggcttcaaccccacagcaatgggaaagtggacctcagcttacccaacattggtatcaagcgggcctgggatgtggccaggcttcagtcactggacacaagctttctgggtggaccaaggaggatttggagctaattaacaagtgggccttccaaggggagagaatgattcacgggaacccctccggagtggacaatgctgtcagcacctggggaggagccctccgataccatcaagggaagatttcatccttaaagaggtcgccagctctccagatcctgctgaccaacaccaaagtccctcgcaataccagggcccttgtggctggcgtcagaaacaggctgctcaagttcccagagatcgtggcccccctcctgacctcaatagatgccatctccctggagtgtgagcgcgtgctgggagagatgggggaagccccagccccggagcagtacctcgtgctggaagagctcattgacatgaaccagcaccatctgaatgccctcggcgtgggccacgcctctctggaccagctctgccaggtgaccagggcccgcggacttcacagcaagctgactggcgcaggcggtggtggctgtggcatcacactcctcaagccagggctggagcagccagaagtggaggccacgaagcaggccctgaccagctgtggctttgactgcttggaaaccagcatcggtgcccccggcgtctccatccactcagccacctccctggacagccgagtccagcaagccctggatggcctctgagaggagcccacgacactgcagccccacccagatgcccctttctggattattctgggggctgcagttcgactctgtgctggccagcgagcgcccagctcctgacactgctggagaggccccagccgcttggcgatgccagccaagctctgcagtcccagcggtgggacctagggaggcatggtctgccctctgcatcctctggagccagccgagcaggaggcctaggagggtcctctgagactccagacctgaggcgagaagggctgcttccctgaagctcccacagtcccatctgcttcaggcccccgccttggcctgtgttcttcctggccgcctgggtccaatgctcaggtgctggggcctggttcccggagaagtgtgccttctctctcccttttcagggaccgccccctgtctctcagggccaggcctctccctcctccaggaagccttcccctaccccttgtcgcccctccctcccagagcacctgctgtctgggtggctcactcagcacttggtgtggccttcccttctacctagcgggatggggctcccccaggggctgtcccggaggcggtgggcctggttaaataaggcagggtttatatgcactttcttccgatctgtacctgagaggtttgtggaaaagatggcaaatggggaataaaaagattttgtgtcaac

SEQ ID NO: 153629 - DNA, 2591 bp, Homo sapiens
  Payload ID: 10212
  Gene Symbol: MVK
  Gene Name: mevalonate kinase
  ENST ID: ENST00000625889
  CDS Start-End: 17-1051
aggattcccaggagccatgttgtcagaagtcctactggtgtctgctccggggaaagtcatccttcatggagaacatgccgtggtacatggcaaggtagcactggctgtatccttgaacttgagaacattcctccggcttcaaccccacagcaatgggaaagtggacctcagcttacccaacattggtatcaagcgggcctgggatgtggccaggcttcagtcactggacacaagctttctggagcaaggtgatgtcacaacacccacctcagagcaagtggagaagctaaaggaggttgcaggcttgcctgacgactgtgctgtcaccgagcgcctggctgtgctggcctttctttacttatacctgtccatctgccggaagcagaggtggaccaaggaggatttggagctaattaacaagtgggccttccaaggggagagaatgattcacgggaacccctccggagtggacaatgctgtcagcacctggggaggagccctccgataccatcaagggaagatttcatccttaaagaggtcgccagctctccagatcctgctgaccaacaccaaagtccctcgcaataccagggcccttgtggctggcgtcagaaacaggctgctcaagttcccagagatcgtggcccccctcctgacctcaatagatgccatctccctggagtgtgagcgcgtgctgggagagatgggggaagccccagccccggagcagtacctcgtgctggaagagctcattgacatgaaccagcaccatctgaatgccctcggcgtgggccacgcctctctggaccagctctgccaggtgaccagggcccgcggacttcacagcaagctgactggcgcaggcggtggtggctgtggcatcacactcctcaagccagggctggagcagccagaagtggaggccacgaagcaggccctgaccagctgtggctttgactgcttggaaaccagcatcggtgcccccggcgtctccatccactcagccacctccctggacagccgagtccagcaagccctggatggcctctgagaggagcccacgacactgcagccccacccagatgcccctttctggattattctgggggctgcagttcgactctgtgctggccagcgagcgcccagctcctgacactgctggagaggccccagccgcttggcgatgccagccaagctctgcagtcccagcggtgggacctagggaggcatggtctgccctctgcatcctctggagccagccgagcaggaggcctaggagggtcctctgagactccagacctgaggcgagaagggctgcttccctgaagctcccacagtcccatctgcttcaggcccccgccttggcctgtgttcttcctggccgcctgggtccaatgctcaggtgctggggcctggttcccggagaagtgtgccttctctctcccttttcagggaccgccccctgtctctcagggccaggcctctccctcctccaggaagccttcccctaccccttgtcgcccctccctcccagagcacctgctgtctgggtggctcactcagcacttggtgtggccttcccttctacctagcgggatggggctcccccaggggctgtcccggaggcggtgggcctggttaaataaggcagggtttatatgcactttcttccgatctgtacctgagaggtttgtggaaaagatggcaaatggggaataaaaagattttgtgtcaacagtagagactccaggccaccagcacctccctctgtccctgtcccctctccagctgtttcctccatggagctcttcagcaatggagggaaatagggtttggggtcactttgttgtgcgtcttggggatgaggtggcttttcccagatggcccttgctggagagggactgggacacggctctcagtccatcagcacaactctaggctgctgctgcggagggagaagttgagcttcctagctccagaatcacaagcacccacgagagcacagacctgtgtaagacaggaaagcagaacctgccatcgctcctggggcgcgccttcctttctgaaatgaactggctggatggagaaaacagactcaaatgttctggcccgggtgcctggcactccccacccccgccccccaccggccctatttgaactttatattgcagtcagcttggtgctttccgaaatgccattagccatcaggaaacccttgtagttggtgccttgccagccagaacctctgggacccacggacctgcaaagaggccgagtggaaaggtgggggccggcgcagggatttcaggatgaggtgaaagcgattcagtgcgcgtctgcccttggccactagggggcagctggcggccttccctgctgttgtcttcctgcagggtgagaggagcaggagccgagctccacccccacgccagccttgggcccggcctgggatcactgctgggaacgtgagagtgaagggaggacgcctaccccagcttaacttgtagaaatggccccagatcactgatggctgttccctgccccttcccttcaaaacacaacgcataaagcagtaatactaattaatactg

SEQ ID NO: 153630 - DNA, 6124 bp, Homo sapiens
  Payload ID: 10213
  Gene Symbol: MEX3A
  Gene Name: mex-3 RNA binding family member A
  Uniprot ID: A1L020
  ENST ID: ENST00000532414
  CDS Start-End: 1-1563
atgcctagtctagtggtatctggaataatggaaagaaatgggggctttggagaactaggatgtttcgggggaagcgctaaggaccgagggctgctggaagacgagcgcgcccttcagctggctctcgatcaactctgcctcctgggtttgggggagccccccgcccccacggcgggcgaggacgggggaggtggggggggcggcgcccccgcgcagccggccgcccccccgcagccggccccgccgccgccgcccgcggcgcccccggccgccccgacggcggcccccgcagcgcagacgccccagccccccaccgcccccaaaggggcgagcgacgccaagctctgcgctctctacaaagaggccgagctgcgcctgaagggcagcagcaacaccacggagtgtgttcccgtgcccacctccgagcacgtggccgagatcgtgggcaggcaaggctgcaagattaaggccttgagggccaagaccaacacctacatcaagacaccggtgaggggcgaggaaccagtgttcatggtgacagggcgacgggaggacgtggccacagcccggcgggaaatcatctcagcagcggagcacttctccatgatccgtgcctcccgcaacaagtcaggcgccgcctttggtgtggctcctgctctgcccggccaggtgaccatccgtgtgcgggtgccctaccgcgtggtggggctggtggtgggccccaaaggggcaaccatcaagcgcatccagcagcaaaccaacacatacattatcacaccaagccgtgaccgcgaccccgtgttcgagatcacgggtgccccaggcaacgtggagcgtgcgcgcgaggagatcgagacgcacatcgcggtgcgcactggcaagatcctcgagtacaacaatgaaaacgacttcctggcggggagccccgacgcagcaatcgatagccgctactccgacgcctggcgggtgcaccagcccggctgcaagcccctctccaccttccggcagaacagcctgggctgcatcggcgagtgcggagtggactctggctttgaggccccacgcctgggtgagcagggcggggactttggctacggcgggtacctctttccgggctatggcgtgggcaagcaggatgtgtactacggcgtggccgagactagccccccgctgtgggcgggccaggagaacgccacgcccacctccgtgctcttctcctctgcctcctcctcctcctcctcttccgccaaggcccgcgctgggcccccgggcgcacaccgctcccctgccacttccgcgggacccgagctggccggactcccgaggcgccccccgggagagccgctccagggcttctctaaacttggtgggggcggcctgcggagccccggcggcgggcgggattgcatggtctgctttgagagcgaagtgactgccgcccttgtgccctgcggacacaacctgttctgcatggagtgtgcagtacgcatctgcgagaggacggacccagagtgtcccgtctgccacatcacagccacgcaagccatccgaatattctcctaagccccgtgccccatgcctccggggcccactccactgggcccaccctggacctgttttccactaaagccttttggaaagcggtgatttgaggggcaaggtgcttagagatactcgctcgctggggaaggggggagggaggcagtggtggctggagggtgcgccactttcagagcctctggtcaccctgtcctggaaagattgggagggggccagactgaaaattttactagagttacaactctgatacctcaacacacccttaaatctggaagcagctaagagaaacttttgttttgccagaggtggccactaaggcattctgacgccctctgcccacctcccccgctgtgtgtcactccaccccttcttccgaggagggggtgggtaaaagggagagggagaattaccacctgtatctagaggtgctctttgcaatccctaagccctctggtcctgacctccgacctcctaacatgaccctttacctcccaccccacccccatatcctgtttgggaaactgtcaccagtttccagcagtgtaagggagttggagtcctatcagaagttgcatagatcttctaggggttggggagagaagcatgtcaatcgtttctgtggctgaaaggctcagaagccatctgtccccacaaagctgggctagaggaatctggagaggagtcctcctctctgcccctgtcccctgcagtgtttcccttcactctctccgcctatcttcccttcctttgggatcttccctttcctcaactctttcctttccctccagctctttgctttgctttcttttggtggctgtcactcccagctctgtcttgttccttgtctttgtctttcttcccttccccctgcccctgcccctaccagcccagctttggggacaccatccttctggggagaagtagggggaggaatatttggatggtccctccattcctcttcaggcatctggaggccctctcccccactcctccaaagaaacatctcaaattattgatggaatgtatccccattctcagtgaaaatgtgaggaggggactaatactggggtaaagggtcaaacccccaccttcatcactatgggcattatatttagggagtagttcttgggctggattttctggttgtggaagtgggggcgccagagtagtgtgtctgctatttaaaggagcaggaaagggcgtgaggcaggaggagagactggtggagggaagagctgctcctcccatgcagtgcccgactccctgcacccctctcaacctgacctgaacctttattgaatccttattagcttgaatccttattagcttgaatcctccatgcaaatcatggagtctgtgtcccacctgatgtggttgaggagaagccaggtcttcaaagaggggtcagcctggggcaaagcaggactggggggaggtgggcagcagggcctattctgagaatcacatattgttacaggccttgcaccccctttgctgcttccctcctgctcatttggggctgccaccagctctccaccctcctggttccgctggccgggccaagagaggatggagggatgggagtcccaggagatccttgtaaatagtggggtgggactgttctgagtgatcacccgagcacttaaagctccagagtcccattcttcctggatggagcaggtggaggtgcagaggggatttcctcctctccttcctcctgtcgagaattaacacctctccacagccttcccctccagaacaccagccagggaggggtggggaaggaggtcacagccaagaaaactgccctgtgacgacttccctccttcccgcctatgtgagccatcctgagatgtctgtacaatagaaaccaaaccaaatgggcaccctcggttgccggggggcaggtggggaggggggtgggaagaagggatgtctgtctgtcgtccccctccccctctccactctttacccacaaaggcagaagactgttacactagggggctcagcaaattcaatcccacccttaccaattgagccaaacctagaaacaaacacaaaacacgaatagtgagagacaaaatagaggagagaaagagagcatgagagggagcgagacaggcgaccaacacagaggagagaaaacaaaaatagcaaaaaaaaaaaaaaaaagcagttctttataatttaatattctattttaataaaggcgtttattaccatataaatgtagcaaagaacctgggctaatatgaaaaaaaaagactttttattaggtaatttattatatgaaaaggatattttattttatgataaagtgatccttaaaaaaataaaaaaactttagaaggtttagaatatatgtagggagagaagaagaaaaaaatacatttgtattcagagttaaatcttaaaaaaaaaaagtgtttttaatatatgtttgggtttacgttgcttttttcccccactttttttttggggaggaatgtcatttgcttttcttgggggagcatcccgggggtgaatggtggagagaggagctgggggaacccggtccctcctgggacccttccagtagattggatttcactccatggactcctcctcccctctccccctccccctcaggggagccggcagagccaaacaaagaaagggattaacaagaaaggaagaagctgtaggactaaggactgaggatcctggggtgtcccccaccactttcccctgccctgtcgcaggggcaagtgaggagggggaatccagaattaaggcctagcaggcctataggaaccctcagagatgtgtgagatttaagagatctagatttttttttaaccaaaaacaagagagaaagagaagaaaaagagaaaccgaggggtttaaaagaaaagaatactacaaaataataattattaataataataattcaaatttatttcatataatcctagagagagaaagaaacaattactagttacttagtagacaatattaagatagcttaaagtttagtagcattgagggcccctgggtccagtagaatgtataaaagttgtaaggaaaagataaatagaggagggaagtggctgagtccaccctgagttgcccaatcttcagataccagggttggatcaggttgctagtttaagattgggagcttccagtctgctggggttgattctgagaatccttggatttttaaattgtaggacaaagaaatgaggggttcatttcccagggtcttggaaaggatgcacactgatcatctcaataagacaggggctgggttgggggcagcagaggaggccaagcacattcacctgcacccctagtacctgggcagcccatactccaatgtggtatgtcccctcctggggctcccagctcaaaccctcccatgcctgcttcccccaggcctaactgaggaagtccttcttgaagtgtgacctcggtccacttctctacagattgatttaagagcctgggaagtcattccacaaacagacacacatgcacacacgcttctcaccttcagagcttcaagagcactgaggcgatcagtcccctacccctgttcccatccagctttccacttagctttgacctccatggcagcagtagcagtaacaatctcagtaattgttctttaaagctgactcgttcttcacctacttgcaaagtgctttcttgtctcataaaagttagattccaagaaggacttcccacggagtggagtggaaacactgtccttgaaggcctgggagaaaggcatccccatgggcacagaggctggggaaaggcacagggactttgggtgaccctaaccctgaccctctgctccagttcacctccatctatatgtgttcaggtaggggtcatctactgtaccctggcctgggaacacattgccctccccacacaaaactggagggcttggcttctgcgtgtgagaaatcaacatttttaaagcacttgccttctaccaaccccagcttgcaatcactgggccttcccctcctatccaaggggttggaggggccccttggctctccttttggcaggaggagcctgcttcattacaccaatgactctgccatccccctccctggccctagaccccaaacacatctccctctacccaatttactcttctcgccccacctagggacagattccccctgctctttttgtcctagaaaccccgctagtttgggatggtagcgtctggggtggggagggcttccccttccccactcgagggtgcgggtggggaagggggggtgggtggagacagccctggggcagggaggatggtctctccactgtagaaagtagagtaggattgtggtcagacttaatttgaggcatctagtgaagacacgtacaaatccaccaaggaaaaagatttcaaaagcaaaataaaagcgggaaataaaacagacccaagaataatcaagtcaaagtgatgttgcacaaaatgcagagaaaccaagaagggggagggttaatgtattaaatgtgctattaagaacttaattttattaaaagtactattacttaa

SEQ ID NO: 153631 - DNA, 3528 bp, Homo sapiens
  Payload ID: 10214
  Gene Symbol: MEX3B
  Gene Name: mex-3 RNA binding family member B
  Uniprot ID: Q6ZN04
  ENST ID: ENST00000329713
  CDS Start-End: 437-2146
tcaagaggcggggaggagaggaggaaaaagcgctgagtgagggcgggcgggcgggcgggagggagggagtggaggagccggggaggggctccttaaagaaacgcttctgtcgctcgcctgctcgcttttcgctcggcattgcggccagccagccgggcactcggggggcacgcgcggccaccgctagagctctgcccccaccccacccgccagcaggtctggggtggggacccaggtgggggctcctgcagccactgcccggtgcggaccgcacggagcgacccactcctcccagcaccgaggaagaagcaacggagccctcagcaggcgaccggcctccccgcccctgaccacccgcttcccggctgcctttgtggccgcagcttctcgccgccgagccgagggccggcgggggcgcggcgcgcacggccgagcgatgcccagctcgctgttcgcagacctggagcgcaacggcagcggcggcggcggcggcggcagcagcggagggggagagaccctggatgaccaaagagccctgcagctcgcgctcgaccagctctccctgctggggctggacagtgacgagggcgcctctctgtacgacagcgagccgcgcaagaagagcgtgaacatgaccgagtgcgtgccagtacccagttctgagcatgtcgccgagatcgtggggcggcaaggttgtaaaatcaaagcgctgcgggcgaagaccaatacttacatcaagaccccagttcgcggggaggagcctgtctttgttgtgacgggcaggaaggaggatgtggccatggctcggagggagatcatctctgctgccgagcacttctccatgatccgcgcctcccggaataagaacacggcactcaacggcgcggtgcctgggccgcccaacctgcccgggcagaccaccatccaagtgcgggtaccctaccgcgtggtggggctcgtggtggggcccaaaggcgccacaatcaagcgcatccagcagcagacgcacacgtacatcgtgacgcccagccgggataaggagccggtgttcgaggtgaccggcatgccagagaacgtggatcgcgctcgagaggagattgaggcgcacattgctctgcgtaccggcggcatcattgagctcacagacgagaacgacttccacgccaacggcaccgatgtgggcttcgatctgcatcatgggtccggcgggtccggcccaggcagcctctggagcaagcccacccccagcatcacgcccacccccggccgcaagcctttctctagctaccgcaacgacagctccagctcgcttggcagtgcttccacagactcttatttcggcggcgggaccagcagcagcgcagcggctacccagcgcctggcggactacagcccccctagccccgccctgagctttgcgcacaacggaaacaataacaataacggcaatgggtacacctacacagcggggggagaagcctcagtgccatcccccgacggctgccccgagctgcagcccacttttgacccggctcccgctcccccacctggggcaccacttatctgggcccagttcgagcggtccccgggaggcggacctgcagctccggtatcttcttcctgctcttcttctgcatcttcgtctgcttcttcctcctccgtggtcttccccgggggtggcgccagtgcgccctccaacgccaacctggggctattggtgcaccgccggctgcaccctggcaccagctgcccgcgcctgtctccacccttgcacatggccccgggggcgggagagcaccacctggctcgccgggtgcgcagcgacccgggtggaggaggcctggcctacgccgcttatgccaacgggctgggggcacagctgcctggcttgcagccgtcggacacgtcgggctcctcctcttcgtccagctcctcctccagctcttcatcctcttcctccgggcttcggcgtaaaggcagccgcgactgctccgtgtgcttcgagagcgaagtgattgccgcgctggtgccctgtggccacaacctcttctgcatggagtgcgccaatcgcatctgtgagaagagcgagcccgagtgcccggtctgccacaccgcggtcactcaggccatccgcatcttttcttaaaggcagcgggcgctgctagtgcgcaccgtgctgggggaagggggaacccctccccaccctctttccccagcgctcgcctgcctccctgggtgccccccctctcccttctccttcccggccccaccaacactctgagatccgagaggagcttggaaagctgtagtatccgctcatttttaaaatttaatttttaagtaaaggaatttgccaggatatctgcatcaagagtactgtagcctgggaaacctgaacacctgaaatgcatgctctataaataataggaacggcgacattctagtaatgatagtttttacactgtacttaataggaagcttccaaaagaagaaaaccccacaagttttccattttcttaaagtaggaaaaaatgaacagtaataattatgatgaagatgatagtagtgctatgggatgtgtggactgtttagtgtgttcccctttgtgggtgggttcctatgatacttattatagaacacagtggatcctttttgaatgttcgtggaagggccaggagttcctgtgaaaccaggatactgcagctttattaaagttaaagaaactgtaacatatctcttatatattaaaaacgtttaaaagttttaaagagaaattgcattaatacagattgaagtattttattcttttttgacttgaaaaattatatttcatattgcaaagatgtttacaagtattttaatttaagttcagtgaacttttttgtagctgggttaaatctttttattttagtatggccttatggcaaagaacactgtattattttaataatcacacaattgtgacggaattacaaccataaaatgtgtaatgttttgaacagtattctgttgggatggagattttataggttcagacaaatcttctagatctgcttcacccagcatattttctattcagtgatataaagcatattttattctatattattacaaaaacggaaatgtataaacatgtcaaaaagaactgttgatgctttctaacatttgtataaatagaattcagtgcaagttacaaaaattctgttgcaccactctagttttagtatttctattttaatacatttgtttaccacttgtttatgtatatgtaggtgatgttacttgagcttaaatgtactttactgagcaaagtttaaaaaacaaagtatattttattttatgataaagggcctttaacctcatggtcaaatactaatattatatttgctgagacaagatttgaaattgtatcaagagttttatttttctgacatttaaagttctacataataaaggtaaaacttaagtaatggtgctacttcattttttaagtatttctatataaataaaatattgaagaaaatctta

SEQ ID NO: 153632 - DNA, 4333 bp, Homo sapiens
  Payload ID: 10214
  Gene Symbol: MEX3B
  Gene Name: mex-3 RNA binding family member B
  Uniprot ID: Q6ZN04
  ENST ID: ENST00000558133
  CDS Start-End: 415-891
ggaaaaagcgctgagtgagggcgggcgggcgggcgggagggagggagtggaggagccggggaggggctccttaaagaaacgcttctgtcgctcgcctgctcgcttttcgctcggcattgcggccagccagccgggcactcggggggcacgcgcggccaccgctagagctctgcccccaccccacccgccagcaggtctggggtggggacccaggtgggggctcctgcagccactgcccggtgcggaccgcacggagcgacccactcctcccagcaccgaggaagaagcaacggagccctcagcaggcgaccggcctccccgcccctgaccacccgcttcccggctgcctttgtggccgcagcttctcgccgccgagccgagggccggcgggggcgcggcgcgcacggccgagcgatgcccagctcgctgttcgcagacctggagcgcaacggcagcggcggcggcggcggcggcagcagcggagggggagagaccctggatgaccaaagagccctgcagctcgcgctcgaccagctctccctgctggggctggacagtgacgagggcgcctctctgtacgacagcgagccgcgcaagaagagcgtgaacatgaccgagtgcgtgccagtacccagttctgagcatgtcgccgagatcgtggggcggcaaggtaggtcgaggagggatggggaggtgggtgggggtggtgtagggtctcaggccactgcctcgaggggaaggcgtgttcagtatcgggatccgcggcgtggggtgccttggggagagaggaagagccgcgcgatgggccggcgccccagacaaagaaagtgcaggcaggctgtctcccggagccgcgccgctgccctggcgggatgcactttcttctgctaaaatcactgccttctcccctaacgccccccaaccagcccacctccagaaagacaatttaaatgtaagatgcttgggggagggggcctttgatcagtcctttgggaggaggaaggaggaggagtgagcataggatgggaggaggattctggatttctgcaaagcggaatggagcccagaggaggaacaatgggtcccgggactcacaccccaccccctacccccagtcgaccagcgctgaggcatcgcgacttcagctgccttccccgagccccttccccgtgtcttcagagctgacggcgcgcccagctggatcccagcggcatctccccagatgacttttctgggattctcgggtttggttcgggacgactgcagtcactgggggagggccaggcagccaatgggctgttcctcgagcgcctcgcgggtgggatccgctgcccagcccgtggcgcggcccgaggtcagtgagggagacgccccctttccgcccatctcttgtcctgccgtctcgctgtcctggacgcgggctgtccccggtccccgcggttaccccaggataatgggcgtgtctgtctctctctcccactccctcctccgcaccctggttcgtaggttgtaaaatcaaagcgctgcgggcgaagaccaatacttacatcaagaccccagttcgcggggaggagcctgtctttgttgtgacgggcaggaaggaggatgtggccatggctcggagggagatcatctctgctgccgagcacttctccatgatccgcgcctcccggaataagaacacggcactcaacggcgcggtgcctgggccgcccaacctgcccgggcagaccaccatccaagtgcgggtaccctaccgcgtggtggggctcgtggtggggcccaaaggcgccacaatcaagcgcatccagcagcagacgcacacgtacatcgtgacgcccagccgggataaggagccggtgttcgaggtgaccggcatgccagagaacgtggatcgcgctcgagaggagattgaggcgcacattgctctgcgtaccggcggcatcattgagctcacagacgagaacgacttccacgccaacggcaccgatgtgggcttcgatctgcatcatgggtccggcgggtccggcccaggcagcctctggagcaagcccacccccagcatcacgcccacccccggccgcaagcctttctctagctaccgcaacgacagctccagctcgcttggcagtgcttccacagactcttatttcggcggcgggaccagcagcagcgcagcggctacccagcgcctggcggactacagcccccctagccccgccctgagctttgcgcacaacggaaacaataacaataacggcaatgggtacacctacacagcggggggagaagcctcagtgccatcccccgacggctgccccgagctgcagcccacttttgacccggctcccgctcccccacctggggcaccacttatctgggcccagttcgagcggtccccgggaggcggacctgcagctccggtatcttcttcctgctcttcttctgcatcttcgtctgcttcttcctcctccgtggtcttccccgggggtggcgccagtgcgccctccaacgccaacctggggctattggtgcaccgccggctgcaccctggcaccagctgcccgcgcctgtctccacccttgcacatggccccgggggcgggagagcaccacctggctcgccgggtgcgcagcgacccgggtggaggaggcctggcctacgccgcttatgccaacgggctgggggcacagctgcctggcttgcagccgtcggacacgtcgggctcctcctcttcgtccagctcctcctccagctcttcatcctcttcctccgggcttcggcgtaaaggcagccgcgactgctccgtgtgcttcgagagcgaagtgattgccgcgctggtgccctgtggccacaacctcttctgcatggagtgcgccaatcgcatctgtgagaagagcgagcccgagtgcccggtctgccacaccgcggtcactcaggccatccgcatcttttcttaaaggcagcgggcgctgctagtgcgcaccgtgctgggggaagggggaacccctccccaccctctttccccagcgctcgcctgcctccctgggtgccccccctctcccttctccttcccggccccaccaacactctgagatccgagaggagcttggaaagctgtagtatccgctcatttttaaaatttaatttttaagtaaaggaatttgccaggatatctgcatcaagagtactgtagcctgggaaacctgaacacctgaaatgcatgctctataaataataggaacggcgacattctagtaatgatagtttttacactgtacttaataggaagcttccaaaagaagaaaaccccacaagttttccattttcttaaagtaggaaaaaatgaacagtaataattatgatgaagatgatagtagtgctatgggatgtgtggactgtttagtgtgttcccctttgtgggtgggttcctatgatacttattatagaacacagtggatcctttttgaatgttcgtggaagggccaggagttcctgtgaaaccaggatactgcagctttattaaagttaaagaaactgtaacatatctcttatatattaaaaacgtttaaaagttttaaagagaaattgcattaatacagattgaagtattttattcttttttgacttgaaaaattatatttcatattgcaaagatgtttacaagtattttaatttaagttcagtgaacttttttgtagctgggttaaatctttttattttagtatggccttatggcaaagaacactgtattattttaataatcacacaattgtgacggaattacaaccataaaatgtgtaatgttttgaacagtattctgttgggatggagattttataggttcagacaaatcttctagatctgcttcacccagcatattttctattcagtgatataaagcatattttattctatattattacaaaaacggaaatgtataaacatgtcaaaaagaactgttgatgctttctaacatttgtataaatagaattcagtgcaagttacaaaaattctgttgcaccactctagttttagtatttctattttaatacatttgtttaccacttgtttatgtatatgtaggtgatgttacttgagcttaaatgtactttactgagcaaagtttaaaaaacaaagtatattttattttatgataaagggcctttaacctcatggtcaaatactaatattatatttgctgagacaagatttgaaattgtatcaagagttttatttttctgacatttaaagttctacataataaaggtaaaacttaagtaatggtgctacttcattttttaagtatttctatataaataaaatattgaag

SEQ ID NO: 153633 - DNA, 3781 bp, Homo sapiens
  Payload ID: 10215
  Gene Symbol: MEX3C
  Gene Name: mex-3 RNA binding family member C
  Uniprot ID: Q5U5Q3
  ENST ID: ENST00000406189
  CDS Start-End: 1-1980
atgcccagcggcagctccgcggccctggccctggcggcggccccggcccccctgccgcagccgcccccgccgccgccgccgccaccgccgcctctgccgccgccctcgggcggcccggagctcgagggggacgggctcctgctgagggagcgcttggccgcgctaggcctcgacgaccccagcccggcggagcccggcgccccggcgcttcgggccccggcagcggcggcgcagggccaggcccggcgggcggcggagctgtctccagaggagcgggctccgcccggccggcccggggccccggaggcggccgagctggagctggaagaggacgaggaggagggggaggaagcggagctggacggagacctgctggaggaggaggagctggaggaagcagaggaggaggaccggtcgtcgctgctgctgctgtcgccgcccgcggccaccgcctctcagacccagcagatcccgggcgggtccctggggtctgtgctgctgccagccgccaggttcgatgcccgggaggcggcggccgcggcggcggcggcgggggtgctgtacggaggggacgatgcccagggcatgatggcggcgatgctgtcccacgcctacggccccggcggttgtggggcggcggcggccgccctgaacggggagcaggcggccctgctccggagaaagagcgtcaacaccaccgagtgcgtcccggtgcccagctccgagcacgtcgccgagatcgtcggccgccagggttgtaaaattaaagcactgagagccaagacaaacacgtatatcaagactcctgttcgtggtgaagagcccatttttgttgtcactggaaggaaagaagatgttgccatggccaaaagagagatcctctcagctgcagagcacttctccatgattcgtgcatctcgaaacaaaaatgggcctgccctgggaggattatcatgtagtcctaatctgcccggtcaaaccaccgtccaagtcagggtcccttatcgtgtggtaggattagtggttggacccaaaggagcaactattaaaagaattcagcagcagacccacacctacatagtaactccgagcagagataaggaacctgtctttgaagtgacagggatgcctgaaaatgttgaccgagcacgggaagaaatagaaatgcatattgccatgcgtacaggaaactatatagagctcaatgaagagaatgatttccattacaatggtaccgatgtaagctttgaaggtggcactcttggctctgcgtggctctcctccaatcctgttcctcctagccgcgcaagaatgatatccaattatcgaaatgatagttccagttctctaggaagtggctctacagattcctactttggaagcaataggctggctgactttagtccaacaagcccatttagcacaggaaacttctggtttggagatacactaccatctgtaggctcagaagacctagcagttgactctcctgcctttgactctttaccaacatctgctcaaactatctggactccatttgaaccagttaacccactctctggctttgggagtgatccttctggtaacatgaagactcagcgcagaggaagtcagccatctactcctcgtctgtctcctacatttcctgagagcatagaacatccacttgctcggagggttaggagcgacccacctagtacaggcaaccatgttggccttccaatatatatccctgctttttctaatggtaccaatagttactcctcttccaatggtggttccacctctagctcacctccagaatcaagacgaaagcacgactgtgtgatttgctttgagaatgaggttattgctgccctagttccatgtggccacaacctcttctgcatggaatgtgccaacaagatctgtgaaaagagaacgccatcatgtccagtttgccagacagctgttactcaggcaatccaaattcactcttaactatatatatatacataaatactatatctctatatggactcgtaaaggcatgggtataatggtaccccccagtaaacttcctaatgatttcttatgactgttatcaggctttattgggattaggctaaagttgttagtaaacttataaaaggctgctatggtaacactaaacctaagtggtctcttgtctattagtttggtttgaattattagtactatcctgtagacccagagacatagtttatataagaattgctaaagctgaagttcaacttggctgagtgaagataatcataggttgtgtgagcctatgaaaaagtgtatacgtctaagatttcaaaacaatgggtcccaaagcctaaccactttaagagtttatggagggtacttggcattacagacgattcatacacttccagtgctgccttctttacactgccagttttgacaaaacaggtttgttttttattttacaacaacatatgcctaattctgcaggattgcaagtaactttttaatgcattgtgattacttattggtaatgatagggctgatggcagtttactagatcactggttataatttgggacaaaaactgctacatcaactttcatctcgcccagagtgctcaaggctggtatgatcagtggatcaggaatgcaattgtgaattcctgcccattgcctctcttggtgaatgtggaaatggccacctgggttttcccatatcaggaagggctttgggatggcacctatattggctgataattgaggatgcaaacattccattcattagtgtgatcgagctgttaatttttagactatagatcaaaatgtgaaacattttatgttcaatccatatttgtcttgcacattataaatatatttttattttttagtaatttaggggagggaggagggagaaagggataatgatgcccttggcataattcacaaaagcagctgtgacaacctccaatcagtttacttcatttcaaaactatttccaatcacaaggaaagatttatttaaaatatactcgtacatttcacctgtggatgtctataacttcatcctcagtatgttcccaaatctgtgctggcattgaaaggacaaaacattatactagtgggtttttctactaattattttttgaagcattattttcccaacacaaaagagcttttttctcggtataatgaaaattgaaatcctatgtgtattcaatagtaaatagacaaattttattttttatttccacttgaagagttacatttcgtataaaagtttacaaataacggtttttattttgattttttcagtataaaaaaagttgccttgatggcatattatgatgtaatgctaattgcttgtaggatagtaaatggtcagtattgaaacctaatctctagctgccgtcttgtagatatgaacgaatgttcaccaagcatgtattttgtattttgttgcattgtacactgcaactaataagccaaggaatcgacatatattaggtgcgtgtactgtttctaaaaaccacaaactaagaatgataaattatcaatatagtttagtatttgctaattttactacactcttttgttatgtatatgtagggaagtcatagggattataaattcaatttgagtaaaatttaaaaccatatattttatgataaagggcctttaacttaagatggccaaagcactgatattatatatttgctgtaaagagaattataagagttttatttttctgatattaaaagttacttaataaagacttgtttccattaacttgaa

SEQ ID NO: 153634 - DNA, 3850 bp, Homo sapiens
  Payload ID: 10215
  Gene Symbol: MEX3C
  Gene Name: mex-3 RNA binding family member C
  ENST ID: ENST00000592416
  CDS Start-End: 1-348
tacggaggggacgatgcccagggcatgatggcggcgatgctgtcccacgcctacggccccggcggttgtggggcggcggcggccgccctgaacggggagcaggcggccctgctccggagaaagagcgtcaacaccaccgagtgcgtcccggtgcccagctccgagcacgtcgccgagatcgtcggccgccagggtgagtgcaggggtggggaggtccagctgggcatggccccgggcgtgggtggggagacgagagaaaggagcgtgggacggaaaaggcgaacccggcgaggcccccaagtccaccgcgaaggggtctgggaggagccgagggtcgaccagatgtgaagatgggtcaccttgcgaaaacccacgcttttccgcccgtcttgcctggtaaaaagtgtgaagtttctcgggcgacccagtccggtggtgttcacgttacttgggctgtattcgtggaacaccaggctggcgtggcaccagaaacctcagtgaggtggtaaaaggtcgggctcgaggagttgtgggttcgctgttgggtacggaaagcttcgagattgcaagtttgcgccgccgagtgtcttctaaaagcgttcagcctcccttacaagaacttgttcagatggagaaaagaacagaaatggaggcctgtagacagagctcactggggagggaaggggtgttcaaatggtcggtatcaccgccatcccctgcccctccgctgttgagaaacttagctttggaaaagcagcccaactcactgccgcctatcttaactgtatttctctcggtacgtttcaactctcggaaagacacactgacacactggctgtcttttaaaactgttcagtgtgcaggatgaagaaaaaatggacactaaggtaattaagaaacttcatcggtttatacagttttcagttaattctcctcttcacttgccagcacaccagtactgcagacagactcctcccacattgttcagacaaaggacctgtgtctcagattccaggagtagatttgtgaaggtgggggaaggggatgcctggggtacctctgtatccgacatttttagggaaggtcctaagttctttatggtagcatttcccctttatgaaaggggcagatgttacctgctgccaccgcatgacaatgtggtttagcctggttgttgcatgcctctttactgttaggttgagagcattgttggggtcaaataaagagagatgatggcgctgccgcttaaatgatctcatctttcccaggtggtctaaagtacacataaataagagctctgtcgaaatggtggtttcacatatcagacttggcttatttctttcctatctgtaggattttaataaaaactcatctgaaatctggataaaggagatagcttagttcagactgcctgatgattggcacttacagacactgttcaaagctggacctttcaattgaaaggtagcttatgcttgtcgttcttctggttaatgagtttcagattcctggattgtttggttttggcgatacttagagtaataatccaggagaaaacttttgtttacatgggataaaattacaacatctcaatttggatcagaatgagttgaccattcatgtaagaacactgaggaatcgctatgtaccaagcttgtattttgccaggttttgagtttgtggtattgagaatgtgaagttaattcagactttctgcccttaagaagataacagtctaataaacagtagaatggcactaactatagtgtatttagtatgacaaagtctcaggtaagagaacatctatggagagggccttggaaaatgggtaggaaggagtctaacaaatggagattgaaaaactgtggaggaacaatgtgaggaggggtgtggaggactagcctaggtataattgccaagtagtgttgttttgatacttgaggtctgtaaaggggagtggtggaaaagggggaaggcaggcgttcacaccagaatgtgaagaagcctgaatgccatatgaagatgccacttctcaggacaagttgcttccgtgtgcttatggtaacagtctagggtaacaaaggaagaaaacatttacgtgccagttttactgaaggacaagataacatattttatagatttagtttaatacaaactttagtccttcattatagtagacaccccttaaagcactgctaaatggcccttacttgtgtatgttgttaatctttatagaaatcagttttttaaaagtaaagtgaattccaagtttttattttgtaccagctattacgtgataggaaatgagataaagccttagtttttcttttgagggctgtgtttatttggttaataaggaaatgttgaatttaattatgtcttagatcatggagacaaattgctggctcttccatttaaaccttgtattttcccagagttgacaatactgttaaaagtatgtcatcatcctctatcttaaaagcagaaaatctggtccttttgctgttctgaaccatacaacttgtggatcattgacccctttgccacccccatgtcccagcagcatagtaataaacctgtaaagtgtttgctcactcgtatggagaacgaagtgacttctaatgttcacattcttttacagtattatatttccccacgggagagaatctgtcctaagtaagtaaaacagggcaaatcatttcattttcttgtttgctttgaaggagctaaactttcatccttaagattaaattatccatttctgccattttatgtattacctgaagccataattttctatttgacatctcttaattgattttggaaataattatgtcacagatggagacatttatgacttcagctctgaagcaaagagcaggacaaatggaattctgagtcacatagactagcaactcatgtagatggcctctgagttccagtgtttttctaaaacacaaactaccgcttttgatactgatgaaagttggcagagtgtttgacctcgaatttatactccccagtagcatatggtcatttgtaaatgttaaattggccttgttttttaaagcattgcatctgttgtgaaacaacaatactgtaaaataaagccaggaactgaagaggcttgttgatataatcaaagaagttttagaatatggacatcaaaaataaacctgacaacagattttaagacctaattttataaacttagaacgtctctgtttttaagtatagtacctgcaagacatattaacagtgattaacaggtctaattttagtcagcaggttttgttccaatttgtacagtcatttatatccatttagactaaaaagtgaattaaaatagaactgtatacccattcttaatacattataaattaatactaaatgtcataaattcagttgtttagagacttgtaacccaagattttgtattactattaggataaatgtgtatctttcattagactttaattaatggtctatgtgtgttctctagccacatagtctagaaaagtcgtctctagcttctttttattgtacaccctgtccaaaaaaaatgtgcatactcccaatatctggatatttatgtatgaatagtaagtgtgcttaatatattacacattataaaacaaaattctttattaacaattaatactttacactgtttcaatttgtcttcccaatttcttagggtggaaccacccttcaagctctaacacaactgaaatagggtttatacgtctgtgaccaggagaaaaagagaaagcttggtcttgctgtacataaattttctcttcaaggagaagtacatatttcatgagaataaatagtttcagaatgatgc

SEQ ID NO: 153635 - DNA, 3269 bp, Homo sapiens
  Payload ID: 10215
  Gene Symbol: MEX3C
  Gene Name: mex-3 RNA binding family member C
  ENST ID: ENST00000616921
  CDS Start-End: 1-1470
atgcccagcggcagctccgcggccctggccctggcggcggcgggggtgctgtacggaggggacgatgcccagggcatgatggcggcgatgctgtcccacgcctacggccccggcggttgtggggcggcggcggccgccctgaacggggagcaggcggccctgctccggagaaagagcgtcaacaccaccgagtgcgtcccggtgcccagctccgagcacgtcgccgagatcgtcggccgccagggttgtaaaattaaagcactgagagccaagacaaacacgtatatcaagactcctgttcgtggtgaagagcccatttttgttgtcactggaaggaaagaagatgttgccatggccaaaagagagatcctctcagctgcagagcacttctccatgattcgtgcatctcgaaacaaaaatgggcctgccctgggaggattatcatgtagtcctaatctgcccggtcaaaccaccgtccaagtcagggtcccttatcgtgtggtaggattagtggttggacccaaaggagcaactattaaaagaattcagcagcagacccacacctacatagtaactccgagcagagataaggaacctgtctttgaagtgacagggatgcctgaaaatgttgaccgagcacgggaagaaatagaaatgcatattgccatgcgtacaggaaactatatagagctcaatgaagagaatgatttccattacaatggtaccgatgtaagctttgaaggtggcactcttggctctgcgtggctctcctccaatcctgttcctcctagccgcgcaagaatgatatccaattatcgaaatgatagttccagttctctaggaagtggctctacagattcctactttggaagcaataggctggctgactttagtccaacaagcccatttagcacaggaaacttctggtttggagatacactaccatctgtaggctcagaagacctagcagttgactctcctgcctttgactctttaccaacatctgctcaaactatctggactccatttgaaccagttaacccactctctggctttgggagtgatccttctggtaacatgaagactcagcgcagaggaagtcagccatctactcctcgtctgtctcctacatttcctgagagcatagaacatccacttgctcggagggttaggagcgacccacctagtacaggcaaccatgttggccttccaatatatatccctgctttttctaatggtaccaatagttactcctcttccaatggtggttccacctctagctcacctccagaatcaagacgaaagcacgactgtgtgatttgctttgagaatgaggttattgctgccctagttccatgtggccacaacctcttctgcatggaatgtgccaacaagatctgtgaaaagagaacgccatcatgtccagtttgccagacagctgttactcaggcaatccaaattcactcttaactatatatatatacataaatactatatctctatatggactcgtaaaggcatgggtataatggtaccccccagtaaacttcctaatgatttcttatgactgttatcaggctttattgggattaggctaaagttgttagtaaacttataaaaggctgctatggtaacactaaacctaagtggtctcttgtctattagtttggtttgaattattagtactatcctgtagacccagagacatagtttatataagaattgctaaagctgaagttcaacttggctgagtgaagataatcataggttgtgtgagcctatgaaaaagtgtatacgtctaagatttcaaaacaatgggtcccaaagcctaaccactttaagagtttatggagggtacttggcattacagacgattcatacacttccagtgctgccttctttacactgccagttttgacaaaacaggtttgttttttattttacaacaacatatgcctaattctgcaggattgcaagtaactttttaatgcattgtgattacttattggtaatgatagggctgatggcagtttactagatcactggttataatttgggacaaaaactgctacatcaactttcatctcgcccagagtgctcaaggctggtatgatcagtggatcaggaatgcaattgtgaattcctgcccattgcctctcttggtgaatgtggaaatggccacctgggttttcccatatcaggaagggctttgggatggcacctatattggctgataattgaggatgcaaacattccattcattagtgtgatcgagctgttaatttttagactatagatcaaaatgtgaaacattttatgttcaatccatatttgtcttgcacattataaatatatttttattttttagtaatttaggggagggaggagggagaaagggataatgatgcccttggcataattcacaaaagcagctgtgacaacctccaatcagtttacttcatttcaaaactatttccaatcacaaggaaagatttatttaaaatatactcgtacatttcacctgtggatgtctataacttcatcctcagtatgttcccaaatctgtgctggcattgaaaggacaaaacattatactagtgggtttttctactaattattttttgaagcattattttcccaacacaaaagagcttttttctcggtataatgaaaattgaaatcctatgtgtattcaatagtaaatagacaaattttattttttatttccacttgaagagttacatttcgtataaaagtttacaaataacggtttttattttgattttttcagtataaaaaaagttgccttgatggcatattatgatgtaatgctaattgcttgtaggatagtaaatggtcagtattgaaacctaatctctagctgccgtcttgtagatatgaacgaatgttcaccaagcatgtattttgtattttgttgcattgtacactgcaactaataagccaaggaatcgacatatattaggtgcgtgtactgtttctaaaaaccacaaactaagaatgataaattatcaatatagtttagtatttgctaattttactacactcttttgttatgtatatgtagggaagtcatagggattataaattcaatttgagtaaaatttaaaaccatatattttatgataaagggcctttaacttaagatggccaaagcactgatattatatatttgctgtaaagagaattataagagttttatttttctgatattaaaagttacttaataaagacttgtttccattaacttg

SEQ ID NO: 153636 - DNA, 2850 bp, Homo sapiens
  Payload ID: 10216
  Gene Symbol: MEX3D
  Gene Name: mex-3 RNA binding family member D
  Uniprot ID: Q86XN8
  ENST ID: ENST00000402693
  CDS Start-End: 1-1956
atgcccagctcgctcggccagcccgacggcggcgggggcgggggcggcggcggcggcggcgtgggggcggcgggggaggaccccggacccggacctgcgcccccgcccgagggcgcccaggaggccgcgcccgcgccccggccgccgcccgaacccgacgacgcggccgccgcgctccgcctggcgctggaccagctgtcggcgctcgggctggggggcgctggcgacacggacgaggagggggcggccggggacggcgcagcggcggcggggggcgcggacggcggggcggctccggagcctgtgccccccgacggacctgaggccggcgcgcccccgaccctggcccccgccgtggcccccgggtcgctgccgctgctggaccccaacgcgagtcccccgccgccgccgccgccccggccgtcgccccccgacgtgttcgcgggcttcgcgccccaccccgcggccctggggcccccgacgctgctggccgaccagatgagcgtgatcggcagccgcaagaaaagcgtcaacatgaccgagtgcgtcccggtgcccagctccgagcacgtcgccgagatcgtgggtcgccagggctgcaagatcaaggccctgcgggccaagacaaacacctacatcaagaccccagtgcggggcgaggagccggtcttcatcgtgaccggccggaaggaggacgtggagatggccaagcgtgagatcctgtcggcggccgaacacttctccatcatccgcgccacgcgcagcaaggccgggggtctgcccggcgccgcccagggcccgcccaaccttcccggacagaccaccatccaggtgcgcgtgccctaccgggtggtggggctggtggtggggcccaagggcgccaccatcaagcgcatccagcagcggacgcacacctacatcgtgacgcccgggcgcgacaaggagccggtgttcgcggtcactgggatgcccgagaacgtggaccgcgcgcgcgaggagatcgaggcgcacatcacgctgcgcactggcgccttcaccgacgcgggccccgacagcgacttccacgccaacggcaccgacgtctgcctggacctgctcggggcggccgccagcctctgggccaagacccccaaccagggacgacggccccccacggccacggccggcctccgcggggacacggccctgggcgcccccagcgcccccgaggccttctacgcgggcagccgcggcggcccctccgtgccggacccaggccccgccagcccctacagcggctccggcaacgggggcttcgccttcggcgcggagggtcccggtgccccggtggggacggccgcccccgacgactgcgacttcggcttcgacttcgacttcctggcgctggacctgaccgtgcccgccgcggccaccatctgggcgccttttgagcgcgccgcccccttgcccgccttcagcggctgctccacggtcaacggagccccgggacctcccgccgccggcgcccggcgcagcagtggggccgggaccccccgccactcgcccacgctgcccgagcccggcggcctccgcctggagctcccgctgtctcgccgtggcgccccggacccggtgggcgcgctgtcctggcgacccccgcagggccccgtatccttcccaggcggcgccgccttctccacggccacctcgctgcccagcagccccgcggccgccgcctgcgcccccctggactccggcgcctccgagaacagccgcaagcccccttcggcgtcctcggccccggccctggcgcgagagtgcgtggtgtgcgccgagggcgaggtgatggctgcgctggtcccctgcggccacaacctcttctgcatggactgcgccgtccgcatctgcggcaagagcgagcccgagtgtcccgcctgccgcacgccggccacccaggccattcatatcttttcctagagcgcggaccaccacgtggccggggccatctgcgggggccaggggtgggcgcgggagacggggcgggacccggggtgggagagggacggggagggggcgaggggcggaggccgagggggcaggggggtgggcggcggccagtgtttacagatgagctttaactgccgcctcaggcgtggagacggagaccccgcagcccggcggcgcctcagcccttcaacgacagtattgagtggtcaggttacaataaaccggagagaaaaggtccgcttgcactttttttagttttcttatttttagacacccctcccctccagggtgatctttaaaaaagcaaaacaaaaaacacgacttttccagcgctcagcgttttttcctttcgtccgaagccgttttctgatttgacttttctcgccggccggtctcaggccgcacagacgttccagaggaggagggtgacatttttactccctttttggggctaaccatttatgcttttgtacatcaaccgtgcgcggccggagggggcaggggggcgggggcgaggggcgttccaatcaaatttctaactttctgttaattattaatcccctttttactgcggtttctgttgtcatttttaaaatttttttaatttttttttttttttacttttactttttacctcttgtgtatatgtagggaatttatagggaaatatgtactttatggaataaattttaagaactaaaatatattttattttaaataaagtaatggacctttaatcttacacagctaaattactgattatatatttgctgagctgatttaagggttaaaaaaattgtatcaagagttttattttttgacttcaaagccttcttaataaagcctcttttctacatgtgagca

SEQ ID NO: 153637 - DNA, 2132 bp, Homo sapiens
  Payload ID: 10216
  Gene Symbol: MEX3D
  Gene Name: mex-3 RNA binding family member D
  ENST ID: ENST00000605173
  CDS Start-End: 1-1473
gtcaacatgaccgagtgcgtcccggtgcccagctccgagcacgtcgccgagatcgtgggtcgccagggctgcaagatcaaggccctgcgggccaagacaaacacctacatcaagaccccagtgcggggcgaggagccggtcttcatcgtgaccggccggaaggaggacgtggagatggccaagcgtgagatcctgtcggcggccgaacacttctccatcatccgcgccacgcgcagcaaggccgggggtctgcccggcgccgcccagggcccgcccaaccttcccggacagaccaccatccaggtgcgcgtgccctaccgggtggtggggctggtggtggggcccaagggcgccaccatcaagcgcatccagcagcggacgcacacctacatcgtgacgcccgggcgcgacaaggagccggtgttcgcggtcactgggatgcccgagaacgtggaccgcgcgcgcgaggagatcgaggcgcacatcacgctgcgcactggcgccttcaccgacgcgggccccgacagcgacttccacgccaacggcaccgacgtctgcctggacctgctcggggcggccgccagcctctgggccaagacccccaaccagggacgacggccccccacggccacggccggcctccgcggggacacggccctgggcgcccccagcgcccccgaggccttctacgcgggcagccgcggcggcccctccgtgccggacccaggccccgccagcccctacagcggctccggcaacgggggcttcgccttcggcgcggagggtcccggtgccccggtggggacggccgcccccgacgactgcgacttcggcttcgacttcgacttcctggcgctggacctgaccgtgcccgccgcggccaccatctgggcgccttttgagcgcgccgcccccttgcccgccttcagcggctgctccacggtcaacggagccccgggacctcccgccgccggcgcccggcgcagcagtggggccgggaccccccgccactcgcccacgctgcccgagcccggcggcctccgcctggagctcccgctgtctcgccgtggcgccccggacccggtgggcgcgctgtcctggcgacccccgcagggccccgtatccttcccaggcggcgccgccttctccacggccacctcgctgcccagcagccccgcggccgccgcctgcgcccccctggactccggcgcctccgagaacagccgcaagcccccttcggcgtcctcggccccggccctggcgcgagagtgcgtggtgtgcgccgagggcgaggtgatggctgcgctggtcccctgcggccacaacctcttctgcatggactgcgccgtccgcatctgcggcaagagcgagcccgagtgtcccgcctgccgcacgccggccacccaggccattcgcgtggagacggagaccccgcagcccggcggcgcctcagcccttcaacgacagtattgagtggtcaggttacaataaaccggagagaaaaggtccgcttgcactttttttagttttcttatttttagacacccctcccctccagggtgatctttaaaaaagcaaaacaaaaaacacgacttttccagcgctcagcgttttttcctttcgtccgaagccgttttctgatttgacttttctcgccggccggtctcaggccgcacagacgttccagaggaggagggtgacatttttactccctttttggggctaaccatttatgcttttgtacatcaaccgtgcgcggccggagggggcaggggggcgggggcgaggggcgttccaatcaaatttctaactttctgttaattattaatcccctttttactgcggtttctgttgtcatttttaaaatttttttaatttttttttttttttacttttactttttacctcttgtgtatatgtagggaatttatagggaaatatgtactttatggaataaattttaagaactaaaatatattttattttaaataaagtaatggacctttaatcttacacagctaaattactgattatatatttgctgagctgatttaagggttaaaaaaattgtatcaagagttttattttttgacttcaaagccttcttaataaagcctcttttctacatgtga

SEQ ID NO: 153638 - DNA, 2088 bp, Homo sapiens
  Payload ID: 10217
  Gene Symbol: MFNG
  Gene Name: MFNG O-fucosylpeptide 3-beta-N -acetylglucosaminyltransferase
  Uniprot ID: O00587
  ENST ID: ENST00000356998
  CDS Start-End: 225-1190
gcaggccggacagcgggagcaggtggaggactggcggcggtcgagatcgtgctgccatggctcagcctctgggtccagagcctcagctcctacctcttccctccttgccagcccctgatgcctgccagacttttgcctctgctggagcccctgcctgaccagcttcccctccctgtctggttgggatttgggggctgagctgtctggggtcccagggccaaccaatgcagtgccggctcccgcggggcctggctggagccctcctcaccctcctgtgcatggggctcctgtgtctgcggtaccacttgaacctgtccccgcagcgggtacaagggacccccgagctgagccagccgaacccggggccccctaagctacagctacacgatgtcttcattgcagtgaagacgacccgggctttccaccgcttgcgcctggagctgctgcttgacacgtgggtttccaggaccagggaacagacatttgtcttcaccgacagcccagacaaaggcctccaggagagactggggtcccaccttgtggtcaccaactgctccgcggaacacagccacccagctctgtcctgcaagatggctgctgagttcgacaccttcttggccagtgggcttaggtggttctgccatgtggacgatgacaactatgtgaacccaagggcgctgctgcagcttctgagagccttcccgctggcccgcgacgtctatgtgggaaggcccagcctgaaccggcccatccatgcctcagagccacagccccacaaccgcacgaggctggtacagttctggtttgccactgggggtgctggcttctgcatcaatcgcaaactggctttgaagatggctccgtgggccagtggctcccgtttcatggacacatctgctctcatccggctgcctgatgactgcaccatgggctatatcattgagtgcaagctgggcggccgcctgcagcccagccccctctttcactcccacctggagaccctgcagctgctgaggactgcacagctcccagaacaggtcaccctcagctacggtgtctttgaggggaaactcaacgtcattaagctacagggccccttctccccggaggaggacccctccagatttcgctccctccattgtctgctctatccagatacaccctggtgtccccagctgggtgcccgatgaatcctgaactgctgggcaaaggttgggcagagacttctgggtgtgccttggctcccaaggtggcactgtgggtccctggcaagtgtcttgtgataggcagtccctggcagggccttcgggtggttggcaagcccaggatctgagtggcaattggcactgaaggcaccccaggcccctgggaggtgagttagacagcccaggggaccaggtggaccaggtggtggccagagaggctccaggggctagactccctcaggaggctgaattgaaaaagggcagggggcacttgagctgggctggggctcaggggtcctaaccctttaggcagtgacatggcctctgggtggggtctggccgttggccctggctaatgtctctcagtcattcccctggggctcaagcgctgggccgcccactcctgcctccctcatctgtgtcccgagttcctgaagggacatgggtggaatgatggcagaatccagggtctgcagcacctgctgttgttgccaaccagtctcccaaagctccttgctccccaccccttgcgaacaggaccagattttgtttggagcctcagcatgccggggcccagatgatggagcataacgggtcccagccaattgtgatgatcctttttgctcatttcccagcctttcttgctgttaggggctaccatgggaccagctctggccagagggaactaagcaaatccaatagagatgtttctggggaaggttttgcagcccactccccatcttcctgctataaatgtgggtgtgatggctggatctggggcagccaccttgctaccatgaaggaaaggccaagacaatcatccacagctattccctccagcatctggttctgtacaaaaattaaatgcttatttgtttaagtc

SEQ ID NO: 153639 - DNA, 524 bp, Homo sapiens
  Payload ID: 10217
  Gene Symbol: MFNG
  Gene Name: MFNG O-fucosylpeptide 3-beta-N-acetylglucosaminyltransferase
  ENST ID: ENST00000442496
  CDS Start-End: 397-524
tttcctgtcttatctccatcaccgcggtggtgcccttgccccggatgaggaaactgaggccagagagaggaagtgctggctggcgtggtgtcacgcagaaggcctgaggggacagagcccagtgggacctagaaccttgctcctggttgggtgcttttctcccctgctgagacttgggaacccttttccccatctgcacggggcaggagtgtctggaccgggcctgagctggttaactgcagcgctgggcgcccgcctggctggttaagggcggtcgggtggcagacatttgtcttcaccgacagcccagacaaaggcctccaggagagactggggtcccaccttgtggtcaccaactgctccgcggaacacagccacccagctctgtcctgcaagatggctgctgagttcgacaccttcttggccagtgggcttaggtggttctgccatgtggacgatgacaactatgtgaacccaagggcgctgctgcagcttctgagagccttcccgctggcccgcgacgt

SEQ ID NO: 153640 - DNA, 644 bp, Homo sapiens
  Payload ID: 10217
  Gene Symbol: MFNG
  Gene Name: MFNG O-fucosylpeptide 3-beta-N-acetylglucosaminyltransferase
  ENST ID: ENST00000436341
  CDS Start-End: 249-644
gaacagatgacaacgcctgcctcgtgaggtttgagggtcgttgcgggcaagtgcatgtccaatctgggagagccggactgggttgtgaggcagcatttccgagatggcttgcacagggggtttgtgtggctgtgaagacatttgtcttcaccgacagcccagacaaaggcctccaggagagactggggtcccaccttgtggtcaccaactgctccgcggaacacagccacccagctctgtcctgcaagatggctgctgagttcgacaccttcttggccagtgggcttaggtggttctgccatgtggacgatgacaactatgtgaacccaagggcgctgctgcagcttctgagagccttcccgctggcccgcgacgtctatgtgggaaggcccagcctgaaccggcccatccatgcctcagagccacagccccacaaccgcacgaggctggtacagttctggtttgccactgggggtgctggcttctgcatcaatcgcaaactggctttgaagatggctccgtgggccagtggctcccgtttcatggacacatctgctctcatccggctgcctgatgactgcaccatgggctatatcattgagtgcaagctgggcggccgcctgcagcccagccccctctttcac

SEQ ID NO: 153641 - DNA, 570 bp, Homo sapiens
  Payload ID: 10217
  Gene Symbol: MFNG
  Gene Name: MFNG O-fucosylpeptide 3-beta-N-acetylglucosaminyltransferase
  ENST ID: ENST00000454291
  CDS Start-End: 1-263
actcccacctggagaccctgcagctgctgaggactgcacagctcccagaacagatttcgctccctccattgtctgctctatccagatacaccctggtgtccccagctgggtgcccgatgaatcctgaactgctgggcaaaggttgggcagagacttctgggtgtgccttggctcccaaggtggcactgtgggtccctggcaagtgtcttgtgataggcagtccctggcagggccttcgggtggttggcaagcccaggatctgagtggcaattggcactgaaggcaccccaggcccctgggaggtgagttagacagcccaggggaccaggtggaccaggtggtggccagagaggctccaggggctagactccctcaggaggctgaattgaaaaagggcagggggcacttgagctgggctggggctcaggggtcctaaccctttaggcagtgacatggcctctgggtggggtctggccgttggccctggctaatgtctctcagtcattcccctggggctcaagcgctgggccgcccactcctgcctccctcatctgtgtcccgagttcctga

SEQ ID NO: 153642 - DNA, 570 bp, Homo sapiens
  Payload ID: 10217
  Gene Symbol: MFNG
  Gene Name: MFNG O-fucosylpeptide 3-beta-N-acetylglucosaminyltransferase
  ENST ID: ENST00000424765
  CDS Start-End: 217-570
gacagcgggagcaggtggaggactggcggcggtcgagatcgtgctgccatggctcagcctctgggtccagagcctcagctcctacctcttccctccttgccagcccctgatgcctgccagacttttgcctctgctggagcccctgcctgaccagcttcccctccctgtctggttgggatttgggggctgagctgtctggggtcccagggccaaccaatgcagtgccggctcccgcggggcctggctggagccctcctcaccctcctgtgcatggggctcctgtgtctgcggtaccacttgaacctgtccccgcagcgggtacaagggacccccgagctgagccagccgaacccggggccccctaagctacagctacacgatgtcttcattgcagtgaagacgacccgggctttccaccgcttgcgcctggagctgctgcttgacacgtgggtttccaggaccagggaacagacatttgtcttcaccgacagcccagacaaaggcctccaggagagactggggtcccctgactcctcctcacttctccagggtcccaccttgtggtcacca

SEQ ID NO: 153643 - DNA, 2034 bp, Homo sapiens
  Payload ID: 10217
  Gene Symbol: MFNG
  Gene Name: MFNG O-fucosylpeptide 3-beta-N-acetylglucosaminyltransferase
  Uniprot ID: O00587
  ENST ID: ENST00000416983
  CDS Start-End: 211-1134
gggagcaggtggaggactggcggcggtcgagatcgtgctgccatggctcagcctctgggtccagagcctcagctcctacctcttccctccttgccagcccctgatgcctgccagacttttgcctctgctggagcccctgcctgaccagcttcccctccctgtctggttgggatttgggggctgagctgtctggggtcccagggccaaccaatgcagtgccggctcccgcggggcctggctggagccctcctcaccctcctgtgcatggggctcctgtgtctgcggtaccacttgaacctgtccccgcagcgggtacaagggacccccgagctgagccagccgaacccggggccccctaagctacagctacacgatgtcttcattgcagtgaagacgacccgggctttccaccgcttgcgcctggagctgctgcttgacacgtgggtttccaggaccagggaacaggtgacaaggtcccaccttgtggtcaccaactgctccgcggaacacagccacccagctctgtcctgcaagatggctgctgagttcgacaccttcttggccagtgggcttaggtggttctgccatgtggacgatgacaactatgtgaacccaagggcgctgctgcagcttctgagagccttcccgctggcccgcgacgtctatgtgggaaggcccagcctgaaccggcccatccatgcctcagagccacagccccacaaccgcacgaggctggtacagttctggtttgccactgggggtgctggcttctgcatcaatcgcaaactggctttgaagatggctccgtgggccagtggctcccgtttcatggacacatctgctctcatccggctgcctgatgactgcaccatgggctatatcattgagtgcaagctgggcggccgcctgcagcccagccccctctttcactcccacctggagaccctgcagctgctgaggactgcacagctcccagaacaggtcaccctcagctacggtgtctttgaggggaaactcaacgtcattaagctacagggccccttctccccggaggaggacccctccagatttcgctccctccattgtctgctctatccagatacaccctggtgtccccagctgggtgcccgatgaatcctgaactgctgggcaaaggttgggcagagacttctgggtgtgccttggctcccaaggtggcactgtgggtccctggcaagtgtcttgtgataggcagtccctggcagggccttcgggtggttggcaagcccaggatctgagtggcaattggcactgaaggcaccccaggcccctgggaggtgagttagacagcccaggggaccaggtggaccaggtggtggccagagaggctccaggggctagactccctcaggaggctgaattgaaaaagggcagggggcacttgagctgggctggggctcaggggtcctaaccctttaggcagtgacatggcctctgggtggggtctggccgttggccctggctaatgtctctcagtcattcccctggggctcaagcgctgggccgcccactcctgcctccctcatctgtgtcccgagttcctgaagggacatgggtggaatgatggcagaatccagggtctgcagcacctgctgttgttgccaaccagtctcccaaagctccttgctccccaccccttgcgaacaggaccagattttgtttggagcctcagcatgccggggcccagatgatggagcataacgggtcccagccaattgtgatgatcctttttgctcatttcccagcctttcttgctgttaggggctaccatgggaccagctctggccagagggaactaagcaaatccaatagagatgtttctggggaaggttttgcagcccactccccatcttcctgctataaatgtgggtgtgatggctggatctggggcagccaccttgctaccatgaaggaaaggccaagacaatcatccacagctattccctccagcatctggttctgtacaaaaattaaatgcttatttgtttaagtctc

SEQ ID NO: 153644 - DNA, 966 bp, Homo sapiens
  Payload ID: 10217
  Gene Symbol: MFNG
  Gene Name: MFNG O-fucosylpeptide 3-beta-N-acetylglucosaminyltransferase
  ENST ID: ENST00000438891
  CDS Start-End: 203-595
gtggaggactggcggcggtcgagatcgtgctgccatggctcagcctctgggtccagagcctcagctcctacctcttccctccttgccagcccctgatgcctgccagacttttgcctctgctggagcccctgcctgaccagcttcccctccctgtctggttgggatttgggggctgagctgtctggggtcccagggccaaccaatgcagtgccggctcccgcggggcctggctggagccctcctcaccctcctgtgcatggggctcctgtgtctgcggtaccacttgaacctgtccccgcagcgggtacaagggacccccgagctgagccagccgaacccggggccccctaagctacagctacacgatgtcttcattgcagtgaagacgacccgggctttccaccgcttgcgcctggagctgctgcttgacacgtgggtttccaggaccagggaacagggtcccaccttgtggtcaccaactgctccgcggaacacagccacccagctctgtcctgcaagatggctgctgagttcgacaccttcttggccagtgggcttaggtggttctgccatgtggacgatgacaactatgtgaacccaagggcgctgctgcagcttctgagagccttcccgctggcccgcgacgtctatgtgggaaggcccagcctgaaccggcccatccatgcctcagagccacagccccacaaccgcacgaggctggtacagttctggtttgccactgggggtgctggcttctgcatcaatcgcaaactggctttgaagatggctccgtgggccagtggctcccgtttcatggacacatctgctctcatccggctgcctgatgactgcaccatgggctatatcattgagtgcaagctgggcggccgcctgcagcccagccccctctttcactcccacctggagaccctgcagctgctgaggactgcacagctcccagaacag

SEQ ID NO: 153645 - DNA, 864 bp, Homo sapiens
  Payload ID: 10217
  Gene Symbol: MFNG
  Gene Name: MFNG O-fucosylpeptide 3-beta-N-acetylglucosaminyltransferase
  ENST ID: ENST00000430411
  CDS Start-End: 211-594
gggagcaggtggaggactggcggcggtcgagatcgtgctgccatggctcagcctctgggtccagagcctcagctcctacctcttccctccttgccagcccctgatgcctgccagacttttgcctctgctggagcccctgcctgaccagcttcccctccctgtctggttgggatttgggggctgagctgtctggggtcccagggccaaccaatgcagtgccggctcccgcggggcctggctggagccctcctcaccctcctgtgcatggggctcctgtgtctgcggtaccacttgaacctgtccccgcagcgggtacaagggacccccgagctgagccagccgaacccggggccccctaagctacagctacacgatgtcttcattgcagtgaagacgacccgggctttccaccgcttgcgcctggagctgctgcttgacacgtgggtttccaggaccagggaacaggtgacaaacatttgtcttcaccgacagcccagacaaaggcctccaggagagactggggtcccaccttgtggtcaccaactgctccgcggaacacagccacccagctctgtcctgcaagatggctgctgagttcgacaccttcttggccagtgggcttaggtggttctgccatgtggacgatgacaactatgtgaacccaagggcgctgctgcagcttctgagagccttcccgctggcccgcgacgtctatgtgggaaggcccagcctgaaccggcccatccatgcctcagagccacagccccacaaccgcacgaggctggtacagttctggtttgccactgggggtgctggcttctgcatcaatcgcaaactggctttgaagatggctccgtgggccag

SEQ ID NO: 153646 - DNA, 12042 bp, Homo sapiens
  Payload ID: 10218
  Gene Symbol: MGA
  Gene Name: MGA, MAX dimerization protein
  Uniprot ID: Q8IWI9
  ENST ID: ENST00000219905
  CDS Start-End: 182-9379
gcgcgcgcgcaggctcttcagctggagcggacacacggtgtgcgaaccgaacagaataacccgcccccagcgggatgtgaaggactccgggtgaggccggccacgccccgcacggatgggaaggccattgtgactatgtggtgattacagttgtcttactactgagtttcctactgaaatcatggaggagaaacagcagattatattggctaatcaagatggtggaacagtggcaggagcagcacctaccttctttgtcatcttaaagcagccaggaaatggcaaaactgatcaaggaattttggttactaatcaggatgcctgtgctttggctagtagtgtgtcatcaccagtaaaatctaaagggaagatttgccttccagctgattgtactgtgggtggaatcactgttaccctcgataacaatagtatgtggaatgagttctatcatcgaagcacagagatgattctgaccaagcaaggaagacgcatgtttccttactgtcgttattggataacaggtttagattcaaatttgaagtatattcttgtcatggatatatctcctgtggataaccatcgttataagtggaatggtcgttggtgggaacctagtgggaaggctgaacctcatgttttggggagggttttcattcatccagaatctccttccacaggtcattattggatgcatcaaccagtatctttctataaactcaaacttaccaacaatacactggaccaagaagggcatatcatcttgcactctatgcatcgttacctgccgaggcttcatttggtgcctgcagaaaaggctgtggaggtgatacaattaaatggccctggtgtccacacttttaccttcccacagactgaattctttgcagtaacagcttatcagaacattcagattactcagctgaaaatagattacaatccatttgccaaaggctttcgggatgatgggctgaataataagccccagagagatggaaaacaaaagaacagctctgaccaagaagggaataatatttccagttcttctggtcatcgggtccgtcttacagaaggtcaggggtcagagatacaaccaggtgatttggatcctttgtcaaggggtcatgaaacatcaggcaagggtttggagaagacttcccttaatataaaacgagactttcttggtttcatggatactgattcagcacttagtgaagttcctcaattgaagcaagagatttctgaatgtcttattgccagcagttttgaagatgactcccgtgtagcctcaccgttagaccagaacggaagcttcaatgttgttattaaagaggaacctctagatgattatgactacgaacttggtgagtgcccagaaggggtcactgtgaaacaggaagagacagatgaagagacggatgtatactcaaacagtgatgatgatcctatactagagaaacagctaaagaggcacaataaagttgacaacccagaagctgaccatctatcttctaaatggcttccaagcagcccatcaggtgttgctaaagctaaaatgttcaaattagacactggaaagatgccagtagtctatctggagccctgtgctgtcaccagaagcacagttaagatttctgaactccccgataacatgctttccacatctcgaaaggataaatcttctatgttggcagaattggaatatttgcctacatacattgaaaattccaatgagactgccttctgcttaggcaaggaatcagaaaatggtcttagaaaacattcaccagatctcagagtggtacaaaaatatcccttactgaaagagcctcagtggaaatatcctgatatatctgacagcattagcacagaaagaatactcgacgattcaaaggattcagttggagactcactttcaggaaaagaggacttgggcagaaagagaacaactatgcttaagattgcaacagccgcaaaggtagtgaatgctaatcagaatgcctctccaaatgtccctggaaaaagaggaaggccacgaaaattgaaactctgtaaggcaggacgaccacctaagaacacaggaaagtctttaatttctacaaagaatacacctgtaagccctgggagtacctttccagatgtgaagcctgatctggaagatgtggatggtgttctctttgtttcctttgaatcaaaggaagctctagacattcatgcagttgatgggacaacagaagaatcttctagtctccaggcatcaaccacaaatgactcaggttacagagcaagaatttcccagttggaaaaggaattgatagaagatttgaagactttgcggcacaagcaggtgatacatcctggtcttcaagaagtgggcttaaaattgaattcagtggatccaacaatgagcattgatcttaaatacttgggagtacagttacctttggctccagctactagctttcctttttggaaccttacaggaaccaaccctgcctctcctgatgcgggatttccctttgtttctaggacagggaaaaccaatgatttcactaagatcaagggatggaggggaaaatttcatagtgcttctgcatctaggaatgaaggtggaaattcagaaagttcactgaaaaatcgttctgctttctgtagtgataagctagatgaatacttggaaaatgaaggcaagctgatggaaacaagcatgggtttttcttctaatgctcccacatctcctgtggtgtaccagcttcccactaagagtaccagttatgtacgaacacttgatagtgtactaaagaagcaatctactatttccccttctacctcttattctttgaaacctcattctgtaccccctgtctctcgaaaggcaaagtctcaaaacagacaggcaactttcagtggccgaactaaatcatcttataaatccattttaccataccctgtttcaccaaagcagaaatactctcatgtgattctaggagataaggttaccaagaattcttcaggcatcatctcagaaaatcaggcgaataactttgttgtgccaactttggatgaaaatatatttccaaagcagattagtttgcggcaggcacagcagcagcagcaacagcaacagggaagtcgccctccaggcttgtctaaatctcaggtgaagctaatggacctggaagactgtgcactttgggaaggaaaaccaaggacatacatcacagaagagcgagcagatgtatccttaacaactctacttacagctcaagcatccctcaaaactaaacctatccacacaatcataaggaaacgagcccctccctgcaacaatgacttctgtcgactgggttgtgtatgttccagtctagctttggagaagcgccaacctgctcactgccgccgaccagactgcatgtttggttgtacttgtttgaaaagaaaagttgtacttgttaaaggaggatccaaaactaagcattttcagaggaaggctgctcatcgagatccagtattttatgatactctgggagaggaggcaagggaggaggaagaaggaatcagggaggaggaggaacaattgaaagagaaaaagaagagaaagaagctagaatacactatatgtgagacagagcctgaacagcctgttcgacattacccattatgggtaaaagtagaaggtgaagtagatccagaaccagtttatatccccacgccttctgtcattgagcctatgaaaccattgttattgcctcagccagaagttttatctcctactgtgaagggcaaactgctcactggaattaaatctccacggtcatatactcccaaacccaatcctgtgattcgggaagaggacaaagatccagtctacttgtactttgaaagtatgatgacttgtgctcgagttcgagtatatgagcgaaaaaaagaggaccagagacaaccatcttcctcctcctccccatctccatcatttcagcagcaaacttcatgtcattctagccctgagaaccataataatgcaaaggaacctgattctgaacagcagcccttaaaacaactcacctgtgacttggaggatgattctgataaattacaagaaaagagctggaagtcttcctgcaatgaaggagaatcctcttctacttcttatatgcatcagaggtcacctggtggtcccaccaaactgattgagatcatctcagactgcaactgggaggaagatcggaacaagattttgagcatcttatcccagcacatcaatagcaacatgccacaatcacttaaggtgggcagcttcatcattgagttggcttctcagcgaaagagccggggtgagaagaaccctcctgtttattcttctcgtgtgaaaatctctatgccatcatgtcaagaccaagatgatatggctgagaaatctggatcagagactcctgatggtccattgtcccctgggaaaatggaggatatctctcctgtgcagacagatgccctggattcagtgagggagagattacatggaggcaaaggtctgcctttttatgcagggctttctcctgcagggaagcttgtggcctataaacgtaaacccagttcaagtacatctgggcttatccaggtagcatccaatgccaaggtggctgcatccaggaaaccacgtaccctgttgccttcaacatccaattccaaaatggcatcctcctctggcactgcaacaaatcgccctgggaagaatctgaaggcgtttgtcccagcaaaacggccaattgcggctcgaccctctcctggtggtgtgttcacacagtttgtgatgagtaaagttggagccttgcagcagaagatacctggagttagcacaccccaaaccctggcagggacacagaagttcagtatcagaccttctccagtaatggtcgtcacacctgtggtttcttctgagccagttcaggtgtgcagccctgtgactgctgctgtcactactaccacccctcaagtgtttttagaaaatactactgctgtgacacctatgactgctatttctgacgtggaaactaaagaaactacttattcttctggtgccaccactacaggggttgttgaggtctctgaaactaataccagcacctctgtaacatctacccagtctacagccactgtgaaccttaccaaaaccactgggataactacccctgtggcttcagttgcttttcctaagtctttggtagcatctccttcaaccataactcttcctgttgcttccactgcttccacctccttagtcgtggtgactgcagctgcatcttcctccatggtgaccacaccaacttcatctctgggctctgttcctattatactctcaggaattaatgggagtccaccagtgagccagagaccagaaaatgctgctcaaattccagtggctactccacaggtctctcctaacacagtgaaacgtgctggacctcgattgttgttgattccagtgcagcagggttctcctactcttagacctgtctcaaacacacaacttcagggacatcggatggtcttgcagcctgttaggagtccaagtggaatgaacttattcaggcaccctaatgggcagattgtccagcttctacctttgcatcagcttcgaggctctaatacccagcccaacttacagcctgtcatgtttcggaacccagggtctgtgatgggaatccggttacctgctccttccaaaccctctgagactccgccatcttccacttcgtcctctgctttctctgtcatgaatcctgtaattcaagctgttgggtcttcttcagcagtgaatgttatcactcaggcaccatcattgctttcctctggagctagttttgtgtctcaggctggtacattgaccctgaggatttctcctcctgaaccacaaagctttgcaagtaaaacaggctctgaaaccaaaataacttatagctcaggaggacagcctgttggtacagccagtcttattcctctccagtctggtagttttgccttgttacagctcccaggacaaaagcctgttcctagctccattcttcagcatgttgcttcccttcagatgaagagagaatctcagaatccagaccagaaagatgaaacaaactcaataaaaagagagcaagaaacgaagaaggttctacagtcagaaggagaggctgtagaccctgaggctaatgtaataaaacaaaactcaggagctgctacctcagaagaaactctgaatgattccttggaagataggggtgatcatttggatgaagaatgccttccagaagaaggttgtgcaactgtcaaaccatctgagcattcctgtatcactgggtcacatacagatcaagattataaagatgttaatgaagaatatggggctaggaatcgtaagagttccaaagaaaaagtggctgttctggaagttaggaccatttctgaaaaagccagtaataagacagtccaaaatttaagtaaagtacagcatcaaaaacttggtgatgtgaaggtggaacagcagaaaggatttgacaatccagaagaaaactcaagtgaatttccagtcacctttaaggaagaaagtaaatttgaattgtcaggaagcaaagttatggagcagcaatctaatctacagccagaggccaaagagaaggaatgtggagactctctggagaaagacagggaaagatggagaaaacatctgaagggccccttaaccaggaaatgtgttggagcttcacaggaatgtaagaaagaggcagacgagcagttaattaaagaaacaaagacatgtcaggaaaattcagatgtgtttcagcaagaacaaggcatctctgacttacttggaaaaagtggaattactgaagatgccagagttttgaaaactgaatgtgattcttggagtaggatttctaatccttcagccttctccattgttcctaggagagctgcaaaaagcagcagagggaatggacattttcagggtcacttactgctacctggagaacagatacaaccaaagcaagagaagaagggtgggagaagcagtgctgacttcactgttttggatttggaagaagatgatgaagatgataatgagaaaactgatgattctattgatgaaattgtggatgttgtttctgactaccagagtgaggaggttgatgatgtagaaaagaataactgtgtagaatacattgaggatgatgaggagcacgtggacattgagactgtagaagagctctcagaggaaattaatgttgctcacctgaagaccacagcggcccacacacagtcattcaaacagccgtcctgtactcacatctctgcagatgaaaaagcagctgaaaggagtcgaaaggctccaccaattcctctaaaactgaagcctgattactggagtgacaaactacagaaagaagcagaagcgtttgcttattatcgccggacacacactgccaatgagcggcggcggcgtggtgaaatgagggatctctttgagaaattaaagatcacattgggattacttcattcttccaaggtttccaaaagtctcattcttactcgagccttcagtgaaattcagggactaacagatcaggcagacaaattgataggacagaaaaatctcctgactcgaaaacggaatattctgatacggaaagtatcgtctctttcaggtaagacagaagaagtggtcctgaagaagctagagtatatttatgcaaaacagcaagcactagaggcacaaaaaagaaaaaagaagatgggatcagatgagtttgacatatctcccagaattagcaaacagcaggaaggatcttctgcatcatctgtagatcttggacagatgtttataaataacaggagggggaaacctttgattctttccagaaaaaaagaccaggccacagaaaatacctcacccttgaacactccacacacctctgccaaccttgtgatgactccgcaagggcaattgctcaccctaaaaggtcccctattctcaggaccagtggtagctgtttctcctgatctcttagaatctgatcttaagcctcaagttgccggtagtgctgtggctctaccagaaaatgacgacttatttatgatgccacgaattgttaatgtgacatcattggccacagagggaggtttggtagatatgggtggcagcaaatatcctcatgaagttcctgatagcaagccatctgaccatctgaaagacaccgtcaggaatgaagataattccttagaggataagggtagaatctcttccagaggaaacagagatggcagagtgacgttgggtccaacgcaggtttttctggcaaacaaagattctggttatccacaaatagttgacgtttccaatatgcagaaagcacaagagttcttacctaaaaagatttctggtgatatgagagggattcagtataaatggaaagagagtgaatcaagaggggagagagtgaagtcaaaggattcttcatttcataaattaaagatgaaagatctcaaggactcaagcatagagatggaactgaggaaagtaacatcagctatagaggaagcagctcttgattccagtgaactgctgactaacatggaagatgaggatgatactgatgagacactgacttcactgctcaatgaaattgcctttcttaatcaacaactaaatgatgactctgttggcctggctgaactacccagctctatggatacagagttcccaggggatgctcggcgggcttttattagtaaggttcctcctggaagcagagcaactttccaggttgagcacttgggaactggtttgaaagagttgcctgatgttcaaggggagagtgactctatcagtcccctcctcttgcacttggaagacgatgacttttctgagaatgaaaaacaacttgcagaaccagcctctgagccagatgtccttaagattgttattgactctgaaataaaggattccctcctttccaacaagaaagctattgatggagggaagaatacttctggcctccctgcagagcccgaaagtgtgtcctcaccccccaccctacacatgaagactggcttggagaacagcaacagcacagacactttgtggaggcctatgccaaagttggcccctctaggtttaaaagtagctaatccttccagtgatgcagatggtcagagtctcaaggtgatgccttgtttggcacctatagctgccaaagttgggtcagttggacacaaaatgaacttaacagggaatgaccaggaaggccgggaaagcaaggtgatgcctacattggcacctgttgtggctaaattgggcaactcgggggcctcaccaagttctgcagggaaatgaacttacttgtccttaagcagaagccaggctgtgaggggaaatagatctcacctcctttctctgcaggcatctgtttgtttgtgtcttagaacttggatccttgacttcaatgatgcagtggataatgatgggagaaagggggtagggtgctgaccctggtataagaagtactctgaaattctgatcatgttaaaatgtgttacctcacttgtggtgctgggtcccctcatcctctctaagaagatgtgatccattactgaacatgaggtgcccctcttacccaaggaatttataacatgactctggctccacagtggtttctagttcttcccccacaagcgaaagagctgtttgcaactttggagttgctgtagactgaactgtagcttgtagctgttgaattaagtccaaaatctaaggaatgcgatggacttgtgcaaagggatccagaagagacactttttagttgatgtttcaagaatagggagagagaggatgggtaccatggaataccaaagtgaaggactttgtgtcattcagtaaaattttcttttttcatatcctaagtagctcccattccctcaccttttcaatcagaattaacaaattcaagccttcagtaaagtagggatgcttttaacttttattattaattattttgagatcttaaaaaaatagtagttctcccttattatttttgtgggcattgaaaagctcatttcacagtaccagagatttttactgggagtatatattttggaggtaggcatagagggagccctaccccttccacaaattacgttactcaagagacagctaaaataaaatgcattatctccccagaccagagacagtggccaaaataaaaaatcatggggctggaaatttcccaaatcaaaccagcctcctggtgcttgaaggtttcattcactattacctgcacaggatgtaaagaaaagtcacagtaggcactctttaccagggaaataaggcagtatttgaatcacaagatatattttttatctgcaaccatggatccaatgatctgtagagctttttcactcattaactgtcaggatatgaaggactgacagtctgtaaagatatttatatttttgtatagttgttttcatagatttctcaaaggctgaagttttcaacctagaagatgagatttgtattgagtatagaaatgatgtttcctatctagtttgtaaataatcatggtgcacttgaggggtctcttggaaactcctagggggtcaagaatcactattctgaaactgtatagactgggatttagctgctgcattttgcctttcttaaataattatattttggaatgtaacccctgttctgtcttcattgacaggatttgcttgtgttgttaaaacactaacacaagagcttccagtgcctgggccgtgcctaggtgatgctatttcttctatatctcctgtcttctttatcccaaatcccactcagcatatcttcagacctaggttgtaagaccaactttggattggatctagccagtgaattattatttccatggttggttccctttctgttaactctggtaatcaacagattgaaaacggtggaagaacttctgaaaattgcagtgggagcaaattcttgttggttttgtgctgcttgcctttctagatctgctcatcagcacttaaccttccctcctctaaaggttactaaagaagcctgaagtaggtaaagagtgctcctcagcttcttatccttccactctttacccagcagatttcattcaatgccttagccaaggagtccagcacctgtctcccctgctaataattgtccttagagatgctagtactttaatccaggtatagcagtttcccgttattttcttgcttgtcgttcccctacatttcctcctgatttcccaagactctctttgtggcttttgagggtcagccaaggagcaggcaagtgagtgaacaatcctcaggaaaagaaggaccattttagcttaacacttccttttttttttttttttttttaagaagaatataggtaaacaggtaatgattcttgattggagataccatttgactcttgatgagagttgtacgaagatggaaatgagggatgattccaggcgttttagggggaaggctgcagataccattctaacccccaagatactgtgttctcaagacctcttagaactaggtgttgtcagggataatttgaggagggcttagtcttcagaacaatcctgcagtcttgacagaaatctaaaatctccaaaaactcctaccctttaaccttaccctagggggaactgatctatgaatattacatgtgtgattatgaaaggtgaagttgagtgagaggagttgaggaacgtggaagacagtgagctctcaccctaacactataagaagcatgatctcaatagaccaataattcacctttttatacatctgtaaataaatggaatgtttttaagaatataattatgtcagatttagcattttcttttatatattaaatatatatatctttccttttctgctttcgaaaagtgactatttttttagaaatctaagaacagaagtttggtgattgaaaggtagaatatataaacctgaaataaagcagttaaaacaattaaagcagaa

SEQ ID NO: 153647 - DNA, 11413 bp, Homo sapiens
  Payload ID: 10218
  Gene Symbol: MGA
  Gene Name: MGA, MAX dimerization protein
  Uniprot ID: Q8IWI9
  ENST ID: ENST00000545763
  CDS Start-End: 182-8752
gcgcgcgcgcaggctcttcagctggagcggacacacggtgtgcgaaccgaacagaataacccgcccccagcgggatgtgaaggactccgggtgaggccggccacgccccgcacggatgggaaggccattgtgactatgtggtgattacagttgtcttactactgagtttcctactgaaatcatggaggagaaacagcagattatattggctaatcaagatggtggaacagtggcaggagcagcacctaccttctttgtcatcttaaagcagccaggaaatggcaaaactgatcaaggaattttggttactaatcaggatgcctgtgctttggctagtagtgtgtcatcaccagtaaaatctaaagggaagatttgccttccagctgattgtactgtgggtggaatcactgttaccctcgataacaatagtatgtggaatgagttctatcatcgaagcacagagatgattctgaccaagcaaggaagacgcatgtttccttactgtcgttattggataacaggtttagattcaaatttgaagtatattcttgtcatggatatatctcctgtggataaccatcgttataagtggaatggtcgttggtgggaacctagtgggaaggctgaacctcatgttttggggagggttttcattcatccagaatctccttccacaggtcattattggatgcatcaaccagtatctttctataaactcaaacttaccaacaatacactggaccaagaagggcatatcatcttgcactctatgcatcgttacctgccgaggcttcatttggtgcctgcagaaaaggctgtggaggtgatacaattaaatggccctggtgtccacacttttaccttcccacagactgaattctttgcagtaacagcttatcagaacattcagattactcagctgaaaatagattacaatccatttgccaaaggctttcgggatgatgggctgaataataagccccagagagatggaaaacaaaagaacagctctgaccaagaagggaataatatttccagttcttctggtcatcgggtccgtcttacagaaggtcaggggtcagagatacaaccaggtgatttggatcctttgtcaaggggtcatgaaacatcaggcaagggtttggagaagacttcccttaatataaaacgagactttcttggtttcatggatactgattcagcacttagtgaagttcctcaattgaagcaagagatttctgaatgtcttattgccagcagttttgaagatgactcccgtgtagcctcaccgttagaccagaacggaagcttcaatgttgttattaaagaggaacctctagatgattatgactacgaacttggtgagtgcccagaaggggtcactgtgaaacaggaagagacagatgaagagacggatgtatactcaaacagtgatgatgatcctatactagagaaacagctaaagaggcacaataaagttgacaacccagaagctgaccatctatcttctaaatggcttccaagcagcccatcaggtgttgctaaagctaaaatgttcaaattagacactggaaagatgccagtagtctatctggagccctgtgctgtcaccagaagcacagttaagatttctgaactccccgataacatgctttccacatctcgaaaggataaatcttctatgttggcagaattggaatatttgcctacatacattgaaaattccaatgagactgccttctgcttaggcaaggaatcagaaaatggtcttagaaaacattcaccagatctcagagtggtacaaaaatatcccttactgaaagagcctcagtggaaatatcctgatatatctgacagcattagcacagaaagaatactcgacgattcaaaggattcagttggagactcactttcaggaaaagaggacttgggcagaaagagaacaactatgcttaagattgcaacagccgcaaaggtagtgaatgctaatcagaatgcctctccaaatgtccctggaaaaagaggaaggccacgaaaattgaaactctgtaaggcaggacgaccacctaagaacacaggaaagtctttaatttctacaaagaatacacctgtaagccctgggagtacctttccagatgtgaagcctgatctggaagatgtggatggtgttctctttgtttcctttgaatcaaaggaagctctagacattcatgcagttgatgggacaacagaagaatcttctagtctccaggcatcaaccacaaatgactcaggttacagagcaagaatttcccagttggaaaaggaattgatagaagatttgaagactttgcggcacaagcaggtgatacatcctggtcttcaagaagtgggcttaaaattgaattcagtggatccaacaatgagcattgatcttaaatacttgggagtacagttacctttggctccagctactagctttcctttttggaaccttacaggaaccaaccctgcctctcctgatgcgggatttccctttgtttctaggacagggaaaaccaatgatttcactaagatcaagggatggaggggaaaatttcatagtgcttctgcatctaggaatgaaggtggaaattcagaaagttcactgaaaaatcgttctgctttctgtagtgataagctagatgaatacttggaaaatgaaggcaagctgatggaaacaagcatgggtttttcttctaatgctcccacatctcctgtggtgtaccagcttcccactaagagtaccagttatgtacgaacacttgatagtgtactaaagaagcaatctactatttccccttctacctcttattctttgaaacctcattctgtaccccctgtctctcgaaaggcaaagtctcaaaacagacaggcaactttcagtggccgaactaaatcatcttataaatccattttaccataccctgtttcaccaaagcagaaatactctcatgtgattctaggagataaggttaccaagaattcttcaggcatcatctcagaaaatcaggcgaataactttgttgtgccaactttggatgaaaatatatttccaaagcagattagtttgcggcaggcacagcagcagcagcaacagcaacagggaagtcgccctccaggcttgtctaaatctcaggtgaagctaatggacctggaagactgtgcactttgggaaggaaaaccaaggacatacatcacagaagagcgagcagatgtatccttaacaactctacttacagctcaagcatccctcaaaactaaacctatccacacaatcataaggaaacgagcccctccctgcaacaatgacttctgtcgactgggttgtgtatgttccagtctagctttggagaagcgccaacctgctcactgccgccgaccagactgcatgtttggttgtacttgtttgaaaagaaaagttgtacttgttaaaggaggatccaaaactaagcattttcagaggaaggctgctcatcgagatccagtattttatgatactctgggagaggaggcaagggaggaggaagaaggaatcagggaggaggaggaacaattgaaagagaaaaagaagagaaagaagctagaatacactatatgtgagacagagcctgaacagcctgttcgacattacccattatgggtaaaagtagaaggtgaagtagatccagaaccagtttatatccccacgccttctgtcattgagcctatgaaaccattgttattgcctcagccagaagttttatctcctactgtgaagggcaaactgctcactggaattaaatctccacggtcatatactcccaaacccaatcctgtgattcgggaagaggacaaagatccagtctacttgtactttgaaagtatgatgacttgtgctcgagttcgagtatatgagcgaaaaaaagaggaccagagacaaccatcttcctcctcctccccatctccatcatttcagcagcaaacttcatgtcattctagccctgagaaccataataatgcaaaggaacctgattctgaacagcagcccttaaaacaactcacctgtgacttggaggatgattctgataaattacaagaaaagagctggaagtcttcctgcaatgaaggagaatcctcttctacttcttatatgcatcagaggtcacctggtggtcccaccaaactgattgagatcatctcagactgcaactgggaggaagatcggaacaagattttgagcatcttatcccagcacatcaatagcaacatgccacaatcacttaaggtgggcagcttcatcattgagttggcttctcagcgaaagagccggggtgagaagaaccctcctgtttattcttctcgtgtgaaaatctctatgccatcatgtcaagaccaagatgatatggctgagaaatctggatcagagactcctgatggtccattgtcccctgggaaaatggaggatatctctcctgtgcagacagatgccctggattcagtgagggagagattacatggaggcaaaggtctgcctttttatgcagggctttctcctgcagggaagcttgtggcctataaacgtaaacccagttcaagtacatctgggcttatccaggtagcatccaatgccaaggtggctgcatccaggaaaccacgtaccctgttgccttcaacatccaattccaaaatggcatcctcctctggcactgcaacaaatcgccctgggaagaatctgaaggcgtttgtcccagcaaaacggccaattgaaaatgctgctcaaattccagtggctactccacaggtctctcctaacacagtgaaacgtgctggacctcgattgttgttgattccagtgcagcagggttctcctactcttagacctgtctcaaacacacaacttcagggacatcggatggtcttgcagcctgttaggagtccaagtggaatgaacttattcaggcaccctaatgggcagattgtccagcttctacctttgcatcagcttcgaggctctaatacccagcccaacttacagcctgtcatgtttcggaacccagggtctgtgatgggaatccggttacctgctccttccaaaccctctgagactccgccatcttccacttcgtcctctgctttctctgtcatgaatcctgtaattcaagctgttgggtcttcttcagcagtgaatgttatcactcaggcaccatcattgctttcctctggagctagttttgtgtctcaggctggtacattgaccctgaggatttctcctcctgaaccacaaagctttgcaagtaaaacaggctctgaaaccaaaataacttatagctcaggaggacagcctgttggtacagccagtcttattcctctccagtctggtagttttgccttgttacagctcccaggacaaaagcctgttcctagctccattcttcagcatgttgcttcccttcagatgaagagagaatctcagaatccagaccagaaagatgaaacaaactcaataaaaagagagcaagaaacgaagaaggttctacagtcagaaggagaggctgtagaccctgaggctaatgtaataaaacaaaactcaggagctgctacctcagaagaaactctgaatgattccttggaagataggggtgatcatttggatgaagaatgccttccagaagaaggttgtgcaactgtcaaaccatctgagcattcctgtatcactgggtcacatacagatcaagattataaagatgttaatgaagaatatggggctaggaatcgtaagagttccaaagaaaaagtggctgttctggaagttaggaccatttctgaaaaagccagtaataagacagtccaaaatttaagtaaagtacagcatcaaaaacttggtgatgtgaaggtggaacagcagaaaggatttgacaatccagaagaaaactcaagtgaatttccagtcacctttaaggaagaaagtaaatttgaattgtcaggaagcaaagttatggagcagcaatctaatctacagccagaggccaaagagaaggaatgtggagactctctggagaaagacagggaaagatggagaaaacatctgaagggccccttaaccaggaaatgtgttggagcttcacaggaatgtaagaaagaggcagacgagcagttaattaaagaaacaaagacatgtcaggaaaattcagatgtgtttcagcaagaacaaggcatctctgacttacttggaaaaagtggaattactgaagatgccagagttttgaaaactgaatgtgattcttggagtaggatttctaatccttcagccttctccattgttcctaggagagctgcaaaaagcagcagagggaatggacattttcagggtcacttactgctacctggagaacagatacaaccaaagcaagagaagaagggtgggagaagcagtgctgacttcactgttttggatttggaagaagatgatgaagatgataatgagaaaactgatgattctattgatgaaattgtggatgttgtttctgactaccagagtgaggaggttgatgatgtagaaaagaataactgtgtagaatacattgaggatgatgaggagcacgtggacattgagactgtagaagagctctcagaggaaattaatgttgctcacctgaagaccacagcggcccacacacagtcattcaaacagccgtcctgtactcacatctctgcagatgaaaaagcagctgaaaggagtcgaaaggctccaccaattcctctaaaactgaagcctgattactggagtgacaaactacagaaagaagcagaagcgtttgcttattatcgccggacacacactgccaatgagcggcggcggcgtggtgaaatgagggatctctttgagaaattaaagatcacattgggattacttcattcttccaaggtttccaaaagtctcattcttactcgagccttcagtgaaattcagggactaacagatcaggcagacaaattgataggacagaaaaatctcctgactcgaaaacggaatattctgatacggaaagtatcgtctctttcaggtaagacagaagaagtggtcctgaagaagctagagtatatttatgcaaaacagcaagcactagaggcacaaaaaagaaaaaagaagatgggatcagatgagtttgacatatctcccagaattagcaaacagcaggaaggatcttctgcatcatctgtagatcttggacagatgtttataaataacaggagggggaaacctttgattctttccagaaaaaaagaccaggccacagaaaatacctcacccttgaacactccacacacctctgccaaccttgtgatgactccgcaagggcaattgctcaccctaaaaggtcccctattctcaggaccagtggtagctgtttctcctgatctcttagaatctgatcttaagcctcaagttgccggtagtgctgtggctctaccagaaaatgacgacttatttatgatgccacgaattgttaatgtgacatcattggccacagagggaggtttggtagatatgggtggcagcaaatatcctcatgaagttcctgatagcaagccatctgaccatctgaaagacaccgtcaggaatgaagataattccttagaggataagggtagaatctcttccagaggaaacagagatggcagagtgacgttgggtccaacgcaggtttttctggcaaacaaagattctggttatccacaaatagttgacgtttccaatatgcagaaagcacaagagttcttacctaaaaagatttctggtgatatgagagggattcagtataaatggaaagagagtgaatcaagaggggagagagtgaagtcaaaggattcttcatttcataaattaaagatgaaagatctcaaggactcaagcatagagatggaactgaggaaagtaacatcagctatagaggaagcagctcttgattccagtgaactgctgactaacatggaagatgaggatgatactgatgagacactgacttcactgctcaatgaaattgcctttcttaatcaacaactaaatgatgactctgttggcctggctgaactacccagctctatggatacagagttcccaggggatgctcggcgggcttttattagtaaggttcctcctggaagcagagcaactttccaggttgagcacttgggaactggtttgaaagagttgcctgatgttcaaggggagagtgactctatcagtcccctcctcttgcacttggaagacgatgacttttctgagaatgaaaaacaacttgcagaaccagcctctgagccagatgtccttaagattgttattgactctgaaataaaggattccctcctttccaacaagaaagctattgatggagggaagaatacttctggcctccctgcagagcccgaaagtgtgtcctcaccccccaccctacacatgaagactggcttggagaacagcaacagcacagacactttgtggaggcctatgccaaagttggcccctctaggtttaaaagtagctaatccttccagtgatgcagatggtcagagtctcaaggtgatgccttgtttggcacctatagctgccaaagttgggtcagttggacacaaaatgaacttaacagggaatgaccaggaaggccgggaaagcaaggtgatgcctacattggcacctgttgtggctaaattgggcaactcgggggcctcaccaagttctgcagggaaatgaacttacttgtccttaagcagaagccaggctgtgaggggaaatagatctcacctcctttctctgcaggcatctgtttgtttgtgtcttagaacttggatccttgacttcaatgatgcagtggataatgatgggagaaagggggtagggtgctgaccctggtataagaagtactctgaaattctgatcatgttaaaatgtgttacctcacttgtggtgctgggtcccctcatcctctctaagaagatgtgatccattactgaacatgaggtgcccctcttacccaaggaatttataacatgactctggctccacagtggtttctagttcttcccccacaagcgaaagagctgtttgcaactttggagttgctgtagactgaactgtagcttgtagctgttgaattaagtccaaaatctaaggaatgcgatggacttgtgcaaagggatccagaagagacactttttagttgatgtttcaagaatagggagagagaggatgggtaccatggaataccaaagtgaaggactttgtgtcattcagtaaaattttcttttttcatatcctaagtagctcccattccctcaccttttcaatcagaattaacaaattcaagccttcagtaaagtagggatgcttttaacttttattattaattattttgagatcttaaaaaaatagtagttctcccttattatttttgtgggcattgaaaagctcatttcacagtaccagagatttttactgggagtatatattttggaggtaggcatagagggagccctaccccttccacaaattacgttactcaagagacagctaaaataaaatgcattatctccccagaccagagacagtggccaaaataaaaaatcatggggctggaaatttcccaaatcaaaccagcctcctggtgcttgaaggtttcattcactattacctgcacaggatgtaaagaaaagtcacagtaggcactctttaccagggaaataaggcagtatttgaatcacaagatatattttttatctgcaaccatggatccaatgatctgtagagctttttcactcattaactgtcaggatatgaaggactgacagtctgtaaagatatttatatttttgtatagttgttttcatagatttctcaaaggctgaagttttcaacctagaagatgagatttgtattgagtatagaaatgatgtttcctatctagtttgtaaataatcatggtgcacttgaggggtctcttggaaactcctagggggtcaagaatcactattctgaaactgtatagactgggatttagctgctgcattttgcctttcttaaataattatattttggaatgtaacccctgttctgtcttcattgacaggatttgcttgtgttgttaaaacactaacacaagagcttccagtgcctgggccgtgcctaggtgatgctatttcttctatatctcctgtcttctttatcccaaatcccactcagcatatcttcagacctaggttgtaagaccaactttggattggatctagccagtgaattattatttccatggttggttccctttctgttaactctggtaatcaacagattgaaaacggtggaagaacttctgaaaattgcagtgggagcaaattcttgttggttttgtgctgcttgcctttctagatctgctcatcagcacttaaccttccctcctctaaaggttactaaagaagcctgaagtaggtaaagagtgctcctcagcttcttatccttccactctttacccagcagatttcattcaatgccttagccaaggagtccagcacctgtctcccctgctaataattgtccttagagatgctagtactttaatccaggtatagcagtttcccgttattttcttgcttgtcgttcccctacatttcctcctgatttcccaagactctctttgtggcttttgagggtcagccaaggagcaggcaagtgagtgaacaatcctcaggaaaagaaggaccattttagcttaacacttccttttttttttttttttttttaagaagaatataggtaaacaggtaatgattcttgattggagataccatttgactcttgatgagagttgtacgaagatggaaatgagggatgattccaggcgttttagggggaaggctgcagataccattctaacccccaagatactgtgttctcaagacctcttagaactaggtgttgtcagggataatttgaggagggcttagtcttcagaacaatcctgcagtcttgacagaaatctaaaatctccaaaaactcctaccctttaaccttaccctagggggaactgatctatgaatattacatgtgtgattatgaaaggtgaagttgagtgagaggagttgaggaacgtggaagacagtgagctctcaccctaacactataagaagcatgatctcaatagaccaataattcacctttttatacatctgtaaataaatggaatgtttttaagaatataattatgtcagatttagcattttcttttatatattaaatatatatatctttccttttctgctttcgaaaagtgactatttttttagaaatctaagaacagaagtttggtgattgaaaggtagaatatataaacctgaaataaagcagttaaaacaattaaagcag

SEQ ID NO: 153648 - DNA, 3439 bp, Homo sapiens
  Payload ID: 10218
  Gene Symbol: MGA
  Gene Name: MGA, MAX dimerization protein
  ENST ID: ENST00000566718
  CDS Start-End: 182-3439
gcgcgcgcgcaggctcttcagctggagcggacacacggtgtgcgaaccgaacagaataacccgcccccagcgggatgtgaaggactccgggtgaggccggccacgccccgcacggatgggaaggccattgtgactatgtggtgattacagttgtcttactactgagtttcctactgaaatcatggaggagaaacagcagattatattggctaatcaagatggtggaacagtggcaggagcagcacctaccttctttgtcatcttaaagcagccaggaaatggcaaaactgatcaaggaattttggttactaatcaggatgcctgtgctttggctagtagtgtgtcatcaccagtaaaatctaaagggaagatttgccttccagctgattgtactgtgggtggaatcactgttaccctcgataacaatagtatgtggaatgagttctatcatcgaagcacagagatgattctgaccaagcaaggaagacgcatgtttccttactgtcgttattggataacaggtttagattcaaatttgaagtatattcttgtcatggatatatctcctgtggataaccatcgttataagtggaatggtcgttggtgggaacctagtgggaaggctgaacctcatgttttggggagggttttcattcatccagaatctccttccacaggtcattattggatgcatcaaccagtatctttctataaactcaaacttaccaacaatacactggaccaagaagggcatatcatcttgcactctatgcatcgttacctgccgaggcttcatttggtgcctgcagaaaaggctgtggaggtgatacaattaaatggccctggtgtccacacttttaccttcccacagactgaattctttgcagtaacagcttatcagaacattcagattactcagctgaaaatagattacaatccatttgccaaaggctttcgggatgatgggctgaataataagccccagagagatggaaaacaaaagaacagctctgaccaagaagggaataatatttccagttcttctggtcatcgggtccgtcttacagaaggtcaggggtcagagatacaaccaggtgatttggatcctttgtcaaggggtcatgaaacatcaggcaagggtttggagaagacttcccttaatataaaacgagactttcttggtttcatggatactgattcagcacttagtgaagttcctcaattgaagcaagagatttctgaatgtcttattgccagcagttttgaagatgactcccgtgtagcctcaccgttagaccagaacggaagcttcaatgttgttattaaagaggaacctctagatgattatgactacgaacttggtgagtgcccagaaggggtcactgtgaaacaggaagagacagatgaagagacggatgtatactcaaacagtgatgatgatcctatactagagaaacagctaaagaggcacaataaagttgacaacccagaagctgaccatctatcttctaaatggcttccaagcagcccatcaggtgttgctaaagctaaaatgttcaaattagacactggaaagatgccagtagtctatctggagccctgtgctgtcaccagaagcacagttaagatttctgaactccccgataacatgctttccacatctcgaaaggataaatcttctatgttggcagaattggaatatttgcctacatacattgaaaattccaatgagactgccttctgcttaggcaaggaatcagaaaatggtcttagaaaacattcaccagatctcagagtggtacaaaaatatcccttactgaaagagcctcagtggaaatatcctgatatatctgacagcattagcacagaaagaatactcgacgattcaaaggattcagttggagactcactttcaggaaaagaggacttgggcagaaagagaacaactatgcttaagattgcaacagccgcaaaggtagtgaatgctaatcagaatgcctctccaaatgtccctggaaaaagaggaaggccacgaaaattgaaactctgtaaggcaggacgaccacctaagaacacaggaaagtctttaatttctacaaagaatacacctgtaagccctgggagtacctttccagatgtgaagcctgatctggaagatgtggatggtgttctctttgtttcctttgaatcaaaggaagctctagacattcatgcagttgatgggacaacagaagaatcttctagtctccaggcatcaaccacaaatgactcaggttacagagcaagaatttcccagttggaaaaggaattgatagaagatttgaagactttgcggcacaagcaggtgatacatcctggtcttcaagaagtgggcttaaaattgaattcagtggatccaacaatgagcattgatcttaaatacttgggagtacagttacctttggctccagctactagctttcctttttggaaccttacaggaaccaaccctgcctctcctgatgcgggatttccctttgtttctaggacagggaaaaccaatgatttcactaagatcaagggatggaggggaaaatttcatagtgcttctgcatctaggaatgaaggtggaaattcagaaagttcactgaaaaatcgttctgctttctgtagtgataagctagatgaatacttggaaaatgaaggcaagctgatggaaacaagcatgggtttttcttctaatgctcccacatctcctgtggtgtaccagcttcccactaagagtaccagttatgtacgaacacttgatagtgtactaaagaagcaatctactatttccccttctacctcttattctttgaaacctcattctgtaccccctgtctctcgaaaggcaaagtctcaaaacagacaggcaactttcagtggccgaactaaatcatcttataaatccattttaccataccctgtttcaccaaagcagaaatactctcatgtgattctaggagataaggttaccaagaattcttcaggcatcatctcagaaaatcaggcgaataactttgttgtgccaactttggatgaaaatatatttccaaagcagattagtttgcggcaggcacagcagcagcagcaacagcaacagggaagtcgccctccaggcttgtctaaatctcaggtgaagctaatggacctggaagactgtgcactttgggaaggaaaaccaaggacatacatcacagaagagcgagcagatgtatccttaacaactctacttacagctcaagcatccctcaaaactaaacctatccacacaatcataaggaaacgagcccctccctgcaacaatgacttctgtcgactgggttgtgtatgttccagtctagctttggagaagcgccaacctgctcactgccgccgaccagactgcatgtttggttgtacttgtttgaaaagaaaa

SEQ ID NO: 153649 - DNA, 14439 bp, Homo sapiens
  Payload ID: 10218
  Gene Symbol: MGA
  Gene Name: MGA, MAX dimerization protein
  Uniprot ID: Q8IWI9
  ENST ID: ENST00000566586
  CDS Start-End: 68-8638
gatgggaaggccattgtgactatgtggtgattacagttgtcttactactgagtttcctactgaaatcatggaggagaaacagcagattatattggctaatcaagatggtggaacagtggcaggagcagcacctaccttctttgtcatcttaaagcagccaggaaatggcaaaactgatcaaggaattttggttactaatcaggatgcctgtgctttggctagtagtgtgtcatcaccagtaaaatctaaagggaagatttgccttccagctgattgtactgtgggtggaatcactgttaccctcgataacaatagtatgtggaatgagttctatcatcgaagcacagagatgattctgaccaagcaaggaagacgcatgtttccttactgtcgttattggataacaggtttagattcaaatttgaagtatattcttgtcatggatatatctcctgtggataaccatcgttataagtggaatggtcgttggtgggaacctagtgggaaggctgaacctcatgttttggggagggttttcattcatccagaatctccttccacaggtcattattggatgcatcaaccagtatctttctataaactcaaacttaccaacaatacactggaccaagaagggcatatcatcttgcactctatgcatcgttacctgccgaggcttcatttggtgcctgcagaaaaggctgtggaggtgatacaattaaatggccctggtgtccacacttttaccttcccacagactgaattctttgcagtaacagcttatcagaacattcagattactcagctgaaaatagattacaatccatttgccaaaggctttcgggatgatgggctgaataataagccccagagagatggaaaacaaaagaacagctctgaccaagaagggaataatatttccagttcttctggtcatcgggtccgtcttacagaaggtcaggggtcagagatacaaccaggtgatttggatcctttgtcaaggggtcatgaaacatcaggcaagggtttggagaagacttcccttaatataaaacgagactttcttggtttcatggatactgattcagcacttagtgaagttcctcaattgaagcaagagatttctgaatgtcttattgccagcagttttgaagatgactcccgtgtagcctcaccgttagaccagaacggaagcttcaatgttgttattaaagaggaacctctagatgattatgactacgaacttggtgagtgcccagaaggggtcactgtgaaacaggaagagacagatgaagagacggatgtatactcaaacagtgatgatgatcctatactagagaaacagctaaagaggcacaataaagttgacaacccagaagctgaccatctatcttctaaatggcttccaagcagcccatcaggtgttgctaaagctaaaatgttcaaattagacactggaaagatgccagtagtctatctggagccctgtgctgtcaccagaagcacagttaagatttctgaactccccgataacatgctttccacatctcgaaaggataaatcttctatgttggcagaattggaatatttgcctacatacattgaaaattccaatgagactgccttctgcttaggcaaggaatcagaaaatggtcttagaaaacattcaccagatctcagagtggtacaaaaatatcccttactgaaagagcctcagtggaaatatcctgatatatctgacagcattagcacagaaagaatactcgacgattcaaaggattcagttggagactcactttcaggaaaagaggacttgggcagaaagagaacaactatgcttaagattgcaacagccgcaaaggtagtgaatgctaatcagaatgcctctccaaatgtccctggaaaaagaggaaggccacgaaaattgaaactctgtaaggcaggacgaccacctaagaacacaggaaagtctttaatttctacaaagaatacacctgtaagccctgggagtacctttccagatgtgaagcctgatctggaagatgtggatggtgttctctttgtttcctttgaatcaaaggaagctctagacattcatgcagttgatgggacaacagaagaatcttctagtctccaggcatcaaccacaaatgactcaggttacagagcaagaatttcccagttggaaaaggaattgatagaagatttgaagactttgcggcacaagcaggtgatacatcctggtcttcaagaagtgggcttaaaattgaattcagtggatccaacaatgagcattgatcttaaatacttgggagtacagttacctttggctccagctactagctttcctttttggaaccttacaggaaccaaccctgcctctcctgatgcgggatttccctttgtttctaggacagggaaaaccaatgatttcactaagatcaagggatggaggggaaaatttcatagtgcttctgcatctaggaatgaaggtggaaattcagaaagttcactgaaaaatcgttctgctttctgtagtgataagctagatgaatacttggaaaatgaaggcaagctgatggaaacaagcatgggtttttcttctaatgctcccacatctcctgtggtgtaccagcttcccactaagagtaccagttatgtacgaacacttgatagtgtactaaagaagcaatctactatttccccttctacctcttattctttgaaacctcattctgtaccccctgtctctcgaaaggcaaagtctcaaaacagacaggcaactttcagtggccgaactaaatcatcttataaatccattttaccataccctgtttcaccaaagcagaaatactctcatgtgattctaggagataaggttaccaagaattcttcaggcatcatctcagaaaatcaggcgaataactttgttgtgccaactttggatgaaaatatatttccaaagcagattagtttgcggcaggcacagcagcagcagcaacagcaacagggaagtcgccctccaggcttgtctaaatctcaggtgaagctaatggacctggaagactgtgcactttgggaaggaaaaccaaggacatacatcacagaagagcgagcagatgtatccttaacaactctacttacagctcaagcatccctcaaaactaaacctatccacacaatcataaggaaacgagcccctccctgcaacaatgacttctgtcgactgggttgtgtatgttccagtctagctttggagaagcgccaacctgctcactgccgccgaccagactgcatgtttggttgtacttgtttgaaaagaaaagttgtacttgttaaaggaggatccaaaactaagcattttcagaggaaggctgctcatcgagatccagtattttatgatactctgggagaggaggcaagggaggaggaagaaggaatcagggaggaggaggaacaattgaaagagaaaaagaagagaaagaagctagaatacactatatgtgagacagagcctgaacagcctgttcgacattacccattatgggtaaaagtagaaggtgaagtagatccagaaccagtttatatccccacgccttctgtcattgagcctatgaaaccattgttattgcctcagccagaagttttatctcctactgtgaagggcaaactgctcactggaattaaatctccacggtcatatactcccaaacccaatcctgtgattcgggaagaggacaaagatccagtctacttgtactttgaaagtatgatgacttgtgctcgagttcgagtatatgagcgaaaaaaagaggaccagagacaaccatcttcctcctcctccccatctccatcatttcagcagcaaacttcatgtcattctagccctgagaaccataataatgcaaaggaacctgattctgaacagcagcccttaaaacaactcacctgtgacttggaggatgattctgataaattacaagaaaagagctggaagtcttcctgcaatgaaggagaatcctcttctacttcttatatgcatcagaggtcacctggtggtcccaccaaactgattgagatcatctcagactgcaactgggaggaagatcggaacaagattttgagcatcttatcccagcacatcaatagcaacatgccacaatcacttaaggtgggcagcttcatcattgagttggcttctcagcgaaagagccggggtgagaagaaccctcctgtttattcttctcgtgtgaaaatctctatgccatcatgtcaagaccaagatgatatggctgagaaatctggatcagagactcctgatggtccattgtcccctgggaaaatggaggatatctctcctgtgcagacagatgccctggattcagtgagggagagattacatggaggcaaaggtctgcctttttatgcagggctttctcctgcagggaagcttgtggcctataaacgtaaacccagttcaagtacatctgggcttatccaggtagcatccaatgccaaggtggctgcatccaggaaaccacgtaccctgttgccttcaacatccaattccaaaatggcatcctcctctggcactgcaacaaatcgccctgggaagaatctgaaggcgtttgtcccagcaaaacggccaattgaaaatgctgctcaaattccagtggctactccacaggtctctcctaacacagtgaaacgtgctggacctcgattgttgttgattccagtgcagcagggttctcctactcttagacctgtctcaaacacacaacttcagggacatcggatggtcttgcagcctgttaggagtccaagtggaatgaacttattcaggcaccctaatgggcagattgtccagcttctacctttgcatcagcttcgaggctctaatacccagcccaacttacagcctgtcatgtttcggaacccagggtctgtgatgggaatccggttacctgctccttccaaaccctctgagactccgccatcttccacttcgtcctctgctttctctgtcatgaatcctgtaattcaagctgttgggtcttcttcagcagtgaatgttatcactcaggcaccatcattgctttcctctggagctagttttgtgtctcaggctggtacattgaccctgaggatttctcctcctgaaccacaaagctttgcaagtaaaacaggctctgaaaccaaaataacttatagctcaggaggacagcctgttggtacagccagtcttattcctctccagtctggtagttttgccttgttacagctcccaggacaaaagcctgttcctagctccattcttcagcatgttgcttcccttcagatgaagagagaatctcagaatccagaccagaaagatgaaacaaactcaataaaaagagagcaagaaacgaagaaggttctacagtcagaaggagaggctgtagaccctgaggctaatgtaataaaacaaaactcaggagctgctacctcagaagaaactctgaatgattccttggaagataggggtgatcatttggatgaagaatgccttccagaagaaggttgtgcaactgtcaaaccatctgagcattcctgtatcactgggtcacatacagatcaagattataaagatgttaatgaagaatatggggctaggaatcgtaagagttccaaagaaaaagtggctgttctggaagttaggaccatttctgaaaaagccagtaataagacagtccaaaatttaagtaaagtacagcatcaaaaacttggtgatgtgaaggtggaacagcagaaaggatttgacaatccagaagaaaactcaagtgaatttccagtcacctttaaggaagaaagtaaatttgaattgtcaggaagcaaagttatggagcagcaatctaatctacagccagaggccaaagagaaggaatgtggagactctctggagaaagacagggaaagatggagaaaacatctgaagggccccttaaccaggaaatgtgttggagcttcacaggaatgtaagaaagaggcagacgagcagttaattaaagaaacaaagacatgtcaggaaaattcagatgtgtttcagcaagaacaaggcatctctgacttacttggaaaaagtggaattactgaagatgccagagttttgaaaactgaatgtgattcttggagtaggatttctaatccttcagccttctccattgttcctaggagagctgcaaaaagcagcagagggaatggacattttcagggtcacttactgctacctggagaacagatacaaccaaagcaagagaagaagggtgggagaagcagtgctgacttcactgttttggatttggaagaagatgatgaagatgataatgagaaaactgatgattctattgatgaaattgtggatgttgtttctgactaccagagtgaggaggttgatgatgtagaaaagaataactgtgtagaatacattgaggatgatgaggagcacgtggacattgagactgtagaagagctctcagaggaaattaatgttgctcacctgaagaccacagcggcccacacacagtcattcaaacagccgtcctgtactcacatctctgcagatgaaaaagcagctgaaaggagtcgaaaggctccaccaattcctctaaaactgaagcctgattactggagtgacaaactacagaaagaagcagaagcgtttgcttattatcgccggacacacactgccaatgagcggcggcggcgtggtgaaatgagggatctctttgagaaattaaagatcacattgggattacttcattcttccaaggtttccaaaagtctcattcttactcgagccttcagtgaaattcagggactaacagatcaggcagacaaattgataggacagaaaaatctcctgactcgaaaacggaatattctgatacggaaagtatcgtctctttcaggtaagacagaagaagtggtcctgaagaagctagagtatatttatgcaaaacagcaagcactagaggcacaaaaaagaaaaaagaagatgggatcagatgagtttgacatatctcccagaattagcaaacagcaggaaggatcttctgcatcatctgtagatcttggacagatgtttataaataacaggagggggaaacctttgattctttccagaaaaaaagaccaggccacagaaaatacctcacccttgaacactccacacacctctgccaaccttgtgatgactccgcaagggcaattgctcaccctaaaaggtcccctattctcaggaccagtggtagctgtttctcctgatctcttagaatctgatcttaagcctcaagttgccggtagtgctgtggctctaccagaaaatgacgacttatttatgatgccacgaattgttaatgtgacatcattggccacagagggaggtttggtagatatgggtggcagcaaatatcctcatgaagttcctgatagcaagccatctgaccatctgaaagacaccgtcaggaatgaagataattccttagaggataagggtagaatctcttccagaggaaacagagatggcagagtgacgttgggtccaacgcaggtttttctggcaaacaaagattctggttatccacaaatagttgacgtttccaatatgcagaaagcacaagagttcttacctaaaaagatttctggtgatatgagagggattcagtataaatggaaagagagtgaatcaagaggggagagagtgaagtcaaaggattcttcatttcataaattaaagatgaaagatctcaaggactcaagcatagagatggaactgaggaaagtaacatcagctatagaggaagcagctcttgattccagtgaactgctgactaacatggaagatgaggatgatactgatgagacactgacttcactgctcaatgaaattgcctttcttaatcaacaactaaatgatgactctgttggcctggctgaactacccagctctatggatacagagttcccaggggatgctcggcgggcttttattagtaaggttcctcctggaagcagagcaactttccaggttgagcacttgggaactggtttgaaagagttgcctgatgttcaaggggagagtgactctatcagtcccctcctcttgcacttggaagacgatgacttttctgagaatgaaaaacaacttgcagaaccagcctctgagccagatgtccttaagattgttattgactctgaaataaaggattccctcctttccaacaagaaagctattgatggagggaagaatacttctggcctccctgcagagcccgaaagtgtgtcctcaccccccaccctacacatgaagactggcttggagaacagcaacagcacagacactttgtggaggcctatgccaaagttggcccctctaggtttaaaagtagctaatccttccagtgatgcagatggtcagagtctcaaggtgatgccttgtttggcacctatagctgccaaagttgggtcagttggacacaaaatgaacttaacagggaatgaccaggaaggccgggaaagcaaggtgatgcctacattggcacctgttgtggctaaattgggcaactcgggggcctcaccaagttctgcagggaaatgaacttacttgtccttaagcagaagccaggctgtgaggggaaatagatctcacctcctttctctgcaggcatctgtttgtttgtgtcttagaacttggatccttgacttcaatgatgcagtggataatgatgggagaaagggggtagggtgctgaccctggtataagaagtactctgaaattctgatcatgttaaaatgtgttacctcacttgtggtgctgggtcccctcatcctctctaagaagatgtgatccattactgaacatgaggtgcccctcttacccaaggaatttataacatgactctggctccacagtggtttctagttcttcccccacaagcgaaagagctgtttgcaactttggagttgctgtagactgaactgtagcttgtagctgttgaattaagtccaaaatctaaggaatgcgatggacttgtgcaaagggatccagaagagacactttttagttgatgtttcaagaatagggagagagaggatgggtaccatggaataccaaagtgaaggactttgtgtcattcagtaaaattttcttttttcatatcctaagtagctcccattccctcaccttttcaatcagaattaacaaattcaagccttcagtaaagtagggatgcttttaacttttattattaattattttgagatcttaaaaaaatagtagttctcccttattatttttgtgggcattgaaaagctcatttcacagtaccagagatttttactgggagtatatattttggaggtaggcatagagggagccctaccccttccacaaattacgttactcaagagacagctaaaataaaatgcattatctccccagaccagagacagtggccaaaataaaaaatcatggggctggaaatttcccaaatcaaaccagcctcctggtgcttgaaggtttcattcactattacctgcacaggatgtaaagaaaagtcacagtaggcactctttaccagggaaataaggcagtatttgaatcacaagatatattttttatctgcaaccatggatccaatgatctgtagagctttttcactcattaactgtcaggatatgaaggactgacagtctgtaaagatatttatatttttgtatagttgttttcatagatttctcaaaggctgaagttttcaacctagaagatgagatttgtattgagtatagaaatgatgtttcctatctagtttgtaaataatcatggtgcacttgaggggtctcttggaaactcctagggggtcaagaatcactattctgaaactgtatagactgggatttagctgctgcattttgcctttcttaaataattatattttggaatgtaacccctgttctgtcttcattgacaggatttgcttgtgttgttaaaacactaacacaagagcttccagtgcctgggccgtgcctaggtgatgctatttcttctatatctcctgtcttctttatcccaaatcccactcagcatatcttcagacctaggttgtaagaccaactttggattggatctagccagtgaattattatttccatggttggttccctttctgttaactctggtaatcaacagattgaaaacggtggaagaacttctgaaaattgcagtgggagcaaattcttgttggttttgtgctgcttgcctttctagatctgctcatcagcacttaaccttccctcctctaaaggttactaaagaagcctgaagtaggtaaagagtgctcctcagcttcttatccttccactctttacccagcagatttcattcaatgccttagccaaggagtccagcacctgtctcccctgctaataattgtccttagagatgctagtactttaatccaggtatagcagtttcccgttattttcttgcttgtcgttcccctacatttcctcctgatttcccaagactctctttgtggcttttgagggtcagccaaggagcaggcaagtgagtgaacaatcctcaggaaaagaaggaccattttagcttaacacttccttttttttttttttttttttaagaagaatataggtaaacaggtaatgattcttgattggagataccatttgactcttgatgagagttgtacgaagatggaaatgagggatgattccaggcgttttagggggaaggctgcagataccattctaacccccaagatactgtgttctcaagacctcttagaactaggtgttgtcagggataatttgaggagggcttagtcttcagaacaatcctgcagtcttgacagaaatctaaaatctccaaaaactcctaccctttaaccttaccctagggggaactgatctatgaatattacatgtgtgattatgaaaggtgaagttgagtgagaggagttgaggaacgtggaagacagtgagctctcaccctaacactataagaagcatgatctcaatagaccaataattcacctttttatacatctgtaaataaatggaatgtttttaagaatataattatgtcagatttagcattttcttttatatattaaatatatatatctttccttttctgctttcgaaaagtgactatttttttagaaatctaagaacagaagtttggtgattgaaaggtagaatatataaacctgaaataaagcagttaaaacaattaaagcagaacttggtgttgggaggtttgtgccaacttggagtggagaattctaattccctaagacatatttgagagaggtgccactgaagtggttttatcataggaatcctttccttttctctaagtttctgatatgccatttgggggaggttttcgatgttctaatccttgtagcatgttttacatggaggcttcaaaattgtgtgcaacctgatggcaagtatttgttttagaagtcattctaaaatcattctggtgtcagtatgagcaaggcagttcacctgttaaccttggggagtaaaggtacacaaacacagtcttttagtggtaaaggacagtaggtgttcttaagggaagatatgttaaagagtttgacagttaacaaaaacgtttaaaggaatcctttagacatccaactactcctatctattaaggtcactaacagatcaagtccagttatataagcttcatacaaattgttcactttgtgtgattttatagtacatacaatagttttttcgtggaattacagatgaaatacctgatgctaggctcttctataacaagtttgaaaatgttttgaacacacaagaaaggcagacaatccatatgttatttttggtttagtggtttagataattttttttctaactatactggttgagatatttgaaatcaaatagggtgatgcactttaaaaacgggtctagaaaatagtgacagcccttgtccctcactccagaattaaacaacaacaaaccatacacagcacattttccaggtacttttatagagaatgactgataaccaagaatcagaatacatttcttgcacaaaactgttggttttgaagaaggtgctgtaaaggcatcagtacttcatgtcactgtattatcactaatgaaatttttatttttattttttttgaggcagagtctcactctgtcgcccaggctggagtgcagtggtgccgtcttggctcactgcaagctctgcctcccgggtttacgccattgtcctgcctcagcctccggagtagctgggactacaggcgcccgacactgtgcccggctaatttttttgtatttttttgtagagacagggtttcaccatgttagccaggatggtctcaatctcctgaccttgtgatccgcccgcctcggcctcccaaagtgctgggattacaggcgtgagccactgcgcccggcctactaatgaaattttacatggacacaaatatctaggtgcagggaaaattaaagctgagatattcagactcactgccagttggaggaaaaaaatcagttataacgcattttttggaatagagggaaataatttgataagtacaactttttgtttgaggtgtagctaatgttagacatgactgagctgttctacacataagtgttgaatagtgatggtggtgcattaagaggatgggaagactatgggatgagttggaaattttgagacaaatctaaactctactaatttctattgttgtaaactctgctggtagaaaagatattaagtaggaaagcagtcttggaagcatggttttgagatccattgtgtttccaactgcaatcattgatctcagctgttgcacagtgcctttgcatgtaaaggtgctcaataaatatttgaattgatgagcaaatgtttagactgtttcccaggaacttataccttatttgcatgttatgcctagggtgaattttaaaatttgatctaatgagtatagtgctaaacagacaactatataacgtctattccccagacatctagaatttcagaagctggcaaacactatgtatagatgtttaggacatataaaagtagaataaagtgttaaatagtgtatggatgatgaaatacttatgaagagttaactgcattttggaggattgggatggcaagtagagtcatgcgtcacttaatgatggggatacgttctgagaaatgcaccttgggtggttttgttctgcaaacatcatagagtgtactgtacttaaacaaacctagatggtgttgcttaaccacacacctaggctgtgttgctcctaggctacaactctgtacagcatgttaactgcactgaatatcataggcagttgtaacacgtggtgtttgtgtgtctacacataggaaaggtatggtaaaaatatgatattataatttaatgggatcatgtggtcattgaaatgtatacagtgcatgactgtaaatctgagtggagaaaagtgaataatgcttctgttcacattagacctgggactgttattttctgaggaattaatgaagaatgggaatagcctatatagcttattcctatattggtatctcaaaggcagtgtagtacctagacaataaaagttggactgaattgtgaagaattaaaaatgtgtgggccgggcatggtggctcacgcctgtaatcctggcactttgggaggccaaggcaggcggatcacgaggtcaggagatcgagacctcctggccaacatggtgaaaccccatctttactaaaaatacaaaaattaactgggtgtggtggcgcgtgcctgtaatcccagctactcgggaggctgaggcaagagaatggcttgaaaccaggagtcggaggttgcagtgagctgagatcgccactgcagtccagtctggggacagagcaagactctgtttaaaaaaaaaaaaaaaaaaaaaaaaaaagcgtggctttggcctaagactggaagtacccagattccagacttaagaaatcctcattaaaatgctttcagttgtttttcatgaaagaaatgaccagtgatactttgtaaaccatttatctggccatgagtgatcaggtgagaaaaccgttagcggacaccagaatgatctggagaggattagggacggctcttgtgggcacatttttactctagtttcatgggtggagatggcatctgccgtggtctgcagcatgcaagtaaagacaccaggtggcaccatttattagctttcaatcccatggagaggtcccatcatgtaactaccaagaggttgaaggaaccaactacctcttgcatattgtagctaatggttcttgccttcttcttccagacttgggaaataaatttgaaaatcgtattttctgtttca

SEQ ID NO: 153650 - DNA, 11859 bp, Homo sapiens
  Payload ID: 10218
  Gene Symbol: MGA
  Gene Name: MGA, MAX dimerization protein
  Uniprot ID: Q8IWI9
  ENST ID: ENST00000570161
  CDS Start-End: 1-9198
atggaggagaaacagcagattatattggctaatcaagatggtggaacagtggcaggagcagcacctaccttctttgtcatcttaaagcagccaggaaatggcaaaactgatcaaggaattttggttactaatcaggatgcctgtgctttggctagtagtgtgtcatcaccagtaaaatctaaagggaagatttgccttccagctgattgtactgtgggtggaatcactgttaccctcgataacaatagtatgtggaatgagttctatcatcgaagcacagagatgattctgaccaagcaaggaagacgcatgtttccttactgtcgttattggataacaggtttagattcaaatttgaagtatattcttgtcatggatatatctcctgtggataaccatcgttataagtggaatggtcgttggtgggaacctagtgggaaggctgaacctcatgttttggggagggttttcattcatccagaatctccttccacaggtcattattggatgcatcaaccagtatctttctataaactcaaacttaccaacaatacactggaccaagaagggcatatcatcttgcactctatgcatcgttacctgccgaggcttcatttggtgcctgcagaaaaggctgtggaggtgatacaattaaatggccctggtgtccacacttttaccttcccacagactgaattctttgcagtaacagcttatcagaacattcagattactcagctgaaaatagattacaatccatttgccaaaggctttcgggatgatgggctgaataataagccccagagagatggaaaacaaaagaacagctctgaccaagaagggaataatatttccagttcttctggtcatcgggtccgtcttacagaaggtcaggggtcagagatacaaccaggtgatttggatcctttgtcaaggggtcatgaaacatcaggcaagggtttggagaagacttcccttaatataaaacgagactttcttggtttcatggatactgattcagcacttagtgaagttcctcaattgaagcaagagatttctgaatgtcttattgccagcagttttgaagatgactcccgtgtagcctcaccgttagaccagaacggaagcttcaatgttgttattaaagaggaacctctagatgattatgactacgaacttggtgagtgcccagaaggggtcactgtgaaacaggaagagacagatgaagagacggatgtatactcaaacagtgatgatgatcctatactagagaaacagctaaagaggcacaataaagttgacaacccagaagctgaccatctatcttctaaatggcttccaagcagcccatcaggtgttgctaaagctaaaatgttcaaattagacactggaaagatgccagtagtctatctggagccctgtgctgtcaccagaagcacagttaagatttctgaactccccgataacatgctttccacatctcgaaaggataaatcttctatgttggcagaattggaatatttgcctacatacattgaaaattccaatgagactgccttctgcttaggcaaggaatcagaaaatggtcttagaaaacattcaccagatctcagagtggtacaaaaatatcccttactgaaagagcctcagtggaaatatcctgatatatctgacagcattagcacagaaagaatactcgacgattcaaaggattcagttggagactcactttcaggaaaagaggacttgggcagaaagagaacaactatgcttaagattgcaacagccgcaaaggtagtgaatgctaatcagaatgcctctccaaatgtccctggaaaaagaggaaggccacgaaaattgaaactctgtaaggcaggacgaccacctaagaacacaggaaagtctttaatttctacaaagaatacacctgtaagccctgggagtacctttccagatgtgaagcctgatctggaagatgtggatggtgttctctttgtttcctttgaatcaaaggaagctctagacattcatgcagttgatgggacaacagaagaatcttctagtctccaggcatcaaccacaaatgactcaggttacagagcaagaatttcccagttggaaaaggaattgatagaagatttgaagactttgcggcacaagcaggtgatacatcctggtcttcaagaagtgggcttaaaattgaattcagtggatccaacaatgagcattgatcttaaatacttgggagtacagttacctttggctccagctactagctttcctttttggaaccttacaggaaccaaccctgcctctcctgatgcgggatttccctttgtttctaggacagggaaaaccaatgatttcactaagatcaagggatggaggggaaaatttcatagtgcttctgcatctaggaatgaaggtggaaattcagaaagttcactgaaaaatcgttctgctttctgtagtgataagctagatgaatacttggaaaatgaaggcaagctgatggaaacaagcatgggtttttcttctaatgctcccacatctcctgtggtgtaccagcttcccactaagagtaccagttatgtacgaacacttgatagtgtactaaagaagcaatctactatttccccttctacctcttattctttgaaacctcattctgtaccccctgtctctcgaaaggcaaagtctcaaaacagacaggcaactttcagtggccgaactaaatcatcttataaatccattttaccataccctgtttcaccaaagcagaaatactctcatgtgattctaggagataaggttaccaagaattcttcaggcatcatctcagaaaatcaggcgaataactttgttgtgccaactttggatgaaaatatatttccaaagcagattagtttgcggcaggcacagcagcagcagcaacagcaacagggaagtcgccctccaggcttgtctaaatctcaggtgaagctaatggacctggaagactgtgcactttgggaaggaaaaccaaggacatacatcacagaagagcgagcagatgtatccttaacaactctacttacagctcaagcatccctcaaaactaaacctatccacacaatcataaggaaacgagcccctccctgcaacaatgacttctgtcgactgggttgtgtatgttccagtctagctttggagaagcgccaacctgctcactgccgccgaccagactgcatgtttggttgtacttgtttgaaaagaaaagttgtacttgttaaaggaggatccaaaactaagcattttcagaggaaggctgctcatcgagatccagtattttatgatactctgggagaggaggcaagggaggaggaagaaggaatcagggaggaggaggaacaattgaaagagaaaaagaagagaaagaagctagaatacactatatgtgagacagagcctgaacagcctgttcgacattacccattatgggtaaaagtagaaggtgaagtagatccagaaccagtttatatccccacgccttctgtcattgagcctatgaaaccattgttattgcctcagccagaagttttatctcctactgtgaagggcaaactgctcactggaattaaatctccacggtcatatactcccaaacccaatcctgtgattcgggaagaggacaaagatccagtctacttgtactttgaaagtatgatgacttgtgctcgagttcgagtatatgagcgaaaaaaagaggaccagagacaaccatcttcctcctcctccccatctccatcatttcagcagcaaacttcatgtcattctagccctgagaaccataataatgcaaaggaacctgattctgaacagcagcccttaaaacaactcacctgtgacttggaggatgattctgataaattacaagaaaagagctggaagtcttcctgcaatgaaggagaatcctcttctacttcttatatgcatcagaggtcacctggtggtcccaccaaactgattgagatcatctcagactgcaactgggaggaagatcggaacaagattttgagcatcttatcccagcacatcaatagcaacatgccacaatcacttaaggtgggcagcttcatcattgagttggcttctcagcgaaagagccggggtgagaagaaccctcctgtttattcttctcgtgtgaaaatctctatgccatcatgtcaagaccaagatgatatggctgagaaatctggatcagagactcctgatggtccattgtcccctgggaaaatggaggatatctctcctgtgcagacagatgccctggattcagtgagggagagattacatggaggcaaaggtctgcctttttatgcagggctttctcctgcagggaagcttgtggcctataaacgtaaacccagttcaagtacatctgggcttatccaggtagcatccaatgccaaggtggctgcatccaggaaaccacgtaccctgttgccttcaacatccaattccaaaatggcatcctcctctggcactgcaacaaatcgccctgggaagaatctgaaggcgtttgtcccagcaaaacggccaattgcggctcgaccctctcctggtggtgtgttcacacagtttgtgatgagtaaagttggagccttgcagcagaagatacctggagttagcacaccccaaaccctggcagggacacagaagttcagtatcagaccttctccagtaatggtcgtcacacctgtggtttcttctgagccagttcaggtgtgcagccctgtgactgctgctgtcactactaccacccctcaagtgtttttagaaaatactactgctgtgacacctatgactgctatttctgacgtggaaactaaagaaactacttattcttctggtgccaccactacaggggttgttgaggtctctgaaactaataccagcacctctgtaacatctacccagtctacagccactgtgaaccttaccaaaaccactgggataactacccctgtggcttcagttgcttttcctaagtctttggtagcatctccttcaaccataactcttcctgttgcttccactgcttccacctccttagtcgtggtgactgcagctgcatcttcctccatggtgaccacaccaacttcatctctgggctctgttcctattatactctcaggaattaatgggagtccaccagtgagccagagaccagaaaatgctgctcaaattccagtggctactccacaggtctctcctaacacagtgaaacgtgctggacctcgattgttgttgattccagtgcagcagggttctcctactcttagacctgtctcaaacacacaacttcagggacatcggatggtcttgcagcctgttaggagtccaagtggaatgaacttattcaggcaccctaatgggcagattgtccagcttctacctttgcatcagcttcgaggctctaatacccagcccaacttacagcctgtcatgtttcggaacccagggtctgtgatgggaatccggttacctgctccttccaaaccctctgagactccgccatcttccacttcgtcctctgctttctctgtcatgaatcctgtaattcaagctgttgggtcttcttcagcagtgaatgttatcactcaggcaccatcattgctttcctctggagctagttttgtgtctcaggctggtacattgaccctgaggatttctcctcctgaaccacaaagctttgcaagtaaaacaggctctgaaaccaaaataacttatagctcaggaggacagcctgttggtacagccagtcttattcctctccagtctggtagttttgccttgttacagctcccaggacaaaagcctgttcctagctccattcttcagcatgttgcttcccttcagatgaagagagaatctcagaatccagaccagaaagatgaaacaaactcaataaaaagagagcaagaaacgaagaaggttctacagtcagaaggagaggctgtagaccctgaggctaatgtaataaaacaaaactcaggagctgctacctcagaagaaactctgaatgattccttggaagataggggtgatcatttggatgaagaatgccttccagaagaaggttgtgcaactgtcaaaccatctgagcattcctgtatcactgggtcacatacagatcaagattataaagatgttaatgaagaatatggggctaggaatcgtaagagttccaaagaaaaagtggctgttctggaagttaggaccatttctgaaaaagccagtaataagacagtccaaaatttaagtaaagtacagcatcaaaaacttggtgatgtgaaggtggaacagcagaaaggatttgacaatccagaagaaaactcaagtgaatttccagtcacctttaaggaagaaagtaaatttgaattgtcaggaagcaaagttatggagcagcaatctaatctacagccagaggccaaagagaaggaatgtggagactctctggagaaagacagggaaagatggagaaaacatctgaagggccccttaaccaggaaatgtgttggagcttcacaggaatgtaagaaagaggcagacgagcagttaattaaagaaacaaagacatgtcaggaaaattcagatgtgtttcagcaagaacaaggcatctctgacttacttggaaaaagtggaattactgaagatgccagagttttgaaaactgaatgtgattcttggagtaggatttctaatccttcagccttctccattgttcctaggagagctgcaaaaagcagcagagggaatggacattttcagggtcacttactgctacctggagaacagatacaaccaaagcaagagaagaagggtgggagaagcagtgctgacttcactgttttggatttggaagaagatgatgaagatgataatgagaaaactgatgattctattgatgaaattgtggatgttgtttctgactaccagagtgaggaggttgatgatgtagaaaagaataactgtgtagaatacattgaggatgatgaggagcacgtggacattgagactgtagaagagctctcagaggaaattaatgttgctcacctgaagaccacagcggcccacacacagtcattcaaacagccgtcctgtactcacatctctgcagatgaaaaagcagctgaaaggagtcgaaaggctccaccaattcctctaaaactgaagcctgattactggagtgacaaactacagaaagaagcagaagcgtttgcttattatcgccggacacacactgccaatgagcggcggcggcgtggtgaaatgagggatctctttgagaaattaaagatcacattgggattacttcattcttccaaggtttccaaaagtctcattcttactcgagccttcagtgaaattcagggactaacagatcaggcagacaaattgataggacagaaaaatctcctgactcgaaaacggaatattctgatacggaaagtatcgtctctttcaggtaagacagaagaagtggtcctgaagaagctagagtatatttatgcaaaacagcaagcactagaggcacaaaaaagaaaaaagaagatgggatcagatgagtttgacatatctcccagaattagcaaacagcaggaaggatcttctgcatcatctgtagatcttggacagatgtttataaataacaggagggggaaacctttgattctttccagaaaaaaagaccaggccacagaaaatacctcacccttgaacactccacacacctctgccaaccttgtgatgactccgcaagggcaattgctcaccctaaaaggtcccctattctcaggaccagtggtagctgtttctcctgatctcttagaatctgatcttaagcctcaagttgccggtagtgctgtggctctaccagaaaatgacgacttatttatgatgccacgaattgttaatgtgacatcattggccacagagggaggtttggtagatatgggtggcagcaaatatcctcatgaagttcctgatagcaagccatctgaccatctgaaagacaccgtcaggaatgaagataattccttagaggataagggtagaatctcttccagaggaaacagagatggcagagtgacgttgggtccaacgcaggtttttctggcaaacaaagattctggttatccacaaatagttgacgtttccaatatgcagaaagcacaagagttcttacctaaaaagatttctggtgatatgagagggattcagtataaatggaaagagagtgaatcaagaggggagagagtgaagtcaaaggattcttcatttcataaattaaagatgaaagatctcaaggactcaagcatagagatggaactgaggaaagtaacatcagctatagaggaagcagctcttgattccagtgaactgctgactaacatggaagatgaggatgatactgatgagacactgacttcactgctcaatgaaattgcctttcttaatcaacaactaaatgatgactctgttggcctggctgaactacccagctctatggatacagagttcccaggggatgctcggcgggcttttattagtaaggttcctcctggaagcagagcaactttccaggttgagcacttgggaactggtttgaaagagttgcctgatgttcaaggggagagtgactctatcagtcccctcctcttgcacttggaagacgatgacttttctgagaatgaaaaacaacttgcagaaccagcctctgagccagatgtccttaagattgttattgactctgaaataaaggattccctcctttccaacaagaaagctattgatggagggaagaatacttctggcctccctgcagagcccgaaagtgtgtcctcaccccccaccctacacatgaagactggcttggagaacagcaacagcacagacactttgtggaggcctatgccaaagttggcccctctaggtttaaaagtagctaatccttccagtgatgcagatggtcagagtctcaaggtgatgccttgtttggcacctatagctgccaaagttgggtcagttggacacaaaatgaacttaacagggaatgaccaggaaggccgggaaagcaaggtgatgcctacattggcacctgttgtggctaaattgggcaactcgggggcctcaccaagttctgcagggaaatgaacttacttgtccttaagcagaagccaggctgtgaggggaaatagatctcacctcctttctctgcaggcatctgtttgtttgtgtcttagaacttggatccttgacttcaatgatgcagtggataatgatgggagaaagggggtagggtgctgaccctggtataagaagtactctgaaattctgatcatgttaaaatgtgttacctcacttgtggtgctgggtcccctcatcctctctaagaagatgtgatccattactgaacatgaggtgcccctcttacccaaggaatttataacatgactctggctccacagtggtttctagttcttcccccacaagcgaaagagctgtttgcaactttggagttgctgtagactgaactgtagcttgtagctgttgaattaagtccaaaatctaaggaatgcgatggacttgtgcaaagggatccagaagagacactttttagttgatgtttcaagaatagggagagagaggatgggtaccatggaataccaaagtgaaggactttgtgtcattcagtaaaattttcttttttcatatcctaagtagctcccattccctcaccttttcaatcagaattaacaaattcaagccttcagtaaagtagggatgcttttaacttttattattaattattttgagatcttaaaaaaatagtagttctcccttattatttttgtgggcattgaaaagctcatttcacagtaccagagatttttactgggagtatatattttggaggtaggcatagagggagccctaccccttccacaaattacgttactcaagagacagctaaaataaaatgcattatctccccagaccagagacagtggccaaaataaaaaatcatggggctggaaatttcccaaatcaaaccagcctcctggtgcttgaaggtttcattcactattacctgcacaggatgtaaagaaaagtcacagtaggcactctttaccagggaaataaggcagtatttgaatcacaagatatattttttatctgcaaccatggatccaatgatctgtagagctttttcactcattaactgtcaggatatgaaggactgacagtctgtaaagatatttatatttttgtatagttgttttcatagatttctcaaaggctgaagttttcaacctagaagatgagatttgtattgagtatagaaatgatgtttcctatctagtttgtaaataatcatggtgcacttgaggggtctcttggaaactcctagggggtcaagaatcactattctgaaactgtatagactgggatttagctgctgcattttgcctttcttaaataattatattttggaatgtaacccctgttctgtcttcattgacaggatttgcttgtgttgttaaaacactaacacaagagcttccagtgcctgggccgtgcctaggtgatgctatttcttctatatctcctgtcttctttatcccaaatcccactcagcatatcttcagacctaggttgtaagaccaactttggattggatctagccagtgaattattatttccatggttggttccctttctgttaactctggtaatcaacagattgaaaacggtggaagaacttctgaaaattgcagtgggagcaaattcttgttggttttgtgctgcttgcctttctagatctgctcatcagcacttaaccttccctcctctaaaggttactaaagaagcctgaagtaggtaaagagtgctcctcagcttcttatccttccactctttacccagcagatttcattcaatgccttagccaaggagtccagcacctgtctcccctgctaataattgtccttagagatgctagtactttaatccaggtatagcagtttcccgttattttcttgcttgtcgttcccctacatttcctcctgatttcccaagactctctttgtggcttttgagggtcagccaaggagcaggcaagtgagtgaacaatcctcaggaaaagaaggaccattttagcttaacacttccttttttttttttttttttttaagaagaatataggtaaacaggtaatgattcttgattggagataccatttgactcttgatgagagttgtacgaagatggaaatgagggatgattccaggcgttttagggggaaggctgcagataccattctaacccccaagatactgtgttctcaagacctcttagaactaggtgttgtcagggataatttgaggagggcttagtcttcagaacaatcctgcagtcttgacagaaatctaaaatctccaaaaactcctaccctttaaccttaccctagggggaactgatctatgaatattacatgtgtgattatgaaaggtgaagttgagtgagaggagttgaggaacgtggaagacagtgagctctcaccctaacactataagaagcatgatctcaatagaccaataattcacctttttatacatctgtaaataaatggaatgtttttaagaatataattatgtcagatttagcattttcttttatatattaaatatatatatctttccttttctgctttcgaaaagtgactatttttttagaaatctaagaacagaagtttggtgattgaaaggtagaatatataaacctgaaataaagcagttaaaacaattaaagcag

SEQ ID NO: 153651 - DNA, 3537 bp, Homo sapiens
  Payload ID: 10218
  Gene Symbol: MGA
  Gene Name: MGA, MAX dimerization protein
  ENST ID: ENST00000563576
  CDS Start-End: 122-3537
tccgggacccgcgagcggagcggcgcgtgggtcggttgcggtcggccccggcaggatgggaaggccattgtgactatgtggtgattacagttgtcttactactgagtttcctactgaaatcatggaggagaaacagcagattatattggctaatcaagatggtggaacagtggcaggagcagcacctaccttctttgtcatcttaaagcagccaggaaatggcaaaactgatcaaggaattttggttactaatcaggatgcctgtgctttggctagtagtgtgtcatcaccagtaaaatctaaagggaagatttgccttccagctgattgtactgtgggtggaatcactgttaccctcgataacaatagtatgtggaatgagttctatcatcgaagcacagagatgattctgaccaagcaaggaagacgcatgtttccttactgtcgttattggataacaggtttagattcaaatttgaagtatattcttgtcatggatatatctcctgtggataaccatcgttataagtggaatggtcgttggtgggaacctagtgggaaggctgaacctcatgttttggggagggttttcattcatccagaatctccttccacaggtcattattggatgcatcaaccagtatctttctataaactcaaacttaccaacaatacactggaccaagaagggcatatcatcttgcactctatgcatcgttacctgccgaggcttcatttggtgcctgcagaaaaggctgtggaggtgatacaattaaatggccctggtgtccacacttttaccttcccacagactgaattctttgcagtaacagcttatcagaacattcagattactcagctgaaaatagattacaatccatttgccaaaggctttcgggatgatgggctgaataataagccccagagagatggaaaacaaaagaacagctctgaccaagaagggaataatatttccagttcttctggtcatcgggtccgtcttacagaaggtcaggggtcagagatacaaccaggtgatttggatcctttgtcaaggggtcatgaaacatcaggcaagggtttggagaagacttcccttaatataaaacgagactttcttggtttcatggatactgattcagcacttagtgaagttcctcaattgaagcaagagatttctgaatgtcttattgccagcagttttgaagatgactcccgtgtagcctcaccgttagaccagaacggaagcttcaatgttgttattaaagaggaacctctagatgattatgactacgaacttggtgagtgcccagaaggggtcactgtgaaacaggaagagacagatgaagagacggatgtatactcaaacagtgatgatgatcctatactagagaaacagctaaagaggcacaataaagttgacaacccagaagctgaccatctatcttctaaatggcttccaagcagcccatcaggtgttgctaaagctaaaatgttcaaattagacactggaaagatgccagtagtctatctggagccctgtgctgtcaccagaagcacagttaagatttctgaactccccgataacatgctttccacatctcgaaaggataaatcttctatgttggcagaattggaatatttgcctacatacattgaaaattccaatgagactgccttctgcttaggcaaggaatcagaaaatggtcttagaaaacattcaccagatctcagagtggtacaaaaatatcccttactgaaagagcctcagtggaaatatcctgatatatctgacagcattagcacagaaagaatactcgacgattcaaaggattcagttggagactcactttcaggaaaagaggacttgggcagaaagagaacaactatgcttaagattgcaacagccgcaaaggtagtgaatgctaatcagaatgcctctccaaatgtccctggaaaaagaggaaggccacgaaaattgaaactctgtaaggcaggacgaccacctaagaacacaggaaagtctttaatttctacaaagaatacacctgtaagccctgggagtacctttccagatgtgaagcctgatctggaagatgtggatggtgttctctttgtttcctttgaatcaaaggaagctctagacattcatgcagttgatgggacaacagaagaatcttctagtctccaggcatcaaccacaaatgactcaggttacagagcaagaatttcccagttggaaaaggaattgatagaagatttgaagactttgcggcacaagcaggtgatacatcctggtcttcaagaagtgggcttaaaattgaattcagtggatccaacaatgagcattgatcttaaatacttgggagtacagttacctttggctccagctactagctttcctttttggaaccttacaggaaccaaccctgcctctcctgatgcgggatttccctttgtttctaggacagggaaaaccaatgatttcactaagatcaagggatggaggggaaaatttcatagtgcttctgcatctaggaatgaaggtggaaattcagaaagttcactgaaaaatcgttctgctttctgtagtgataagctagatgaatacttggaaaatgaaggcaagctgatggaaacaagcatgggtttttcttctaatgctcccacatctcctgtggtgtaccagcttcccactaagagtaccagttatgtacgaacacttgatagtgtactaaagaagcaatctactatttccccttctacctcttattctttgaaacctcattctgtaccccctgtctctcgaaaggcaaagtctcaaaacagacaggcaactttcagtggccgaactaaatcatcttataaatccattttaccataccctgtttcaccaaagcagaaatactctcatgtgattctaggagataaggttaccaagaattcttcaggcatcatctcagaaaatcaggcgaataactttgttgtgccaactttggatgaaaatatatttccaaagcagattagtttgcggcaggcacagcagcagcagcaacagcaacagggaagtcgccctccaggcttgtctaaatctcaggtgaagctaatggacctggaagactgtgcactttgggaaggaaaaccaaggacatacatcacagaagagcgagcagatgtatccttaacaactctacttacagctcaagcatccctcaaaactaaacctatccacacaatcataaggaaacgagcccctccctgcaacaatgacttctgtcgactgggttgtgtatgttccagtctagctttggagaagcgccaacctgctcactgccgccgaccagactgcatgtttggttgtacttgtttgaaaagaaaagttgtacttgttaaaggaggatccaaaactaagcattttcagaggaaggctgctcatcgagatccagtattttatgatactctgggagaggaggcaagggaggaggaagaaggaatcagggaggaggaggaacaattgaaagagaaaaagaagagaaa

SEQ ID NO: 153652 - DNA, 532 bp, Homo sapiens
  Payload ID: 10218
  Gene Symbol: MGA
  Gene Name: MGA, MAX dimerization protein
  ENST ID: ENST00000561532
  CDS Start-End: 1-251
ctgaccaagaagggaataatatttccagttcttctggtcatcgggtccgtcttacagaaggtcaggggtcagagatacaaccaggtgatttggatcctttgtcaaggggtcatgaaacatcaggcaagggtttggagaagacttcccttaatataaaacgagactttcttggtttcatggatactgattcagcacttagtgaagttcctcaattgaagcaagagatttctgaatggtattcttttgcctaatttatttggatagaagagacttctcagaagaatgaaacttaactgtttgtgaaattttttccccaaggcaagatttcattcatcatgtataaagtttttgttggaaaatagaagaaatcctttctgagagtgtttataacttaccaagttcaatttctcaggaagatgtgaaagcagttattgcagtagcagcccagatctagcctcagaggtttcccagctactgcgaacaaatgcatgttgtgtgctaaatgaaaagaagataaaaaatttttttctac

SEQ ID NO: 153653 - DNA, 3521 bp, Homo sapiens
  Payload ID: 10218
  Gene Symbol: MGA
  Gene Name: MGA, MAX dimerization protein
  ENST ID: ENST00000564190
  CDS Start-End: 1-3521
actcacctgtgacttggaggatgattctgataaattacaagaaaagagctggaagtcttcctgcaatgaaggagaatcctcttctacttcttatatgcatcagaggtcacctggtggtcccaccaaactgattgagatcatctcagactgcaactgggaggaagatcggaacaagattttgagcatcttatcccagcacatcaatagcaacatgccacaatcacttaaggttaatggtaagagttacccgcaggctaagttgctattgggacagatgggggcattgcatccagccaataggctagctgcttatatcacaggcaggttgcgaccctcagtcctggacctctcaaccctcagtactgtcatctccaaggtagcatccaatgccaaggtggctgcatccaggaaaccacgtaccctgttgccttcaacatccaattccaaaatggcatcctcctctggcactgcaacaaatcgccctgggaagaatctgaaggcgtttgtcccagcaaaacggccaattgcggctcgaccctctcctggtggtgtgttcacacagtttgtgatgagtaaagttggagccttgcagcagaagatacctggagttagcacaccccaaaccctggcagggacacagaagttcagtatcagaccttctccagtaatggtcgtcacacctgtggtttcttctgagccagttcaggtgtgcagccctgtgactgctgctgtcactactaccacccctcaagtgtttttagaaaatactactgctgtgacacctatgactgctatttctgacgtggaaactaaagaaactacttattcttctggtgccaccactacaggggttgttgaggtctctgaaactaataccagcacctctgtaacatctacccagtctacagccactgtgaaccttaccaaaaccactgggataactacccctgtggcttcagttgcttttcctaagtctttggtagcatctccttcaaccataactcttcctgttgcttccactgcttccacctccttagtcgtggtgactgcagctgcatcttcctccatggtgaccacaccaacttcatctctgggctctgttcctattatactctcaggaattaatgggagtccaccagtgagccagagaccagaaaatgctgctcaaattccagtggctactccacaggtctctcctaacacagtgaaacgtgctggacctcgattgttgttgattccagtgcagcagggttctcctactcttagacctgtctcaaacacacaacttcagggacatcggatggtcttgcagcctgttaggagtccaagtggaatgaacttattcaggcaccctaatgggcagattgtccagcttctacctttgcatcagcttcgaggctctaatacccagcccaacttacagcctgtcatgtttcggaacccagggtctgtgatgggaatccggttacctgctccttccaaaccctctgagactccgccatcttccacttcgtcctctgctttctctgtcatgaatcctgtaattcaagctgttgggtcttcttcagcagtgaatgttatcactcaggcaccatcattgctttcctctggagctagttttgtgtctcaggctggtacattgaccctgaggatttctcctcctgaaccacaaagctttgcaagtaaaacaggctctgaaaccaaaataacttatagctcaggaggacagcctgttggtacagccagtcttattcctctccagtctggtagttttgccttgttacagctcccaggacaaaagcctgttcctagctccattcttcagcatgttgcttcccttcagatgaagagagaatctcagaatccagaccagaaagatgaaacaaactcaataaaaagagagcaagaaacgaagaaggttctacagtcagaaggagaggctgtagaccctgaggctaatgtaataaaacaaaactcaggagctgctacctcagaagaaactctgaatgattccttggaagataggggtgatcatttggatgaagaatgccttccagaagaaggttgtgcaactgtcaaaccatctgagcattcctgtatcactgggtcacatacagatcaagattataaagatgttaatgaagaatatggggctaggaatcgtaagagttccaaagaaaaagtggctgttctggaagttaggaccatttctgaaaaagccagtaataagacagtccaaaatttaagtaaagtacagcatcaaaaacttggtgatgtgaaggtggaacagcagaaaggatttgacaatccagaagaaaactcaagtgaatttccagtcacctttaaggaagaaagtaaatttgaattgtcaggaagcaaagttatggagcagcaatctaatctacagccagaggccaaagagaaggaatgtggagactctctggagaaagacagggaaagatggagaaaacatctgaagggccccttaaccaggaaatgtgttggagcttcacaggaatgtaagaaagaggcagacgagcagttaattaaagaaacaaagacatgtcaggaaaattcagatgtgtttcagcaagaacaaggcatctctgacttacttggaaaaagtggaattactgaagatgccagagttttgaaaactgaatgtgattcttggagtaggatttctaatccttcagccttctccattgttcctaggagagctgcaaaaagcagcagagggaatggacattttcagggtcacttactgctacctggagaacagatacaaccaaagcaagagaagaagggtgggagaagcagtgctgacttcactgttttggatttggaagaagatgatgaagatgataatgagaaaactgatgattctattgatgaaattgtggatgttgtttctgactaccagagtgaggaggttgatgatgtagaaaagaataactgtgtagaatacattgaggatgatgaggagcacgtggacattgagactgtagaagagctctcagaggaaattaatgttgctcacctgaagaccacagcggcccacacacagtcattcaaacagccgtcctgtactcacatctctgcagatgaaaaagcagctgaaaggagtcgaaaggctccaccaattcctctaaaactgaagcctgattactggagtgacaaactacagaaagaagcagaagcgtttgcttattatcgccggacacacactgccaatgagcggcggcggcgtggtgaaatgagggatctctttgagaaattaaagatcacattgggattacttcattcttccaaggtttccaaaagtctcattcttactcgagccttcagtgaaattcagggactaacagatcaggcagacaaattgataggacagaaaaatctcctgactcgaaaacggaatattctgatacggaaagtatcgtctctttcaggtaagacagaagaagtggtcctgaagaagctagagtatatttatgcaaaacagcaagcactagaggcac

SEQ ID NO: 153654 - DNA, 1496 bp, Homo sapiens
  Payload ID: 10218
  Gene Symbol: MGA
  Gene Name: MGA, MAX dimerization protein
  ENST ID: ENST00000619521
  CDS Start-End: 897-1082
agaacttggtgttgggaggtttgtgccaacttggagtggagaattctaattccctaagacatatttgagagaggtgccactgaagtggttttatcataggaatcctttccttttctctaagtttctgatatgccatttgggggaggttttcgatgttctaatccttgtagcatgttttacatggaggcttcaaaattgtgtgcaacctgatggcaagtatttgttttagaagtcattctaaaatcattctggtgtcagtatgagcaaggcagttcacctgttaaccttggggagtaaaggtacacaaacacagtcttttagtggtaaaggacagtaggtgttcttaagggaagatatgttaaagagtttgacagttaacaaaaacgtttaaaggaatcctttagacatccaactactcctatctattaaggtcactaacagatcaagtccagttatataagcttcatacaaattgttcactttgtgtgattttatagtacatacaatagttttttcgtggaattacagatgaaatacctgatgctaggctcttctataacaagtttgaaaatgttttgaacacacaagaaaggcagacaatccatatgttatttttggtttagtggtttagataattttttttctaactatactggttgagatatttgaaatcaaatagggtgatgcactttaaaaacgggtctagaaaatagtgacagcccttgtccctcactccagaattaaacaacaacaaaccatacacagcacattttccaggtacttttatagagaatgactgataaccaagaatcagaatacatttcttgcacaaaactgttggttttgaagaaggtgctgtaaaggcatcagtacttcatgtcactgtattatcactaatgaaatttttatttttattttttttgaggcagagtctcactctgtcgcccaggctggagtgcagtggtgccgtcttggctcactgcaagctctgcctcccgggtttacgccattgtcctgccccagctactcgggaggctgaggcaagagaatggcttgaaaccaggagtcggaggttgcagtgagctgagatcgccactgcagtccagtctggggacagagcaagactctgtttaaaaaaaaaaaaaaaaaaaaaaaaaaagcgtggctttggcctaagactggaagtacccagattccagacttaagaaatcctcattaaaatgctttcagttgtttttcatgaaagaaatgaccagtgatactttgtaaaccatttatctggccatgagtgatcaggtgagaaaaccgttagcggacaccagaatgatctggagaggattagggacggctcttgtgggcacatttttactctagtttcatgggtggagatggcatctgccgtggtctgcagcatgcaagtaaagacaccaggtggcaccatttattagctttcaatcccatggagaggtcccatcatgtaactaccaagaggttga

SEQ ID NO: 153655 - DNA, 1937 bp, Homo sapiens
  Payload ID: 10219
  Gene Symbol: MGAT4C
  Gene Name: MGAT4 family, member C
  Uniprot ID: Q9UBM8
  ENST ID: ENST00000552808
  CDS Start-End: 225-1661
actcatgcttccaggctgcacagagcactgttggatctagctgaacgaattgttttctctgtctctgggtatcaacggtttctgtacagcacagattatgacagcgtctttcttaagatggaatcttggaacgtctcatgcttgggaaggacatggtcagatttgttgtaagaaagactgtgcagaggagtgtggcaaagggatccagaagatgcaagaagagaatgtttaaatttcatcaaatgaaacatatttttgaaatacttgataaaatgagatgcctgagaaaacgttctacagtgtcattcttgggagttcttgtcatttttctcctttttatgaacttgtacattgaagatagctatgttctggaaggagacaaacaacttataagggaaacatccacacatcaactgaattcagaacgctatgttcatactttcaaggatttatctaatttctcaggagccataaatgtcacctatcgctacctagctgccacacctttacaaagaaagcggtatcttacaattggactttcttcagtaaagcgaaaaaaaggaaactatttacttgagacaattaagtcaatttttgagcaatccagctatgaagagctgaaggaaatttcagtggtggttcacctagcagactttaattcttcctggcgtgatgccatggtccaggatattacacagaaatttgcgcaccatattattgcaggaagattaatggttatacatgctccagaggagtattacccaatcctagatggccttaaaagaaattacaatgatccagaagatagagtcaaatttcgttccaagcaaaatgtagattatgcttttctgcttaatttttgtgccaatacttcagactattatgtaatgcttgaagatgatgttcgatgttcaaaaaatttcttaactgccatcaagaaagtcattgcatccctagaaggaacttactgggtaactcttgaattctctaagcttggctacattggtaaactctatcattctcatgatctcccacgtttggcccattttttattaatgttttatcaagaaatgccttgtgattggctattgactcatttccgtggtctgttggctcagaaaaatgtgatccgttttaaaccatctctctttcagcacatgggctattattcatcatacaaagggacggagaataagctgaaggatgatgattttgaagaggagtcatttgacattcctgataacccccctgcaagtctgtacaccaacatgaatgtgtttgaaaattatgaagcaagcaaggcttacagtagtgttgatgagtacttttgggggaaaccaccttcaacaggagatgtttttgtgattgtatttgaaaatccaattataataaaaaaaattaaagtaaatactggaacagaagatcggcaaaatgatattttgcatcatggagccctagatgttggggaaaacgttatgcctagcaaacaaaggagacaatgttctacttacttaagactaggagaattcaaaaatggaaactttgaaatgtcaggtgtaaatcaaaaaattccatttgatatacattgtatgaggatatatgtcaccaaaacacaaaaggaatggctaattattaggagtattagcatttggacttcttagccaattaaatcagtatgttcagtttctgaagcagttcttcctgcttcgtcttttgctacctttgtcttttggagggaaagcaatggatgggatatgttaaaagaaacattaattacattggcagttttcatttatacattgttgacataattttactcttaatacacacttgtatttattttaacgtctgaagttgaatatcagtctatagctaatgctactttcatttatatttttaaatgttcttagttttaaaatttcaactgattgtcgaaa

SEQ ID NO: 153656 - DNA, 2159 bp, Homo sapiens
  Payload ID: 10219
  Gene Symbol: MGAT4C
  Gene Name: MGAT4 family, member C
  Uniprot ID: Q9UBM8
  ENST ID: ENST00000548651
  CDS Start-End: 179-1615
agggtatcaacggtttctgtacagcacagattatgacagcgtctttcttaagcagatggaatcttggaacgtctcatgcttgggaaggacatggtcagatttgttgtaagaaagactgtgcagaggagtgtggcaaagggatccagaagatgcaaggtattatttagaaaagaagagaatgtttaaatttcatcaaatgaaacatatttttgaaatacttgataaaatgagatgcctgagaaaacgttctacagtgtcattcttgggagttcttgtcatttttctcctttttatgaacttgtacattgaagatagctatgttctggaaggagacaaacaacttataagggaaacatccacacatcaactgaattcagaacgctatgttcatactttcaaggatttatctaatttctcaggagccataaatgtcacctatcgctacctagctgccacacctttacaaagaaagcggtatcttacaattggactttcttcagtaaagcgaaaaaaaggaaactatttacttgagacaattaagtcaatttttgagcaatccagctatgaagagctgaaggaaatttcagtggtggttcacctagcagactttaattcttcctggcgtgatgccatggtccaggatattacacagaaatttgcgcaccatattattgcaggaagattaatggttatacatgctccagaggagtattacccaatcctagatggccttaaaagaaattacaatgatccagaagatagagtcaaatttcgttccaagcaaaatgtagattatgcttttctgcttaatttttgtgccaatacttcagactattatgtaatgcttgaagatgatgttcgatgttcaaaaaatttcttaactgccatcaagaaagtcattgcatccctagaaggaacttactgggtaactcttgaattctctaagcttggctacattggtaaactctatcattctcatgatctcccacgtttggcccattttttattaatgttttatcaagaaatgccttgtgattggctattgactcatttccgtggtctgttggctcagaaaaatgtgatccgttttaaaccatctctctttcagcacatgggctattattcatcatacaaagggacggagaataagctgaaggatgatgattttgaagaggagtcatttgacattcctgataacccccctgcaagtctgtacaccaacatgaatgtgtttgaaaattatgaagcaagcaaggcttacagtagtgttgatgagtacttttgggggaaaccaccttcaacaggagatgtttttgtgattgtatttgaaaatccaattataataaaaaaaattaaagtaaatactggaacagaagatcggcaaaatgatattttgcatcatggagccctagatgttggggaaaacgttatgcctagcaaacaaaggagacaatgttctacttacttaagactaggagaattcaaaaatggaaactttgaaatgtcaggtgtaaatcaaaaaattccatttgatatacattgtatgaggatatatgtcaccaaaacacaaaaggaatggctaattattaggagtattagcatttggacttcttagccaattaaatcagtatgttcagtttctgaagcagttcttcctgcttcgtcttttgctacctttgtcttttggagggaaagcaatggatgggatatgttaaaagaaacattaattacattggcagttttcatttatacattgttgacataattttactcttaatacacacttgtatttattttaacgtctgaagttgaatatcagtctatagctaatgctactttcatttatatttttaaatgttcttagttttaaaatttcaactgattgtcgaaagggtaatatgaaagattttaaatgaaaaaaatttgttggatgatgatttttgaaaaatagtcaccaactgtatatacttcctcaagaactgataattcattatatcatcagatagcttttattaagcatctgtgggaatatacagttgggtggaatgataatctggtttattttttctgtaaacttaagtttccgttgacttctgtacatctacaatgaatacctcctcatagaagtggtgtctttacataattttttgtgtaggtga

SEQ ID NO: 153657 - DNA, 550 bp, Homo sapiens
  Payload ID: 10219
  Gene Symbol: MGAT4C
  Gene Name: MGAT4 family, member C
  ENST ID: ENST00000552435
  CDS Start-End: 196-531
agtgccattatgatggatgtttacatctcttcattgagagccaattatctcgcttttgtgtgaggcccaaggatcactcatgcttccaggctgcacagagcactgttggatctagctgaacgaattgttttctctgtctctgggtatcaacggtttctgtacagcacagattatgacagcgtctttcttaagagaatgtttaaatttcatcaaatgaaacatatttttgaaatacttgataaaatgagatgcctgagaaaacgttctacagtgtcattcttgggagttcttgtcatttttctcctttttatgaacttgtacattgaagatagctatgttctggaaggagacaaacaacttataagggaaacatccacacatcaactgaattcagaacgctatgttcatactttcaaggatttatctaatttctcaggagccataaatgtcacctatcgctacctagctgccacacctttacaaagaaagccacatgggctattattcatcatacaaagggacggagaataagctgaaggatgatgatttt

SEQ ID NO: 153658 - DNA, 1423 bp, Homo sapiens
  Payload ID: 10219
  Gene Symbol: MGAT4C
  Gene Name: MGAT4 family, member C
  ENST ID: ENST00000547225
  CDS Start-End: 231-1423
gcccaaggatcactcatgcttccaggctgcacagagcactgttggatctagctgaacgaattgttttctctgtctctgggtatcaacggtttctgtacagcacagattatgacagcgtctttcttaagagacaagttctcactacgttgcccaggctggtgtcaagctccgggcctcaagcgatcctcccacctcagcctcccaaagcgctgaaattacagacgaagagaatgtttaaatttcatcaaatgaaacatatttttgaaatacttgataaaatgagatgcctgagaaaacgttctacagtgtcattcttgggagttcttgtcatttttctcctttttatgaacttgtacattgaagatagctatgttctggaaggagacaaacaacttataagggaaacatccacacatcaactgaattcagaacgctatgttcatactttcaaggatttatctaatttctcaggagccataaatgtcacctatcgctacctagctgccacacctttacaaagaaagcggtatcttacaattggactttcttcagtaaagcgaaaaaaaggaaactatttacttgagacaattaagtcaatttttgagcaatccagctatgaagagctgaaggaaatttcagtggtggttcacctagcagactttaattcttcctggcgtgatgccatggtccaggatattacacagaaatttgcgcaccatattattgcaggaagattaatggttatacatgctccagaggagtattacccaatcctagatggccttaaaagaaattacaatgatccagaagatagagtcaaatttcgttccaagcaaaatgtagattatgcttttctgcttaatttttgtgccaatacttcagactattatgtaatgcttgaagatgatgttcgatgttcaaaaaatttcttaactgccatcaagaaagtcattgcatccctagaaggaacttactgggtaactcttgaattctctaagcttggctacattggtaaactctatcattctcatgatctcccacgtttggcccattttttattaatgttttatcaagaaatgccttgtgattggctattgactcatttccgtggtctgttggctcagaaaaatgtgatccgttttaaaccatctctctttcagcacatgggctattattcatcatacaaagggacggagaataagctgaaggatgatgattttgaagaggagtcatttgacattcctgataacccccctgcaagtctgtacaccaacatgaatgtgtttgaaaattatgaagcaagcaaggcttacagtagtgttgatgagtacttttgggggaaaccaccttcaacaggagatgtttttgtgattgtatttgaaaatccaattataataaaaaaaattaaagtaaatactggaac

SEQ ID NO: 153659 - DNA, 3194 bp, Homo sapiens
  Payload ID: 10219
  Gene Symbol: MGAT4C
  Gene Name: MGAT4 family, member C
  Uniprot ID: Q9UBM8
  ENST ID: ENST00000620241
  CDS Start-End: 1206-2642
agctgaacgaattgttttctctgtctctgggtatcaacggtttctgtacagcacagattatgacagcgtctttcttaagattctgtggacctgactgacactagaaaagccgcagtagcatgtgacatggaagtttatattatcagggtgtgctcacctggttgcaaatttgagaccaaagttttactttaacacttggagctggtaaaggatgttttattcattgtgtttctgacagatggaacaagttaaggttaccttctcaatatgaggactaaagcttttagccaatatttgtggagaagacacatttaagattttcttttgcccatacatgcaatgttatggaggctgtgaccacattttaggcaagaaactgaaagaacatcaagcacctatctggatgtctccaaagcctcatctggataaaatatccaatctatttttcaatcagcctttttttttcctttttcaacctcagacaattgcttttggggtcctagagtcccttgaaagttatgatggaaataggagacctaaagttcaggtgactgaagggctgaagcaggaaggaaaaacgtctgggaggacaggtagacagaggaaagaggtctgaagaggcacatatcaaaagattcaagaaagctgaagggaagattgaaggtagtaaaaggatgaaggaggagcagaagcaatgggaaggaagagatctcagaggactcacttcgggaaaatcttcagtttcccaaagagatcctgaagtctcaaattatccttaacaaaaccatgaccacaagaaaggaagtggagtatacgatcagtgagagtttaagaagggggtttccgttgactaaaaagttaccgtgggagaaataggatcaaatagaacagagttgcctcacaaagaaccaaggaaaatatttcagctcagggattcaagaagtaaattcccactcaaagacagaaacaggaagtaagatttacaattcagccagtaccttcctaacagagaagcatgtgactataccaacttcttacaaaaagaaacaggactaactcagcctctgtatagtgtactcaggctctctcagccctcactgtgcttcaacagacttatcatttggagcactggctcaggagtcgaaatcaccaatggctcatccatcaatcaaccagaagtgaagacgaaagcttcaaagaagagaatgtttaaatttcatcaaatgaaacatatttttgaaatacttgataaaatgagatgcctgagaaaacgttctacagtgtcattcttgggagttcttgtcatttttctcctttttatgaacttgtacattgaagatagctatgttctggaaggagacaaacaacttataagggaaacatccacacatcaactgaattcagaacgctatgttcatactttcaaggatttatctaatttctcaggagccataaatgtcacctatcgctacctagctgccacacctttacaaagaaagcggtatcttacaattggactttcttcagtaaagcgaaaaaaaggaaactatttacttgagacaattaagtcaatttttgagcaatccagctatgaagagctgaaggaaatttcagtggtggttcacctagcagactttaattcttcctggcgtgatgccatggtccaggatattacacagaaatttgcgcaccatattattgcaggaagattaatggttatacatgctccagaggagtattacccaatcctagatggccttaaaagaaattacaatgatccagaagatagagtcaaatttcgttccaagcaaaatgtagattatgcttttctgcttaatttttgtgccaatacttcagactattatgtaatgcttgaagatgatgttcgatgttcaaaaaatttcttaactgccatcaagaaagtcattgcatccctagaaggaacttactgggtaactcttgaattctctaagcttggctacattggtaaactctatcattctcatgatctcccacgtttggcccattttttattaatgttttatcaagaaatgccttgtgattggctattgactcatttccgtggtctgttggctcagaaaaatgtgatccgttttaaaccatctctctttcagcacatgggctattattcatcatacaaagggacggagaataagctgaaggatgatgattttgaagaggagtcatttgacattcctgataacccccctgcaagtctgtacaccaacatgaatgtgtttgaaaattatgaagcaagcaaggcttacagtagtgttgatgagtacttttgggggaaaccaccttcaacaggagatgtttttgtgattgtatttgaaaatccaattataataaaaaaaattaaagtaaatactggaacagaagatcggcaaaatgatattttgcatcatggagccctagatgttggggaaaacgttatgcctagcaaacaaaggagacaatgttctacttacttaagactaggagaattcaaaaatggaaactttgaaatgtcaggtgtaaatcaaaaaattccatttgatatacattgtatgaggatatatgtcaccaaaacacaaaaggaatggctaattattaggagtattagcatttggacttcttagccaattaaatcagtatgttcagtttctgaagcagttcttcctgcttcgtcttttgctacctttgtcttttggagggaaagcaatggatgggatatgttaaaagaaacattaattacattggcagttttcatttatacattgttgacataattttactcttaatacacacttgtatttattttaacgtctgaagttgaatatcagtctatagctaatgctactttcatttatatttttaaatgttcttagttttaaaatttcaactgattgtcgaaagggtaatatgaaagattttaaatgaaaaaaatttgttggatgatgatttttgaaaaatagtcaccaactgtatatacttcctcaagaactgataattcattatatcatcagatagcttttattaagcatctgtgggaatatacagttgggtggaatgataatctggtttattttttctgtaaacttaagtttccgttgacttctgtacatctacaatgaatacctcctcatagaagtggtgtctttacataattttttgtgtaggtgacactatgg

SEQ ID NO: 153660 - DNA, 2582 bp, Homo sapiens
  Payload ID: 10219
  Gene Symbol: MGAT4C
  Gene Name: MGAT4 family, member C
  Uniprot ID: Q9UBM8
  ENST ID: ENST00000621808
  CDS Start-End: 602-2038
cacaggaacaccagattgccatccctggggaacagaatgcaacccgggatctagagagctgtcacattccaagaaatatttaaattgtgctgattttcttctggagaactgagcccagggaatgaaactctccatcaagtcatggctttgcgggcaatagatcagaggatattgccagttttctaatggattattgttatcgggcaggttttctctgaagcttctcagctgctgttacattctacttggatgggaactggagatcagccagatcacttgtatgcacaaagctgctgtggatctgtctttcaaacaagagctgcagaaaacgctatagcaaggttgaagctttatccactctgactcacccagaaagcacagccctgattctgcgtgagaaaggctatctctacagaaactaaaacggtatcaacggtttctgtacagcacagattatgacagcgtctttcttaagcagatggaatcttggaacgtctcatgcttgggaaggacatggtcagatttgttgtaagaaagactgtgcagaggagtgtggcaaagggatccagaagatgcaaggtattatttagaaaagaagagaatgtttaaatttcatcaaatgaaacatatttttgaaatacttgataaaatgagatgcctgagaaaacgttctacagtgtcattcttgggagttcttgtcatttttctcctttttatgaacttgtacattgaagatagctatgttctggaaggagacaaacaacttataagggaaacatccacacatcaactgaattcagaacgctatgttcatactttcaaggatttatctaatttctcaggagccataaatgtcacctatcgctacctagctgccacacctttacaaagaaagcggtatcttacaattggactttcttcagtaaagcgaaaaaaaggaaactatttacttgagacaattaagtcaatttttgagcaatccagctatgaagagctgaaggaaatttcagtggtggttcacctagcagactttaattcttcctggcgtgatgccatggtccaggatattacacagaaatttgcgcaccatattattgcaggaagattaatggttatacatgctccagaggagtattacccaatcctagatggccttaaaagaaattacaatgatccagaagatagagtcaaatttcgttccaagcaaaatgtagattatgcttttctgcttaatttttgtgccaatacttcagactattatgtaatgcttgaagatgatgttcgatgttcaaaaaatttcttaactgccatcaagaaagtcattgcatccctagaaggaacttactgggtaactcttgaattctctaagcttggctacattggtaaactctatcattctcatgatctcccacgtttggcccattttttattaatgttttatcaagaaatgccttgtgattggctattgactcatttccgtggtctgttggctcagaaaaatgtgatccgttttaaaccatctctctttcagcacatgggctattattcatcatacaaagggacggagaataagctgaaggatgatgattttgaagaggagtcatttgacattcctgataacccccctgcaagtctgtacaccaacatgaatgtgtttgaaaattatgaagcaagcaaggcttacagtagtgttgatgagtacttttgggggaaaccaccttcaacaggagatgtttttgtgattgtatttgaaaatccaattataataaaaaaaattaaagtaaatactggaacagaagatcggcaaaatgatattttgcatcatggagccctagatgttggggaaaacgttatgcctagcaaacaaaggagacaatgttctacttacttaagactaggagaattcaaaaatggaaactttgaaatgtcaggtgtaaatcaaaaaattccatttgatatacattgtatgaggatatatgtcaccaaaacacaaaaggaatggctaattattaggagtattagcatttggacttcttagccaattaaatcagtatgttcagtttctgaagcagttcttcctgcttcgtcttttgctacctttgtcttttggagggaaagcaatggatgggatatgttaaaagaaacattaattacattggcagttttcatttatacattgttgacataattttactcttaatacacacttgtatttattttaacgtctgaagttgaatatcagtctatagctaatgctactttcatttatatttttaaatgttcttagttttaaaatttcaactgattgtcgaaagggtaatatgaaagattttaaatgaaaaaaatttgttggatgatgatttttgaaaaatagtcaccaactgtatatacttcctcaagaactgataattcattatatcatcagatagcttttattaagcatctgtgggaatatacagttgggtggaatgataatctggtttattttttctgtaaacttaagtttccgttgacttctgtacatctacaatgaatacctcctcatagaagtggtgtctttacataattttttgtgtaggtga

SEQ ID NO: 153661 - DNA, 25116 bp, Homo sapiens
  Payload ID: 10219
  Gene Symbol: MGAT4C
  Gene Name: MGAT4 family, member C
  Uniprot ID: Q9UBM8
  ENST ID: ENST00000611864
  CDS Start-End: 57-1493
ggtatcaacggtttctgtacagcacagattatgacagcgtctttcttaagaagagaatgtttaaatttcatcaaatgaaacatatttttgaaatacttgataaaatgagatgcctgagaaaacgttctacagtgtcattcttgggagttcttgtcatttttctcctttttatgaacttgtacattgaagatagctatgttctggaaggagacaaacaacttataagggaaacatccacacatcaactgaattcagaacgctatgttcatactttcaaggatttatctaatttctcaggagccataaatgtcacctatcgctacctagctgccacacctttacaaagaaagcggtatcttacaattggactttcttcagtaaagcgaaaaaaaggaaactatttacttgagacaattaagtcaatttttgagcaatccagctatgaagagctgaaggaaatttcagtggtggttcacctagcagactttaattcttcctggcgtgatgccatggtccaggatattacacagaaatttgcgcaccatattattgcaggaagattaatggttatacatgctccagaggagtattacccaatcctagatggccttaaaagaaattacaatgatccagaagatagagtcaaatttcgttccaagcaaaatgtagattatgcttttctgcttaatttttgtgccaatacttcagactattatgtaatgcttgaagatgatgttcgatgttcaaaaaatttcttaactgccatcaagaaagtcattgcatccctagaaggaacttactgggtaactcttgaattctctaagcttggctacattggtaaactctatcattctcatgatctcccacgtttggcccattttttattaatgttttatcaagaaatgccttgtgattggctattgactcatttccgtggtctgttggctcagaaaaatgtgatccgttttaaaccatctctctttcagcacatgggctattattcatcatacaaagggacggagaataagctgaaggatgatgattttgaagaggagtcatttgacattcctgataacccccctgcaagtctgtacaccaacatgaatgtgtttgaaaattatgaagcaagcaaggcttacagtagtgttgatgagtacttttgggggaaaccaccttcaacaggagatgtttttgtgattgtatttgaaaatccaattataataaaaaaaattaaagtaaatactggaacagaagatcggcaaaatgatattttgcatcatggagccctagatgttggggaaaacgttatgcctagcaaacaaaggagacaatgttctacttacttaagactaggagaattcaaaaatggaaactttgaaatgtcaggtgtaaatcaaaaaattccatttgatatacattgtatgaggatatatgtcaccaaaacacaaaaggaatggctaattattaggagtattagcatttggacttcttagccaattaaatcagtatgttcagtttctgaagcagttcttcctgcttcgtcttttgctacctttgtcttttggagggaaagcaatggatgggatatgttaaaagaaacattaattacattggcagttttcatttatacattgttgacataattttactcttaatacacacttgtatttattttaacgtctgaagttgaatatcagtctatagctaatgctactttcatttatatttttaaatgttcttagttttaaaatttcaactgattgtcgaaagggtaatatgaaagattttaaatgaaaaaaatttgttggatgatgatttttgaaaaatagtcaccaactgtatatacttcctcaagaactgataattcattatatcatcagatagcttttattaagcatctgtgggaatatacagttgggtggaatgataatctggtttattttttctgtaaacttaagtttccgttgacttctgtacatctacaatgaatacctcctcatagaagtggtgtctttacataattttttgtgtaggtgacactatggaaaaagaaaaaaaagacttaaaaatatctctcccctgattatttatatgaaaggggatattgttcattgtttaaaaacatttaattgagcacctattgttgataaattttctgggggaagcagtctttttcaagtttcccttttgaaaaaaaaaaagaagagttaagctcaatattttcaggttacattgagtacccacatttaatagaataaattagggaaggcctatagtagttagctcattcgtacagacattttcagtatatgcagaaaatttttggaaattgattttatacattttgtattaaaatccatgtgattgaaattattgtgatttatcatatacctttttggaatttaaatgggtatattataaaggagaaaagtaagaaccatagaaattagttgacttttctagaatcaaagatctatttcctagcaaggccagaatgagagatctgatattctgataaccagacaatgctctttttctcgtatgatttctcctgacagatttatgctttgtgttctatttgctacatgcctgtcagataataagttataccatctggaaataggtggtacaattcctgcataaataatattatcctaaataatgtcctaaatgatgcttttttggtataagcacccaaatagtaagcaaacttgactaaacttttcctaatagggattggagagtgtgtctttacaatgtgtccgttaaagtaattcaggacaccttagtgtgtcctaaagacattggttttcagaatgtcctgagcttgtctcttcctttttgttttttaatgaacagcaaaaactaagggatttattataaagggaaatggaaggtgcttcatatatgtttaagaaactcaagtacgtgttcatatagatgactctgtgtgtgtgtgtgtgtgtgtgtgtgtgtgtgtgtgtgtgtgtgtgtgtgtgtgaaggctagacttttgctggtaagacagaatgaggaaatcttcctgctcttccttttcatactgaaacacaatccttaagatttactggtatgctgtggtgcaaacaacactaggatatttttattttattcgttctctgcaaataaatgagaaactcagataaaaaatggaaactttttatttcatttataaacagctgttgtgtattttctttgtattcagctactaaagtgttagaagaaaaacgaacctttcataagaggctaaatattaatattttgtgaggcacctaaatcttacagtcataggaaaatatgaacactgccactaaattattatctttaccttgatttagaggatacttgccagacacctaaaaatgttctattttctttatttttcttatcttttattaaccggctagttgatagtattgtgtgtatatctcagaagttacaaatggcattattttcttcactgtcaatgataaaaggtacacaattgtatgccaaagacatgtaatatcaagagctaggcagactccctgaaatgagttgtaaccccttacatattcttctgggaatggctttctaaagatcagctattggtgtctatcaatgtcttaaaaatgtttcaagaaacattgctgagggtagcagtgaagttggatgtttgctaggaaattatgaaaacaaatgtgactcagagaggtcatttcacattttatctttatatcctctctttactaaacctgtgtttggataagttggtcaatcatccaaggatcctctatgttttctttacagttgacactgggtcaattttctaaggaaaacaccttgacaaataaagcatcttcattagaggtcaggaggaaaaataactattctctttcaaaagaaaatctgaacaatttttttagcatggcccaatgttctatttcctatatttagaaactttgaataagggtctagtaatcttgtctcagaggcatagaaacaaaagtacagttattaggtttaactatactcaaactatttgctatttttaaacatttttgctgtaagtttatatatatatacatatataatacatatatacatatatataatatatatatacatatatatataattttctttgttaaaaataacaattgaaaaagactggcatgagacatgaatggctgagtcatttaattgccatacaaataaaatgctgacaggtttcaagcaaaaaatacagtatgcaccttaaataatgcctcagaattgtataatttaagctcactaaaaaccttacttagtcttaaaattctccttaggggagccttttcagcagttatggacatcaaagaaaaaagtatcttgtaaaagcacaatgaaatttagaaaatacacattttagtggcaatcacaaatgtcaatataaaagatacataaaatatgttaatgcaagaactttttcatattcattgaaaactataactttgtgctatttataaagtagatattttccaggtatgaaaatataatttggaaaccaacctgtcgtttagatctatttctttcatatagctacactatgagttgtgaacattccatttcttactgggccagtattctctgggaatttttataatgctatcatagaaaaactgttctgtataataattatataaaaaatgaaacaaacattttcaaattgtaatatatgatgtggtatggaaagtacctacatttttagatgctcaaatattggcatatttcatgtcagtatttgccaatttgtcaacaagtttatggcaaagaacatgataccaggattaacattgaaaacactacatccagtgccatctaacaattgaaggaaacagtgtgtaattctcttctttttccttgacaatacatccatcaacacagtaatggcatcatattactgagtaatagagctcacacttaaactttataatatttattatgggatctactgataaaatgatttaccgttttgtacaaattcaactgattttggggggtttcttgtaagatttaatattaattttaggataattttatcctgtttcttttgattcatgatcccaaactttctagatcttgcttctgtcattccacgtcttattatgcctcctcagctttgtgtttcaacaaattttatatgcatgccttttgtcttcatgggagacaaaacagaaggttcatacagacttgattttgacacccagttctgcattaccagcctcccaatatgaggaaatttacttaaccttcttgaaactcagtttctacatctgtgaataggaataattttacctcatatgtttttaaaggtagcaattttaccttgtagctccttgtagagctggaattgagataacataaactaggcacacaataaatatttgtttcctttttatccatgtcacgtatatgtaacaggatatgaccctggaaaacattaccagaggccttcattgtaatcaataacaattataaaatttactgccctttaaaaatgttattcagcctaccttttcatattttgtccagagaatatcatgtggaattatacagacactttcctaaaatcaatatatattcctgtcattctaatttattactctagaaaccttatcaaaaatatcaaaattgcccctagtgctctcatcacaaataataatattcatttctgttttaagaaatcttgatccatttacattgaaaaacaaagaaacataaagtcatttcctagtttctaagatgttgtttagaatctaccttaagctcagaaatgcagtcttcagaatctttttactttttttttttaatgtcaggatccggttctctggcatcttttctatcattggcaaaagttatcaatgcactgacctataaattaccttggcactgatgtttgaaataggtatcttatctgctagtctactttgagtttcattgttgagttttccattactttgaatttctttgttcagattggggttattctttttaggaagaaaaaggccataacaaaattcaatgtgattagttattgccatttattttttgtttgcttttaaactttttttttatttatcccaaacagaggatatatcttttattactttttggcatgctttgaaatgatttcattattgcatatgtgcatgtgtgtatctacatatggttaatctctcaatctgtgtgtatgtatatatacatatgtgtatgtacatatgtgtatatatgtatacatacttgaatattatgtgaatatgtgtgtatatttgtgtatatatatacatatatacatgtatgtatttgtatatgtgttgtgtaagtgtgtctgtgtgtatgagagaaagacagaaggatatgcaccatttgcattattttttagcctttacacctccacttattcttggattttcctgacacactgtcctcctggttgtgttcctcttctgaacttgcttttgctttcatgttctcactcaaatcttttatacatgacatcctttgaaaatcacagcacattagagatctttgtgcatccttttagatactttaaatttattaaaagtgtactagaggaggccatctctctcaaaacagaatttttcttttagagtttcaggtttatggtttttatttgaattctttaacattaaaagatcaaaatatgagttgcatagcattctctttctaagctataaaaatattaagataacaaggttgcactttcccaaagttctagtcccttccacctcattaatctgttcatcacatttactccaagtccagggtagaatttgcttcaataatcccaatattttctgagatgtttaatatcctatttttaacattgaaattgaaatgtatgtttgagaccatttgccagataactggatctgaatatcttttctgaaaaacatggatttgagaccaaagcagtttttgatttgactgttgtttcagctttcatttcactctgtctagacggtctcttagaagatttaccaaaaagttaaattgattatgtgagaaagtgataggtaaattgtatatgaccatagaagtacaattaaattaagaatatagcatgatcaaattttcacattatattggattaaaaagtaccctaagtagccatctccttaaagtaggtgagccaaagacataataataaaatattcaatatttttctataaaatacaaatttccatgaggcacacatacattaaatttaatataaagagaatcattactttatttaagagttgtttaaaggtgcacaacaacagtgagttaccaatattcagaaccttagtctataatttcaatgtactgtaagttactacagctttaaccacaatagctggcataacctaaatcattctgcccaaatacaggtaattatagttttgatgtataaaaattaccaaaataaatgcatatataaagcaatagaggctgagagtgttcataattgaaagctaactattgcaaaaatattttaaatatttaatttatagtgcactcgaagttctggaagagacgtaggatttgtctcttccaccctttccctcactttaccgtttattatgaaggtaccaaaagtatggcacagagatatgtggcagttccacatatctcaatcaacaaagctctaactctattagaaactagacatttaaaaagtactttttttgtaacttcatctgagtcaggtttctcattgaataataatctgtcagttttgtctatagtatgttccaattggaaaatgtttaaggtagtacatgcctcttttctccataaaataccccacatttgtttaactatttgacatagtcctattttttccatctttaataattgataaaattttccctacttttaaacatatgtatgtattttctgccacacttaaactttgttattccacgttgtaacttacttcatcaatgagtgaaagtatagttccaaaaagttagaataattatctcagatcctttatcataattgtccaattatctcagatcctttatcataattgtccatcctttaatgtaatccggttttcaatacaagtaacacttgcattcttacaactgtgcatttttggtcactaaaggaccatgtgacgatatcagtagttgtcaggagttattcactacccttagaaaataaactcggtaatgtaaactatatcccacactttaacaattaatactgttgaatgacattgaaggattgtatctttttttaataaagaagcaatatattaaaaataattaaaactcctaaagtctttttttttgttttagaaatcagtctcaattttcaaaagggcatttgatatctgctaataaaatgaacaaatagtttttctttaaatgaaaatatctataagcttagctgtgtgtagaagtacataataaataagttgtccattttgaataaaaattaaaatcctattaatgcagttgtaacttctcttcttaacatttcttaagctctaaaacaaacataattagacacattttctgttgcatgtggcatctttacccaccataatttggtaatcagtcatatcaaaatcacttacaagaaccaactatttttggaaaaacatttagaaaatttgtcacaaattgtcaagaagattttcaagacatatatatgaattgtctgtaatgtaatggttggggatattttcattaaatccataaaccaatgtatgtatgctgccctctaactttctgctgagttactgtagtcaatggtaaatatagtcaaagtagaaaagacacattcaccctgaatattcccaacaacctatctctcattcaattctgactattgacaaagtactcctttcaattattgtggtaaggaggcctttctgagcatccagatgtgtaaaaataacaacaggggaaatgttacaaacatgaggtaaaaggatgcagaggaaaagttgtacttcatgattttgcctcaagcaagttcttctttcctgtcagcattgcaaattaccatagctcgacttgcttgtattcaagcaaatcaaaacttgactccctgagagggtcaaaagacaattttggtacgtatctagtgtttttacttactagaacaaacaggtcaagtttattcttaatgaagttaaaatttcaaattaaacctgaagctctagtgttttccattttactaagtggataaacacttttctgccatgggatgaactacaatgagatgtttgaattgatttgggcaattgatttgggcaatgatgagtcatgtgtttgctacaaaagtgatacaaaatataagtgtccttcaagttaaagcaatctaaaccgatcatctttgaaaagttaacaacatattttgtaatatttgtttcctagcaaatttttcagttgtccaaaccaaggtaatgtagataaagctacatattttcactcagcgtaccaccaaataactgggtgcccaatagtgttgatctgatgcactactaaaattagttaccataaaaattattttcttttataagaagaaagtgaaatttgtttaattattttgatatcttttatccttatgaatatatatatcaatgttaattttttatgaataattaaatttattataaatgcactaatttttcaacattcttctgattttcatcagtaaattgaataaccattgttgcaatgaaatttacatattgctctcataatatgaaattttacaaggtataatttcacttaacacaaacaatagtcctcataccactttttcattttaactttaatctcattatttatgtgattaagtttgcaattttagccactcatgtgttaggagcaatagagattgacattatgtaggtaggaaaatacatttttagtaacttaagaaacaagttgtacatactatatcaacatttcacattagtgaatttattatcttgctgtataaactttaataaaaacaattatttttatttaaattatttaaggttcctctatttgacttcaaagcaaaataatatctgaattgtacaagcactgtgaatttgtaatagtctaatcacagtctaatcactaaattcaattagtactttactaaatttcttacagtatgctcaggacaaataatttattgaaatgagtatactcaggatggagttattttcatgcaaacttaaaaattacaagacatgtttagaagaattatagctggataacactaaacattcacaagttttaagttagcataaggggatttataagtaatgtgcctacgttcataatcaatttaacagttttcactaacttgacccaataatttagggtgtatttccagaccacaagataaaactaaattttgtccatttttaccagatgattcaaaatttaccatttgattcatttcttaataaaactgcctgtcaatctactagactaaataagaatataaataattcaatattatttatataaacaaaatcaatggaaaatgacaattttatctaatttaatcaatgcctgtgacttagcaaagatattcagttcaatttaacaatctttatgaattaatatttccttaggaattatgtagctaaattatattaataatccatatttattgaagggtaaaggccacagagtgagactaaattatctaggtccagagaaaaggcatctagggcaataaggaaacgaaacaaatataacaaataacttctaatttacagatcacttaatgtaagctcagccaagaacaatgcttactacataaatatgttccaagcaactatgagacactgtgtgaagatttcatgtgcatttcactgtctatttaatagattaaacaaccatataaggtaagaggtattaaaaaagctaaagagcatatgaaaaatagggttttactaacttgtccaaggtcacataactaataaatgaaagagagagcattggatttcaggtttgtgtaattcaaaatctatgccccttatcactattatacattgcctcctaactataataataatttattgaaaacccatttgtctaagatgggattttctggatgatatgactatattaaaataacattaaatagttgaaaaatgaatttaaataattagtttcttcatgtaaaacatttttttctcattttttaaacttgaacatctaaaacacttgcttctgtaattccactgaaccacaacctaatttctgttattccaaaaagaaaataaaaactcatgggctctgggtacactaaaagactccaaaaattataactttgtattaatcatataatagtctttcataacaccagccccaaacataccaaactggtagttagacagtatgtatgcaacattttttgtgtgattaactatgtttctaaatttcagctattatttcggatgttggaaaacatcagtaaaccccaaagttgtgtttattggcctatagcttacatgaactgagtgtttaatatgtatttggtactctcctaatcggtacttccattacctatgaaagtaatgattataacaagtcatcatgcaaaagaatcatcttttcaatatattgaaaatgtgtgtttcagactactgaattcttccctgtaaatctaggatagatctaggaattggcactttcaatgtattttagttaacactgatgcagattgtccattcactccttttagaaacactacattacatccttacaagtctatgaagtattaaaacagaaatgactattattattgctacttcagtgatgaagaatctcaaagtttgagttaagtgatgtatcaaaactctgaccttgttagtgaaatattaagcccagttcatctcaacattattaacctctgctcacacttgtctaaattactagtttttaagtctggctgttcattaacatctctggggaagaatttcacccattcctgagctccatgctcagagttatcataattgttctggagtttccaggcatcagcatacttttaaaattcttcctaagtgatcctaatgtgcagacagatttgacaaccacggagcaactaagactgtaccacagtaaaattccaaaacttcccatttatccagtttgaaagattatagattagaaaacatgatgacaagcgtagattattctgtgttgtttcctgccctttttaggtatttcaatactattattgttgtactgaaaaataaaagttccagtcaatttttatggttttgctgggtttatagagaacactctgcatgccttcctattgaatctgggactctcgtttttggagaactacgtaagtgatctgttttcctgagtcttgacatatgcaccttattaattagagactataaatccactttttaacacataaaatctaatgatgacatctttgtagatattgaaattcaagaatataaacagcattgccttcaacccactgctgtttgtaaactgagctgccttcctctttccacaaaattaactaaacatattcaagaaagaaggagaaaaactatcagttttccacagtggactttttttcataaatccttcaaatgtcagcatgtatgccttgtctcatttagtcatagcccatatgatccaaatctccaatttatttgtttttctttttccaagaactgggtactttaaaaatttgtcaaatttttaaatttcagatagctgaaacagaacaagtcatattgacttgctctaagtgtttaaaaggtttgaggttattgatataggcctcaatatatttccacaaatgaaataatgtatttacatagagatctaaaaagtgtacgaaacttgagatagctatttgagtcaagaaaaacaaggactgtgaatagtgtaaattatgtaaatatacacagataattcacacacacatattcacacatagttccaaggattcccctatatcaattccaactcaaaatttctcagtcatttctggctaaagagaaacatgtccatttaattaaaatcacttttaaaaaatctgatcatctattctttatgagatcaatgaatacattattttaatgctctgtcttatttaaaatatttttctacatagtgttgctagctaaaatgaggcttttttaaataaatggatacacctcaaaataataatttgagatcagtttcatcttggacttatatgattttcagattttatctgcataaaattagattttctggaaaactaatttgtattacttattttctctgtataaaccttgctgaaaatgaaaactaataagcttgaatttatgggttttatgtattttaaaacgtaatgtatagagatttcttataattatttgacagcttcaagataaccagttttttctttaaacattccactgattaatacaaaaagtaacatttttttcatgagatgaaatgaaacttgttcttaggcaaacatcacttaattaaagcaatttatagtgaatacactcaattaactgattatgaacctgcaacaccaaaagatttaccagatttgttcacaattttactgctagctgatatcaaataagaaaaagacaaatcaatgttatatcttcaggaactaataacttttttcatcctgcaagtttgtgaattcaaaaaaactattttcaaataactaagaatttttttattattatactttaagttttagggtacatgtgcacaacttgcaggtttgttacatatgtatacctgtgccatgttggtgtgctgcacccattaactcgtcatttaacattaggtatatctcctaatgctatccctcccccctcccctgaccccacaacaggcccagtgtgtgatgttccccttcctgtgtctatgtgttctcaatgttcagttcccacctatgagaacatgcagtgtttggtttttttgtcgttgcaatagtttgctgagaatgatggtttccagcttcatccatgtccctacaaaggacatgaactcatcattttttatggctgcatagtattccatggtgtatatgtgccacattttcttaatccagtctatcattgttggacatttggattggttccaagtctttgctattgtgaatagtgccgcaataaacatacgtgtgcatgtgtctttatagaagcatgatttataatcctttgggtatatacccagtaatgggatggctgggtcaaatggtatttctaaaagaactaagaatttttaaaaagattttggttatgtaattagagtgcacaatagaataaaacagccaggttttatattttcactggcaaatgataaagagacaactttgattaaatactcataatttttataaaacctccaaagtttcaaagtaggtagatgatgggtaataattaaatagagtgacagtgttatatgccaggttaaaaaaaaaagagacatgcggcttcatccacaagcttagcaaaatatgagaaagtaagaaactgtggccaaatcagataaacataaatgagaataagttgtagaaactgaccttcaagttaataattaaatcagatggtatcattttcctccatctggttattattgtttagatttttaatagtacaaaaataaatgttttatgaattattttggatgcaattacagtaaataaccataatataaaatgtctcataataggaaaataatgcctgacacttttaattacttaacatacctttttatacattttttaatgtcatttatttggcagctatttaaggagtgccctctgtatcctgggccatctctttctatccagagtcctacaagtcaccttgtatcattattaggatatagtataaaaatttgtccacttttaaatggagaaataatacagataagtaaaaaaatgatgtaataatttgagttctgtacatgactcagagacttggacagaattgacaattctaagtttttaagttaaaccaaagctgaaatttctaatcatttagaagctaggaaaagttctgtttcaaattcaattgatcacttcatgaacagtttgttcataattacttcttctctgcctttcagcgtagtcttgttcaattgttcagagtgtccttttttttttttttttttttttttgagacagagtctcactcttttgcccaggccggactgcagtggcactatctccgctcactgcaagttccacctcctggggtcacgccattctcctgcctcagcctcccgagtagctgggagtacaggcgcccgccaccacgcccggctaattttttgtatttttagtagagacggggtttcaccttgttagccaggatgctctcgatctcctgacctcgtgatcctcccgcctcggcctcacaaagtgctgggattacatgcgtgagccaccgcgccgggcccagagtgtccttattcccaagttcgtgattttcataatagtaagagaacaaaaaacaaatcttacaagcaataaattttataaatagtcttctcttaagatgcagaacaccaacatggcacatgtatacatatgtaacaaacctgcacgttatgcacatgtaccctaaaacttaaagtataataaaaataaacaaataaataaatattcaacacctcactctaattggaaaggaaatgtgcctacagaagttaaagcacattctatgagttttaatcttaggtgccaagaaggatccatgacctccacatttgacagagaatagaaagactccacggttttcatcataatccaagggaggtcagtaatagtttatttgcatttctcgagggctctctggggcctcactatcttacataaaagtgagtttaatcataggactttcagacattagcccacagatgggacatatattttgggatggagaacttttaataaatcacattacctaggtggcctctcattctacttctccatatggcagactctgtaggaaaaaaaaatgcttcctataatgtttcttctttaccacagaactgtcagaggaaacagccgagaaaaacttaaaactaagctacaatatttggcaaaaataatggtagttttcagaggagaagcaatttttctggcgtatatgtaggataagagtatcttaccttccttaaataatgttatctttaccagtaaacatgatgtatttgccttaacctagtcaatttcctttacctgaattcccttaagtttaaaatcataatttttcaagataaggttctagtcttaggaatgttgcttaagaacctgaaatagaatgatactattatttcatcctggtattaaaatctctaaaattttctacaaaactaacattctatgtgttctgtggccaatgtgataataaatccttgcataacaacagagaaaaatatcctatacatttgtcttacatttttgcaaaataaagaaaatattttggaattaaactaatttcaaaatccaagaatttctatgaaagaattttttagcagtaaccacagatgaaaagaatatcatttagtatctcttcatagtgtctttataacataatctaatcattggtgttttataatctttcataatttttcatatatttgataaatcctgatgttgggtttatttctgttgaaacaccagtaattgttttatgtcactttgacttttttctatagttttgttttctgcttgtttatctaaattatcatcatagttgtaatctgagaactaggcaaacataggtacttttgactatcactttggggtgatactatttacccaatatgattttttcccattttactcttgaagtatcctgttgcttactcttttgtgtatgcatacatttgaaacatatgacctcccaagcattctactttctcttattttacttattgtgttggctttactgtttatgtatgatttaacataaataattattttgttttctctctcccatcacccaccccatttacacgttacaacaagacttcatcagccctggggtcatgatttgaattatattatctgtgccattaaacaaccttgagcctcaataatatctgttcagattttttcaatggctattgttcattgataattacattctggggacatgccagaatgaaatctcatggtttctcagccacaaagatttgttaagaatcaaattcaaaggtatttgacttggtatttatgattcatggcaaacccaagcataatctttagcagatctttaagcttcctgagcttataagcaaactctgtgtgtgtctgtgtgtatgtgtgtgtgttcctatgtgggtaaatttttcttgatagcatctctgtgctttcatcattatcaaaaagtttcaggaccccaaaatggttaagaaacactgactatgtgctagttacatttcaagaatatatttctacataaaaatgttgtatttattctaaaggcaaaagccatggaacaatgtgtacttttaaaatatttatgaggaattaaaaattcaattattataatttttccattttaaaattttaggatgtgattttgtaatagcctccaaaaaacatttaaagcacccaagtaattaaactagtaaaagttccttataaaccagaaagcaaaactattttccaaatgggcaataaaaatattacttttgcatgtaaatagttgtttaagtgaatttattgtttatattaattaaattcttttggacaatttgccacttaaaaagatcagtgtttgaactctaggaaatacttgtttatgtaattttttttgcaagtaggtaagaaaagtatatttcattatcaaatagctaccctgcaatactaacataaacagctatttacccatttagacttaactattcagtcaattacacaacagtcttaccatgttatttaatgagtggaacaaaaataaaggtctttataacagataaaatatttcatttatataatgaaataaaatatcttgggattaataaaaataatgatttttttcatcctatgtaaaatgtagttgatagcactgatatattaataatgttatgggtgaagtttacagttcattacaagttgaatgtacttaaacaatctacatccttcactccttcattcaatcatttaattcagccattccttatttgacaaatgtgatttgtcaaatcacattactaaatgtattatacatttagtaataaccatacatatcatgttgaattgttgtgaggataaaaaagtaaacaatgttcaattattgttaatattttattttataattaattataaaattttatataattatataattatataattaattatataattttacttcattggatgttgtaaattgctctggtttagcctttagacatttgaatcaaaatggtcaaattagtctctaaattcagacattgactttgttctgcagatctcaaaacgaaagatatgttgggatatttagaccagaatgcatgtgaaaatactacatgaatgaatgtatttgacactgatcttgagatgacaatctacagtcctacaataattattctaactccatgttctctttcgtgcacactagctagagcacatctcacccactgacattggaatctatcctttcgtaagttatttttaacgtcttaggatgacttttataaattgaagatttaagagtttctaaggggactgtaggtatattctactgttgtgtttaccacatgttccattcagatacacaaaagaaatgaataaaactggacatagcacacagtctcactgctttgatgggcaatgatttttgacaatgggtaattaactcttacatcattaagttccatcgtcacagaataaccttagaatcctaataaaatcccacggcttcaaattgtatttaatagctgccaatccaagcctcctgactatgctaatctattatttagaataaatgaaaagtgtgtatcaatttgcctattataatacaaagtgggaactctcatgccaacaaggttaggccagaaaaattcaaataaattggagatgtgttttgatacattttcttccgttgctcttattgtatctgacatggaaatttccttagggtgaagtttatatagtgacaagcatatacaatattcttgaggtattaggccacagtcagaaaaagagaatataggaggaattatgtggtagaggatgataaaagattagaagttgaaactataccatatataattttatatatatacataattatcttgattataacctaaattgtaaaatctcaatattattagtaccatccccagacacattccctttgtttcttaaatttttactctccaaaaatgggaatcacagaaacagaagatgcttaaatgttcatgttaggcatttttttctgagctcataaaagattatttgatcatttaatgtgtttttctctccaataagactgtaaaaagttcagtgtttcgaggctgctaaacaatgcccatagagttgacagtctcaagaatgactggaaaatgatggagttggatgctataggtcatactttataaatctgactgaaggagaattagaatactaatgagagtcaacaacaattttcttacctgctcccaatttgtaattcttgccctggtggcacatatattacaaggagaatattgttttcaaatttatagtcagaaagtcatttaggtgactgactttgttttttaaatagtaagttgactgtcttgtttaaaaatgcatagtgccctggaaagttatgtgaatacaatgatttattttaagtaaagggtagttttataaaataaagtgccaaacatcatataaataaatatttacaggctcagtatcaatcaaatcagtggtaagagtgaattttttcaatgtatgactttcatatcaaatttttttttggtgattcagcttaataggagtttatggtatgggcccattcacgttatatccaaataaacaaaaattatctagagttgttcatgccatcatttccttcagcacagtcttcaaagtagttttctcattacccactttgaaagatatttccaaggagaggataatgcaacccattctatatgtgaataatgggtgggacacaggccaataatcatgatccaaattagtctgaaaatcaaaggagtaaggggagaaaaaaagaatgaaggattaattgatttgctgagagcatgtcacatgctaattgttgttttacatttttcatctatgtctctcatgtgattcagaccacaaatctgtgtgataagtattgttatccttattctaccaatgacgacacagtagtgaagtcataattcagacttgaaattctgtcttctctcaattttcatcccaaaattagatatcctcgatgccagttcggattctcttattcaatgagaaaatcacttccttttcggcccttgtcatctttgtctgtataacaaggggataagacaaagacgtttgatgaaaatttcttcaagttgtatcatgtttttattcttagtgggtagtcctttgtaagtctgcatacggctggctggtgacacaatgtgggcaccatagaccgaaaaataaaattactgaaaaggcgaagtatactttccaaaaattagactctaatcaatgtagtccgtgcaacaattttctttaataccgaattgcattttatatagctatttgcacagatcttcacaataaaaccataagaaaaggagaataggatattatcttcacagttctacagaggagtaaaaaaactgaccttgatctaaataagtttagaggtggattttaatcctttaataagcaaaagacatataataaaattgataaatgacaatatcaatactttatctaaaagtaatttcataaagaaacaaagccaaaattgattcagttaacataaaaaagagttaacccagaagaaaacaatgaatattgatctcgatttcagcaagcagaaaataaaaaaaaaaaaaaagcagaaaaaagtgagaaattgttaaggtgagtgaaagatgagcggcggttgctctgagaaactacaacacaacttatttattcaagtggctgggtcagatttaaagatgtgatttcaataacttttttgaatagagtgttgtacctttgtctaaagtagtaaaattcatttgaattaaagctgaatatgggttttcctcctcaaatccaattcaattccaaggtttgaaattgcaggggctcctgagaagaaatggcaaaaataaaaaagagaaagagagagaaaggggaagagaaaaggaaaaaagaaaaatctataacttgaagccctgtaaagcaaagatttaccaaactttagattttataccccctcttttttcagcatatccaaataaatttacatgatcttatgagtgtaaatcttctagtcttcatgagatttttccagcttttctgccttttagattgacatttctagttgcttaaggtttcttcttcaaagcaatgggtataaaacatgtgattattattaaacagttatggaaaataccatctttattccaccactttatcaggtagaacttgaaggtaaaataaagtttggatgctgagtctacatgtattgtattgtattgtattgtattgtattgtattgtattgtattgtattgtattgtattgtatagtggttaccagagatttaataacatagcagaagtaactgaatcgcctcctctgccctatgcacttgtattttttttatttcaaaaatgccaggaagataagtgtatgcaaaaatataaagtttgtaaaattttatacaacttaatctatttgatcattagttaagtaagcttaactaaattaaaaatgtattttattgctactttttttaactctctaaagaatacatttatgtttttgaaggagctttaatttagtaacagttaatctttttattaattttagtaaaaataatcatacccttttaataataaaaattaaactttaagtctttaaaattgctagttgtaagtgaatttgtcaaagattaattcatagttgccaacacttactgaacaggtagataaaattaactttgtttatttaacaaataacttggtgctttctagttagtttaaaaatatcaataattgtttcctcacatgtatttatgtccttccttcacagcatatagtcaaccatagagactcaatgtaaagtattatgataatttatatgtctgagaaaataagaagattgattcattgaaaagttaaatgaatttgagatacaggtatttctgactgcctagttacactgtatgaaatactttaaaaactggccaggcgtggtggctcatgcctgtaatcccggtactttgagaggccaagaactcctgaaatcaggagctcaagaccagcctgaccaacaaggtgaaactccatctctactaaaaatacaaaacattatctgagtgtggtagagcacgcctgtggtcctagctactcaggcggccgaggcaggataatcacttgaatctgggagtcggaggttttggtaagcagagattatgccactgcactccagcctggacaacagagcaagactctgtctcaaaacaaaaacaagcaaacaaacacacacacacacacacacacacacacacaaaaacacttagaaaaactgtaaacaattcagtcttgtatttggaagaatggtgacttgtaaattttgctgtacattaatgacaagtctctcactcaaataaagataacctaagtaaaataatttatgtcagatgaaaacattccaaattttcttggagaaaaagcaacaaaagccaataaataaaggtggttcccattacctatttaattatttaatatcttaaactattattaaatgcatgcaccacctgcactaccctgaccgattaaccccttagctgaaggagttcagtttgtatttttaccatatgatctgtctagattcactcttttcaggattgatagattttttttttcttttttcttttttttttttttttgctttcttattcaactctacagtaaaagaaaatctgtggttttatttgacataacagagctatcttcagccatagctagaaggaggatagtaggataaaggtcaatttttgtcttccttcacagctaacagatatatgtagcatgcttaataataactctcaaagtctgttgctcaacctcccaaaccattaatttccttctagccactgctagagttcatgcatgtcatgaaaggaaggctagagggacaatttctgtatgcatatctctggcccatgcccttcaatgagacccaaatataattaatttctgggatttttgcaataaataatatgagatgacctcattatagaatgaggggcaagatccttggccttggtctttcacaaataatatgactttatttacagatgaagaaaataaaataaaaattaaacataaactttcctcaacttcctgcttttagcccaggtagcatgttattactatttcttttataaacaactgagttctgactaacagtctttaagaggagctgctatgaggaaatatagataataacaaaataataacatatttttaaagctttgccagcagcaaagggctcgcatctacatactctcattttatgtgtccaaccaatggttccacatagccatgaaatcagctgttacaataggaagaccaccactgaacagttttgtaactcatttcagaattgactttggtatgtgcttattggtgtatttctgtgcttgtgtcaattcaacaaagcttcccaagcaaggttacttcaaacattacttgggccacggtaaaagaaaaataaaattctgttgattcagagtcaccttcaatctcatgtcataaattatgtttctctagtctttgatattgtttcacatgtgcatgattagattggttgaggatagactttgggctcatgatttattgactaattatgtggttttcccactgtagcttgggttaaatcttacaagacaggctgaaaactgaaattgttatgacatttttgttttctctacaccataccaagtaatgctgtttgattgaatcaaatattttctaaagactaaatgtaatccaaaaaatgatctgtaaatgttcccaacaggtgtcccaaaaccatattttagtaagtttttcaattggtccaacagttctataaattttaccttgaggtaactaaaatggaaacataatgaatatattatctctattgtctaaggacaaacaaaacaccgaagttattgagaatcagattcccatgttagcataaatgagtcacctagttttttcaacaaaaccaagtaataaataaatcaacactttcagttttctgccagtgtcacagatggcagccaattggtttgattaaaaatctgatgcttgcatgtttgcatagtaaaagacagggttttcaggaaaaaatcattatacttctcactgtgttccacacaatgttgaaggttatgtccaaatttgaaaaacaaatccaattaaactagctaccatacaaatatatcttttgttattgaaagagtgatttcagtcgtgatttttcattaatctagttttgtaaaaatcagacttcctgtaaaccaattgaaaacctctacattttactatatgtattcatggacttaatttcatcaaaaataccaatattctctgtgccctaacaagtgtaattgcactaaccttgtagttgatatttactgattgaaatgtatatacacaaaaattatgtaaaactgattatctagaggtttcttcattagctagcacaaatagttattgtaaacctttgtcctgtatttttttaaagtctgcaacatggtgaaccagtatgcttgatggctttaatacctgtgtctgcaatttattattcatttgaagcaacaaattcagaattgtttgaaattatgaaggctaaacagcataaatacattgtggtttcttttataaat

SEQ ID NO: 153662 - DNA, 1125 bp, Homo sapiens
  Payload ID: 10220
  Gene Symbol: MGAT4D
  Gene Name: MGAT4 family, member D
  Uniprot ID: A6NG13
  ENST ID: ENST00000511113
  CDS Start-End: 1-1125
atgaggaccaagcaggtgaacttgctgatcaccctggtcgccgtcgcgttgttcagcttctcttgcttctccatctacaggataactcaaaccaataatcaattaattaactgtagaaaccatattttggagtttaaagaaaatatgctacacttaagaaacaaaactgaaaaaaatacccaagagatgatgaaagttttgaatcgaatgaagtatgaaattacaaagagagaaattttgtcaggaaacttagttgcacagaaagcagacatattaaataaaaatgaaacagtatctaatacatttgaagacttaaagttcttttttcctcatctaaggaaagaaggtagaatttatcctgatgtaatcattggcaaagggaaaactggtgtttcttttgcgctgggtatttccactgttaacagaggaaattatagttacctgaaacagacactgacctctgttgtctccaggatgacgctctcccaagagaaggattctgtagtgattgtcttggttgcagatagtaatgaagattatttacattctgttgttaaaatgattacaaaaaaattcaaaaggcaagtgaggtctggatccttagaggtcatttcaatacctgcctttttatactcaagcatgttaaatgccaagcacttagctgaggcctcacaaaaattagccagttggcgaatcaaacaggtattggatttttgcattttgttgctgtatgcccaacccaaggccaagtattatttacagctagaagatgatatcatagctaaagagatgtactttacaaaaataacagattttgtaggtaatatcagttcaaataattggttttttattgagttttcaatgcttggattcataggaaagctgtttagatctgaggacttaactcactttgtacggttttttttaatgttctacaaagagaaacccatagactggctcttgaatgacatttttcaggtaaaggtgtgtgacgcaggagaagatcttagaaactgtatgaaacgaaagaagcaaatacgtattcagtataaaccttctcttttccagcatgtgggtatacattcatcattccctagaaaagaacaatatgaaaaaaaaatatga

SEQ ID NO: 153663 - DNA, 492 bp, Homo sapiens
  Payload ID: 10220
  Gene Symbol: MGAT4D
  Gene Name: MGAT4 family, member D
  ENST ID: ENST00000513018
  CDS Start-End: 1-274
taatatcagttcaaataattggttttttattgagttttcaatgcttggattcataggaaagctgtttagatctgaggacttaactcactttgtacggttttttttaatgttctacaaagagaaacccatagactggctcttgaatgacatttttcagagaaactgtatgaaacgaaagaagcaaatacgtattcagtataaaccttctcttttccagcatgtgggtatacattcatcattccctagaaaagaacaatatgaaaaaaaaatatgaagataaataagaagaaactctgtaatacctggaacctcagataaccttgatatctaatggcatgtttcagaaattgtagtaatgaaaatacataattatctagcagataagtaaacaatgcataaactagtagacttgaaagtactaaatgacttcttatgtcaagacaaggtagaacatttatattgcttttaccctattacaatttaatttaaaaa

SEQ ID NO: 153664 - DNA, 1806 bp, Homo sapiens
  Payload ID: 10220
  Gene Symbol: MGAT4D
  Gene Name: MGAT4 family, member D
  ENST ID: ENST00000515354
  CDS Start-End: 132-632
aggcggcttcccagggcgggtgtgctggggacccacgcggcaccgcggggagggggctctgcgcgctcaaccccgtccctggcattatccgccgcctccacccgccggcctcccgcagcctggccagggccatgaggaccaagcaggtgaacttgctgatcaccctggtcgccgtcgcgttgttcagcttctcttgcttctccatctacaggataactcaaaccaataatcaattaattaactgtagaaaccatattttggagtttaaagaaaatatgctacacttaagaaacaaaactgaaaaaaatacccaagagatgatgaaagttttgaatcgaatgaagtatgaaattacaaagagagaaattttgtcaggaaacttaggaaagctgtttagatctgaggacttaactcactttgtacggttttttttaatgttctacaaagagaaacccatagactggctcttgaatgacatttttcaggtaaaggtgtgtgacgcaggagaagatcttagaaactgtatgaaacgaaagaagcaaatacgtattcagtataaaccttctcttttccagcatgtgggtatacattcatcattccctagaaaagaacaatatgaaaaaaaaatatgaagataaataagaagaaactctgtaatacctggaacctcagataaccttgatatctaatggcatgtttcagaaattgtagtaatgaaaatacataattatctagcagataagtaaacaatgcataaactagtagacttgaaagtactaaatgacttcttatgtcaagacaaggtagaacatttatattgcttttaccctattacaatttaatttaaaaatactaaaggcaaggaagttttttttaaattaagaactgcactttattgacttcgatagtgagaccatcacataatctcaataaacagttaaaagttcgaaagcttgctattgtcagggagaagtttggggtgaattggtatatgccgttatccattttgttaagacacctaaagaaatagaaagcacaaatttaaacaagcctggatctgacagtgccacaatgtcttcttgtctattaatagatgcatttaaaactataaacttatccctatgtgccatttgaaccgattatcaaacatcttgatatatatgtattcttatagtcatttagttctaaagatttcatagtttctctcatcattgccttcttaacacacagattatttgggagtttttttcccaaatatattggttttctccatcttttattgttaatttctaaattacttgcatagtggttatagaactttacctgtgtgataaaattttgagaattgttgtgaatccttgtgttccatatgactttggaaagaatgtatagtttctgtatactcccttttaaatatgttatattcatttgtttttaaaagtgttggttttgtgctttaaaaatatctcttaaaagtattcctatctattgggtgcaaaattctcttatatcaggctttctaatttggttgttgaaaacttttcactccttactaatttctatatgcttgatccatcagtttctacaggggcccattaaaatctatttttcttcttgatgttattctgtaaggtattacttattttgagcaataataagtgatatttatttgttatcctttaatcaaatattgtgaaattcttcatttcccattgttgccttattcttgagtgccaagatctcacacattcgcctcagtatgaactgtatcaaataccaatttataaagataatatgaaagacgaa

SEQ ID NO: 153665 - DNA, 448 bp, Homo sapiens
  Payload ID: 10220
  Gene Symbol: MGAT4D
  Gene Name: MGAT4 family, member D
  ENST ID: ENST00000515402
  CDS Start-End: 109-448
gctggggacccacgcggcaccgcggggagggggctctgcgcgctcaaccccgtccctggcattatccgccgcctccacccgccggcctcccgcagcctggccagggccatgaggaccaagcaggtgaacttgctgatcaccctggtcgccgtcgcgttgttcagcttctcttgcttctccatctacaggataactcaaaccatttcttttgcgctgggtatttccactgttaacagaggaaattatagttacctgaaacagacactgacctctgttgtctccaggatgacgctctcccaagagaaggattctgtagtgattgtcttggttgcagatagtaatgaagattatttacattctgttgttaaaatgattacaaaaaaattcaaaaggcaagtgaggtctggatccttagaggtcatttcaatacctgcctttttatactcaa

SEQ ID NO: 153666 - DNA, 810 bp, Homo sapiens
  Payload ID: 10220
  Gene Symbol: MGAT4D
  Gene Name: MGAT4 family, member D
  ENST ID: ENST00000515121
  CDS Start-End: 149-259
gcagaagttctgtggcaaggcggcttcccagggcgggtgtgctggggacccacgcggcaccgcggggagggggctctgcgcgctcaaccccgtccctggcattatccgccgcctccacccgccggcctcccgcagcctggccagggccatgaggaccaagcaggtgaacttgctgatcaccctggtcgccgtcgcgttgttcagcttctcttgcttctccatctacaggataactcaaaccaattcaaaaggcaagtgaggtctggatccttagaggtcatttcaatacctgcctttttatactcaagcatgttaaatgccaagcacttagctgaggcctcacaaaaattagccagttggcgaatcaaacaggtattggatttttgcattttgttgctgtatgcccaacccaaggccaagtattatttacagctagaagatgatatcatagctaaagagatgtactttacaaaaataacagattttgtaggtaatatcagttcaaataattggttttttattgagttttcaatgcttggattcataggaaagctgtttagatctgaggacttaactcactttgtacggttttttttaatgttctacaaagagaaacccatagactggctcttgaatgacatttttcaggtaaaggtgtgtgacgcaggagaagatcttagaaactgtatgaaacgaaagaagcaaatacgtattcagtataaaccttctcttttccagcatgtgggtatacattcatcattccctagaaaagaacaatatgaaaaaaaaatatgaagataaataagaaga

SEQ ID NO: 153667 - DNA, 1281 bp, Homo sapiens
  Payload ID: 10220
  Gene Symbol: MGAT4D
  Gene Name: MGAT4 family, member D
  ENST ID: ENST00000503109
  CDS Start-End: 1-1128
atgaggaccaagcaggtgaacttgctgatcaccctggtcgccgtcgcgttgttcagcttctcttgcttctccatctacaggataactcaaaccaataatcaattaattaactgtagaaaccatattttggagtttaaagaaaatatgctacacttaagaaacaaaactgaaaaaaatacccaagagatgatgaaagttttgaatcgaatgaagtatgaaattacaaagagagaaattttgtcaggaaacttagttgcacagaaagcagacatattaaataaaaatgaaacagtatctaatacatttgaagacttaaagttcttttttcctcatctaaggaaagaaggtagaatttatcctgatgtaatcattggcaaagggaaaactggtgtttcttttgcgctgggtatttccactgttaacagaggaaattatagttacctgaaacagacactgacctctgttgtctccaggatgacgctctcccaagagaaggattctgtagtgattgtcttggttgcagatagtaatgaagattatttacattctgttgttaaaatgattacaaaaaaattcaaaaggcaagtgaggtctggatccttagaggtcatttcaatacctgcctttttatactcaagcatgttaaatgccaagcacttagctgaggcctcacaaaaattagccagttggcgaatcaaacaggtattggatttttgcattttgttgctgtatgcccaacccaaggccaagtattatttacagctagaagatgatatcatagctaaagagatgtactttacaaaaataacagattttgtaggtaatatcagttcaaataattggttttttattgagttttcaatgcttggattcataggaaagctgtttagatctgaggacttaactcactttgtacggttttttttaatgttctacaaagagaaacccatagactggctcttgaatgacatttttcaggtaaaggtgtgtgacgcaggagaagatcttagaaactgtatgaaacgaaagaagcaaatacgtattcagtataaaccttctcttttccagcatgtgggtatacattcatcattccctagaaaagaacaatatgaaaaagatgtctattaggagtttcatgtttctaaagctttaaaaagtatcaaaatcattctttggaaataatgacataataagaattagactatttctcaactttcttaagcgactacatcatattttaaaatattaatccttcaataaagtggcaagtataagaaaatt

SEQ ID NO: 153668 - DNA, 2010 bp, Homo sapiens
  Payload ID: 10221
  Gene Symbol: MICA
  Gene Name: MHC class I polypeptide-related sequence A
  ENST ID: ENST00000400322
  CDS Start-End: 1153-1890
gtatcatttcagtgaaggtcactccagtctttcatggaggccaaactaagggtgtaaattaggatcctcactgaagtggcgggaccctaagaggctttttcctggccccttagttgtgggttttcctgcgggcggcgcagccggtttccatcagaaccgcccagaggcggacgctgccttcctggggtgacggagcagcaggaagcgttttcggatcctggaatacgtgggcggcccgtgggaggggctgaggcgcagtttcctactcacccggatccgaatcctccgcggtgctgtttcaagagagccggattccagatcgcgctccagcccggactcggaattcctgccctgcgggtctgcattttcataacgggcaggtgtgagtgccctgcagctggagaccagaagcctgaaggcagctcggccctccccagcccacagcgccgttattccgtttctatatcagtaaacacatttcattttccgtagaccagggcggggtgacgggtgatcccagtcctcgcagtgaattccgggcagcaaaattcaaaacacatgcggccaaggccgggcacggtggttcacgcctgtaatcccagcactttgggaggtcgaggcgggcgatcacctgaggtcgggagctcgagaccaacctgaccaacatggggaaatcccgtctctactaaaaatataaaattagacgggcttggtggtgaatgcctgtaatcccagctagtcgggaggctgaggcaggagaatcgcttaaaccttggaggcggaggttgcggtgagccgagatcgcgccattgcacttcagcctgggcaacaagagggaaaactccgtcgcaaaaactttcgggggcggagcggagccccgccctgggttatgtaagcgaccgcgctgggccgtttctctttcttttccggaccctgcagtggcgcctaaagtctgagagagggaagtcgcctctgtgctcagccccacagtcttcgttataacctcacggtgctgtcctgggatggatctgtgcagtcagggtttctcactgaggtacatctggatggtcagcccttcctgcgctgtgacaggcagaaatgcagggcaaagccccagggacagtgggcagaagatgtcctgggaaataagacatgggacagagagaccagagacttgacagggaacggaaaggacctcaggatgaccctggctcatatcaaggaccagaaagaaggaatttcttgaaggaagatgccatgaagaccaagacacactatcacgctatgcatgcagactgcctgcaggaactacggcgatatctaaaatccggcgtagtcctgaggagaacagtgccccccatggtgaatgtcacccgcagcgaggcctcagagggcaacattaccgtgacatgcagggcttctggcttctatccctggaatatcacactgagctggcgtcaggatggggtatctttgagccacgacacccagcagtggggggatgtcctgcctgatgggaatggaacctaccagacctgggtggccaccaggatttgccaaggagaggagcagaggttcacctgctacatggaacacagcgggaatcacagcactcaccctgtgccctctgggaaagtgctggtgcttcagagtcattggcagacattccatgtttctgctgttgctgctgctgctatttttgttattattattttctatgtccgttgttgtaagaagaaaacatcagctgcagagggtccagagctcgtgagcctgcaggtcctggatcaacacccagttgggacgagtgaccacagggatgccacacagctcggatttcagcctctgatgtcagatcttgggtccactggctccactgagggcgcctagactctacagccaggcagctgggattcaattccctgcctggatctcacgagcactttccctcttggtgcctcagtttcctgacctatgaaacagagaaaataaaagcacttatttattgtt

SEQ ID NO: 153669 - DNA, 1675 bp, Homo sapiens
  Payload ID: 10221
  Gene Symbol: MICA
  Gene Name: MHC class I polypeptide-related sequence A
  Uniprot ID: Q29983
  ENST ID: ENST00000400325
  CDS Start-End: 404-1555
gtcgcctctgtgctcgctagtcaagtgaaacagtgggagtgaagaagaaacaaagacatctataactggttgtgatcaattagttgtaaacactgcactcagaccagcctgggaagattttaaggatatggtgtggtctgatgggttccaaggcagaggttacaatagcctggaagagggagactgcttaggcagtggcatcctggtgggatagggtctccagcccactggaattttctcttccaagcgtggccccgccctctccgctcgtgattggccctaagttccgggccccagtttcattggatgagcggtcgggggaccgggccaggtgactaagtttccgcggcgccttctccccggccactgcttgagccgctgagagggtggcgacgtcggggccatggggctgggcccggtcttcctgcttctggctggcatcttcccttttgcacctccgggagctgctgctgagccccacagtcttcgttataacctcacggtgctgtcctgggatggatctgtgcagtcagggtttctcactgaggtacatctggatggtcagcccttcctgcgctgtgacaggcagaaatgcagggcaaagccccagggacagtgggcagaagatgtcctgggaaataagacatgggacagagagaccagagacttgacagggaacggaaaggacctcaggatgaccctggctcatatcaaggaccagaaagaaggcttgcattccctccaggagattagggtctgtgagatccatgaagacaacagcaccaggagctcccagcatttctactacgatggggagctcttcctctcccaaaacctggagactaaggaatggacaatgccccagtcctccagagctcagaccttggccatgaacgtcaggaatttcttgaaggaagatgccatgaagaccaagacacactatcacgctatgcatgcagactgcctgcaggaactacggcgatatctaaaatccggcgtagtcctgaggagaacagtgccccccatggtgaatgtcacccgcagcgaggcctcagagggcaacattaccgtgacatgcagggcttctggcttctatccctggaatatcacactgagctggcgtcaggatggggtatctttgagccacgacacccagcagtggggggatgtcctgcctgatgggaatggaacctaccagacctgggtggccaccaggatttgccaaggagaggagcagaggttcacctgctacatggaacacagcgggaatcacagcactcaccctgtgccctctgggaaagtgctggtgcttcagagtcattggcagacattccatgtttctgctgttgctgctgctgctatttttgttattattattttctatgtccgttgttgtaagaagaaaacatcagctgcagagggtccagagctcgtgagcctgcaggtcctggatcaacacccagttgggacgagtgaccacagggatgccacacagctcggatttcagcctctgatgtcagatcttgggtccactggctccactgagggcgcctagactctacagccaggcagctgggattcaattccctgcctggatctcacgagcactttccctcttggtgcctcagtttcctgacctatgaaacagagaaaataaaagcacttatttattgtt

SEQ ID NO: 153670 - DNA, 1735 bp, Homo sapiens
  Payload ID: 10221
  Gene Symbol: MICA
  Gene Name: MHC class I polypeptide-related sequence A
  ENST ID: ENST00000427477
  CDS Start-End: 404-1402
gtcgcctctgtgctcgctagtcaagtgaaacagtgggagtgaagaagaaacaaagacatctataactggttgtgatcaattagttgtaaacactgcactcagaccagcctgggaagattttaaggatatggtgtggtctgatgggttccaaggcagaggttacaatagcctggaagagggagactgcttaggcagtggcatcctggtgggatagggtctccagcccactggaattttctcttccaagcgtggccccgccctctccgctcgtgattggccctaagttccgggccccagtttcattggatgagcggtcgggggaccgggccaggtgactaagtttccgcggcgccttctccccggccactgcttgagccgctgagagggtggcgacgtcggggccatggggctgggcccggtcttcctgcttctggctggcatcttcccttttgcacctccgggagctgctgctgagccccacagtcttcgttataacctcacggtgctgtcctgggatggatctgtgcagtcagggtttcttgctgaggtacatctggatggtcagcccttcctgcgctatgacaggcagaaatgcagggcaaagccccagggacagtgggcagaagatgtcctgggaaataagacatgggacagagagaccagggacttgacagggaacggaaaggacctcaggatgaccctggctcatatcaaggaccagaaagaaggcttgcattccctccaggagattagggtctgtgagatccatgaagacaacagcaccaggagctcccagcatttctactacgatggggagctcttcctctcccaaaacctggagactgaggaatggacagtgccccagtcctccagagctcagaccttggccatgaacgtcaggaatttcttgaaggaagatgccatgaagaccaagacacactatcacgctatgcatgcagactgcctgcaggaactacggcgatatctagaatccggcgtagtcctgaggagaacagtgccccccatggtgaatgtcacccgcagcgaggcctcagagggcaacatcaccgtgacatgcagggcttccagcttctatccccggaatatcatactgacctggcgtcaggatggggtatctttgagccacgacacccagcagtggggggatgtcctgcctgatgggaatggaacctaccagacctgggtggccaccaggatttgccgaggagaggagcagaggttcacctgctacatggaacacagcgggaatcacagcactcaccctgtgccctctgggaaagtgctggtgcttcagagtcattggcagacattccatgtttctgctgttgctgctggctgctgctatttttgttattattattttctatgtccgttgttgtaagaagaaaacatcagctgcagagggtccagagctcgtgagcctgcaggtcctggatcaacacccagttgggacgagtgaccacagggatgccacacagctcggatttcagcctctgatgtcagctcttgggtccactggctccactgagggcacctagactctacagccaggcggctggaattgaattccctgcctggatctcacaagcactttccctcttggtgcctcagtttcctgacctatgaaacagagaaaataaaagcacttatttattgttgttggaggctgcaaaatgttagtagatatgaggcatttgcagctgtgccatattaa

SEQ ID NO: 153671 - DNA, 2223 bp, Homo sapiens
  Payload ID: 10221
  Gene Symbol: MICA
  Gene Name: MHC class I polypeptide-related sequence A
  ENST ID: ENST00000432479
  CDS Start-End: 95-1123
agcggtcgggggaccgggccaggtgactaagtttccgcggcgccttctccccggccactgcttgagccgctgagagggtggcgacgtcggggccatggggctgggcccggtcttcctgcttctggctggcatcttcccttttgcacctccgggagctgctgctgagccccacagtcttcgttataacctcacggtgctgtcctgggatggatctgtgcagtcagggtttcttgctgaggtacatctggatggtcagcccttcctgcgctatgacaggcagaaatgcagggcaaagccccagggacagtgggcagaagatgtcctgggaaataagacatgggacagagagaccagggacttgacagggaacggaaaggacctcaggatgaccctggctcatatcaaggaccagaaagaagtgccccagtcctccagagctcagaccttggccatgaacgtcaggaatttcttgaaggaagatgccatgaagaccaagacacactatcacgctatgcatgcagactgcctgcaggaactacggcgatatctagaatccagcgtagtcctgaggagaagagtgccccccatggtgaatgtcacccgcagcgaggcctcagagggcaacatcaccgtgacatgcagggcttccagcttctatccccggaatatcacactgacctggcgtcaggatggggtatctttgagccacgacacccagcagtggggggatgtcctgcctgatgggaatggaacctaccagacctgggtggccaccaggatttgccaaggagaggagcagaggttcacctgctacatggaacacagcgggaatcacagcactcaccctgtgccctctgggaaagtgctggtgcttcagagtcattggcagacattccatgtttctgctgttgctgctgctgctgctgctatttttgttattattattttctatgtccgttgttgtaagaagaaaacatcagctgcagagggtccagagctcgtgagcctgcaggtcctggatcaacacccagttgggacgagtgaccacagggatgccacacagctcggatttcagcctctgatgtcagctcttgggtccactggctccactgagggcgcctagactctacagccaggcggctggaattgaattccctgcctggatctcacaagcactttccctcttggtgcctcagtttcctgacctatgaaacagagaaaataaaagcacttatttattgttgttggaggctgcaaaatgttagtagatatgaggcatttgcagctgtgccatattaattggtgtcattgtttttgttgttttcgtattattattttttttttttaagacagagtctcaggccaggcacggtggctcacgcctgtaatcccaacactttgggaggccgaggcgggcggatcacaaggtcaagagatcgagaccatcctgatcaacatggtgaaaccctgtctctactaaaaatacaaaaaattagctgggcctggtggcgtgtgcctgtagtcccagctactcaggagctgaggcaggaaaatcacttgaacctgggaggtggaggttgcagtgagctgagatcacaccactgcactccagcctggcgacagagcgagactctgtctcaaaaaaaaaaaaaaaaaaggacagagtctcactctgtcacccaggctgcagttcagtgacatgatctcagctcgttgcagcctccgcctcccgggttcaagcacttctcttgcctcagcctcccgagtagctggggttacagacatgcaccaccatacccggctaatttttgcatttttcatagagacaggattttgccatgttggccaggctggtctcaaactcctgacctcaggtgatctgcctgcctcaggctcccaaagtgctgggattacaagcatgagccaccatacccggcctattttattacattttaatttattttattttattatatcatccaccatgtctggcctattttattatattttaagatattttaatatattacgtgtgttgtaattggattatcatcagtgagctttgtgagtgagtgtcttggagatgactcctcctgaccagcccaggaccagctttcttgtcaccttgaggtcccctcgccccatcacactcttacgcattactctatgtctactgttatgggtgtgtaattttataccatagatgtttactctttaaacaga

SEQ ID NO: 153672 - DNA, 2221 bp, Homo sapiens
  Payload ID: 10221
  Gene Symbol: MICA
  Gene Name: MHC class I polypeptide-related sequence A
  ENST ID: ENST00000414473
  CDS Start-End: 95-964
agcggtcgggggaccgggccaggtgactaagtttccgcggcgccttctccccggccactgcttgagccgctgagagggtggcgacgtcggggccatggggctgggcccggtcttcctgcttctggctggcatcttcccttttgcacctccgggagctgctgctgagccccacagtcttcgttataacctcacggtgctgtcctgggatggatctgtgcagtcagggtttcttgctgaggtacatctggatggtcagcccttcctgcgctatgacaggcagaaatgcagggcaaagccccagggacagtgggcagaagatgtcctgggaaataagacatgggacagagagaccagggacttgacagggaacggaaaggacctcaggatgaccctggctcatatcaaggaccagaaagaagtgccccagtcctccagagctcagaccttggccatgaacgtcaggaatttcttgaaggaagatgccatgaagaccaagacacactatcacgctatgcatgcagactgcctgcaggaactacggcgatatctagaatccggcgtagtcctgaggagaacagtgccccccatggtgaatgtcacccgcagcgaggcctcagagggcaacatcaccgtgacatgcagggcttccagcttctatccccggaatatcatactgacctggcgtcaggatggggtatctttgagccacgacacccagcagtggggggatgtcctgcctgatgggaatggaacctaccagacctgggtggccaccaggatttgccgaggagaggagcagaggttcacctgctacatggaacacagcgggaatcacagcactcaccctgtgccctctgggaaagtgctggtgcttcagagtcattggcagacattccatgtttctgctgttgctgctggctgctgctatttttgttattattattttctatgtccgttgttgtaagaagaaaacatcagctgcagagggtccagagctcgtgagcctgcaggtcctggatcaacacccagttgggacgagtgaccacagggatgccacacagctcggatttcagcctctgatgtcagctcttgggtccactggctccactgagggcacctagactctacagccaggcggctggaattgaattccctgcctggatctcacaagcactttccctcttggtgcctcagtttcctgacctatgaaacagagaaaataaaagcacttatttattgttgttggaggctgcaaaatgttagtagatatgaggcatttgcagctgtgccatattaattggtgtcattgtttttgttgttttcgtattattattttttttttttaagacagagtctcaggccaggcacggtggctcacgcctgtaatcccaacactttgggaggccgaggcgggcggatcacaaggtcaagagatcgagaccatcctgatcaacatggtgaaaccctgtctctactaaaaatacaaaaaattagctgggcctggtggcgtgtgcctgtagtcccagctactcaggagctgaggcaggaaaatcacttgaacctgggaggtggaggttgcagtgagctgagatcacaccactgcactccagcctggcgacagagcgagactctgtctcaaaaaaaaaaaaaaaaaaagacagagtctcactctgtcacccaggctgcagttcagtgacatgatctcagctcgttgcagcctccgcctcccgggttcaagcacttctcttgcctcagcctcccgagtagctggggttacagacatgcaccaccatacccggctaatttttgcatttttcatagagacaggattttgccatgttggccaggctggtctcaaactcctgacctcaggtgatctgcctgcctcagcctcccaaagtgctgggattacaagcatgagccaccatacccggcctattttattacattttaatttattttattttattatatcatccaccatgtctggcctattttattatattttaagatattttaatatattacgtgtgttgtaattggattatcatcggtgagctttgtgagtgagtgtcttggagatgactcctcctgaccagcccaggaccagctttcttgtcaccttgaggtcccctcgccccatcacactcttacgcattactctatgtctactgttatgggtgtgtaattttataccatagatgtttactctttaaacaga

SEQ ID NO: 153673 - DNA, 1007 bp, Homo sapiens
  Payload ID: 10221
  Gene Symbol: MICA
  Gene Name: MHC class I polypeptide-related sequence A
  ENST ID: ENST00000417943
  CDS Start-End: 1-831
ttcccttttgcacctccgggagctgctgctgagccccacagtcttcgttataacctcacggtgctgtcctgggatggatctgtgcagtcagggtttcttgctgaggtacatctggatggtcagcccttcctgcgctatgacaggcagaaatgcagggcaaagccccagggacagtgggcagaagatgtcctgggaaataagacatgggacagagagaccagggacttgacagggaacggaaaggacctcaggatgaccctggctcatatcaaggaccagaaagaagtgccccccatggtgaatgtcacccgcagcgaggcctcagagggcaacatcaccgtgacatgcagggcttccagcttctatccccggaatatcacactgacctggcgtcaggatggggtatctttgagccacgacacccagcagtggggggatgtcctgcctgatgggaatggaacctaccagacctgggtggccaccaggatttgccaaggagaggagcagaggttcacctgctacatggaacacagcgggaatcacagcactcaccctgtgccctctgggaaagtgctggtgcttcagagtcattggcagacattccatgtttctgctgttgctgctgctgctgctgctatttttgttattattattttctatgtccgttgttgtaagaagaaaacatcagctgcagagggtccagagctcgtgagcctgcaggtcctggatcaacacccagttgggacgagtgaccacagggatgccacacagctcggatttcagcctctgatgtcagctcttgggtccactggctccactgagggcgcctagactctacagccaggcggctggaattgaattccctgcctggatctcacaagcactttccctcttggtgcctcagtttcctgacctatgaaacagagaaaataaaagcacttatttattgttgttggaggctgcaaaatgttagtagatatgaggcatttgcagctgtgccatattaa

SEQ ID NO: 153674 - DNA, 1737 bp, Homo sapiens
  Payload ID: 10221
  Gene Symbol: MICA
  Gene Name: MHC class I polypeptide-related sequence A
  Uniprot ID: Q29983
  ENST ID: ENST00000418465
  CDS Start-End: 404-1561
gtcgcctctgtgctggctagtcaagtgaaacagtgggagtgaagaagaaacaaagacatctataactggttgtgatcaattagttgtacacactgcactcagaccagcctgggaagattttaaggatatggtgtggtctgatgggttccaaggcagaggttacaatagcctggaagagggagactgcttaggcagtggcatcctggtgggatagggtctccagcccactggaattttctcttccaagcgtggccccgccctctccgctcgtgattggccctaagttccgggccccagtttcattggatgagcggtcgggggaccgggccaggtgactaagtttccgcggcgccttctccccggccactgcttgagccgctgagagggtggcgacgtcggggccatggggctgggcccggtcttcctgcttctggctggcatcttcccttttgcacctccgggagctgctgctgagccccacagtcttcgttataacctcacggtgctgtcctgggatggatctgtgcagtcagggtttcttgctgaggtacatctggatggtcagcccttcctgcgctatgacaggcagaaatgcagggcaaagccccagggacagtgggcagaagatgtcctgggaaataagacatgggacagagagaccagggacttgacagggaacggaaaggacctcaggatgaccctggctcatatcaaggaccagaaagaaggcttgcattccctccaggagattagggtctgtgagatccatgaagacaacagcaccaggagctcccagcatttctactacgatggggagctcttcctctcccaaaacgtggagactgaggaatggacagtgccccagtcctccagagctcagaccttggccatgaacgtcaggaatttcttgaaggaagatgccatgaagaccaagacacactatcacgctatgcatgcagactgcctgcaggaactacggcgatatctagaatccagcgtagtcctgaggagaagagtgccccccatggtgaatgtcacccgcagcgaggcctcagagggcaacatcaccgtgacatgcagggcttccagcttctatccccggaatatcacactgacctggcgtcaggatggggtatctttgagccacgacacccagcagtggggggatgtcctgcctgatgggaatggaacctaccagacctgggtggccaccaggatttgccaaggagaggagcagaggttcacctgctacatggaacacagcgggaatcacagcactcaccctgtgccctctgggaaagtgctggtgcttcagagtcattggcagacattccatgtttctgctgttgctgctgctgctgctgctatttttgttattattattttctatgtccgttgttgtaagaagaaaacatcagctgcagagggtccagagctcgtgagcctgcaggtcctggatcaacacccagttgggacgagtgaccacagggatgccacacagctcggatttcagcctctgatgtcagctcttgggtccactggctccactgagggcgcctagactctacagccaggcggctggaattgaattccctgcctggatctcacaagcactttccctcttggtgcctcagtttcctgacctatgaaacagagaaaataaaagcacttatttattgttgttggaggctgcaaaatgttagtagatatgaggcatttgcagctgtgccatattaa

SEQ ID NO: 153675 - DNA, 1005 bp, Homo sapiens
  Payload ID: 10221
  Gene Symbol: MICA
  Gene Name: MHC class I polypeptide-related sequence A
  ENST ID: ENST00000421350
  CDS Start-End: 1-672
ttcccttttgcacctccgggagctgctgctgagccccacagtcttcgttataacctcacggtgctgtcctgggatggatctgtgcagtcagggtttcttgctgaggtacatctggatggtcagcccttcctgcgctatgacaggcagaaatgcagggcaaagccccagggacagtgggcagaagatgtcctgggaaataagacatgggacagagagaccagggacttgacagggaacggaaaggacctcaggatgaccctggctcatatcaaggaccagaaagaagtgccccccatggtgaatgtcacccgcagcgaggcctcagagggcaacatcaccgtgacatgcagggcttccagcttctatccccggaatatcatactgacctggcgtcaggatggggtatctttgagccacgacacccagcagtggggggatgtcctgcctgatgggaatggaacctaccagacctgggtggccaccaggatttgccgaggagaggagcagaggttcacctgctacatggaacacagcgggaatcacagcactcaccctgtgccctctgggaaagtgctggtgcttcagagtcattggcagacattccatgtttctgctgttgctgctggctgctgctatttttgttattattattttctatgtccgttgttgtaagaagaaaacatcagctgcagagggtccagagctcgtgagcctgcaggtcctggatcaacacccagttgggacgagtgaccacagggatgccacacagctcggatttcagcctctgatgtcagctcttgggtccactggctccactgagggcacctagactctacagccaggcggctggaattgaattccctgcctggatctcacaagcactttccctcttggtgcctcagtttcctgacctatgaaacagagaaaataaaagcacttatttattgttgttggaggctgcaaaatgttagtagatatgaggcatttgcagctgtgccatattaa

SEQ ID NO: 153676 - DNA, 1001 bp, Homo sapiens
  Payload ID: 10221
  Gene Symbol: MICA
  Gene Name: MHC class I polypeptide-related sequence A
  ENST ID: ENST00000436191
  CDS Start-End: 1-825
ttcccttttgcacctccgggagctgctgctgagccccacagtcttcgttataacctcacggtgctgtcctgggatggatctgtgcagtcagggtttctcactgaggtacatctggatggtcagcccttcctgcgctgtgacaggcagaaatgcagggcaaagccccagggacagtgggcagaagatgtcctgggaaataagacatgggacagagagaccagagacttgacagggaacggaaaggacctcaggatgaccctggctcatatcaaggaccagaaagaagtgccccccatggtgaatgtcacccgcagcgaggcctcagagggcaacattaccgtgacatgcagggcttctggcttctatccctggaatatcacactgagctggcgtcaggatggggtatctttgagccacgacacccagcagtggggggatgtcctgcctgatgggaatggaacctaccagacctgggtggccaccaggatttgccaaggagaggagcagaggttcacctgctacatggaacacagcgggaatcacagcactcaccctgtgccctctgggaaagtgctggtgcttcagagtcattggcagacattccatgtttctgctgttgctgctgctgctatttttgttattattattttctatgtccgttgttgtaagaagaaaacatcagctgcagagggtccagagctcgtgagcctgcaggtcctggatcaacacccagttgggacgagtgaccacagggatgccacacagctcggatttcagcctctgatgtcagatcttgggtccactggctccactgagggcgcctagactctacagccaggcagctgggattcaattccctgcctggatctcacgagcactttccctcttggtgcctcagtttcctgacctatgaaacagagaaaataaaagcacttatttattgttgttggaggctgcaaaatgttagtagatatgaggcgtttgcagctgtaccatattaa

SEQ ID NO: 153677 - DNA, 2070 bp, Homo sapiens
  Payload ID: 10221
  Gene Symbol: MICA
  Gene Name: MHC class I polypeptide-related sequence A
  ENST ID: ENST00000417899
  CDS Start-End: 1153-1737
gtatcatttcagtgaaggtcactccagtctttcatggaggccaaactaagggtgtaaattaggatcctcactgaagtggcgggaccctaagaggctttttcctggccccttagttgtgggttttcctgcgggcggcgcagccggtttccatcagaaccgcccagaggcggacgctgccttcctggggtgacggagcagcaggaagcgttttcggatcctggaatacgtgggcggcccgtgggaggggctgaggcgcagtttcctactcacccggatccgaatcctccgcggtgctgtttcaagaaagccggattccagatcgcgctccagcccggactcggaattcctgccctgcgggtctgcattttcataacgggcaggtgtgagtgccctgcagctggagaccagaagcctgaaggcagctcggccctccccagcccacagcgccgttattccgtttctatatcagtaaacacatttcattttccgtagaccagggcggggtgacgggtgatcccagtcctcgcagtgaattccgggcagcaaaattcaaaacacatgcggccaaggccgggcacggtggttcacgcctgtaatcccagcactttgggaggtcgaggcgggcgatcacctgaggtcgggagctcgagaccaacctgaccaacatggggaaatcccgtctctactaaaaatataaaattagacgggcttggtggtgaatgcctgtaatcccagctagtcgggaggctgaggcaggagaatcgcttaaaccttggaggcggaggttgcggtgagccgagatcgcgccattgcacttcagcctgggcaacaagagggaaaactccgtcgcaaaaactttcgggggcggagcggagccccgccctgggttatgtaagcgaccgcgctgggccgtttctctttcttttccggaccctgcagtggcgcctaaagtctgagagagggaagtcgcctctgtgctcagccccacagtcttcgttataacctcacggtgctgtcctgggatggatctgtgcagtcagggtttcttgctgaggtacatctggatggtcagcccttcctgcgctatgacaggcagaaatgcagggcaaagccccagggacagtgggcagaagatgtcctgggaaataagacatgggacagagagaccagggacttgacagggaacggaaaggacctcaggatgaccctggctcatatcaaggaccagaaagaaggaatttcttgaaggaagatgccatgaagaccaagacacactatcacgctatgcatgcagactgcctgcaggaactacggcgatatctagaatccggcgtagtcctgaggagaacagtgccccccatggtgaatgtcacccgcagcgaggcctcagagggcaacatcaccgtgacatgcagggcttccagcttctatccccggaatatcatactgacctggcgtcaggatggggtatctttgagccacgacacccagcagtggggggatgtcctgcctgatgggaatggaacctaccagacctgggtggccaccaggatttgccgaggagaggagcagaggttcacctgctacatggaacacagcgggaatcacagcactcaccctgtgccctctgggaaagtgctggtgcttcagagtcattggcagacattccatgtttctgctgttgctgctggctgctgctatttttgttattattattttctatgtccgttgttgtaagaagaaaacatcagctgcagagggtccagagctcgtgagcctgcaggtcctggatcaacacccagttgggacgagtgaccacagggatgccacacagctcggatttcagcctctgatgtcagctcttgggtccactggctccactgagggcacctagactctacagccaggcggctggaattgaattccctgcctggatctcacaagcactttccctcttggtgcctcagtttcctgacctatgaaacagagaaaataaaagcacttatttattgttgttggaggctgcaaaatgttagtagatatgaggcatttgcagctgtgccatattaa

SEQ ID NO: 153678 - DNA, 2070 bp, Homo sapiens; identical to SEQ ID NO: 153677
  Payload ID: 10221
  Gene Symbol: MICA
  Gene Name: MHC class I polypeptide-related sequence A
  ENST ID: ENST00000438928
  CDS Start-End: 1153-1737

SEQ ID NO: 153679 - DNA, 2072 bp, Homo sapiens
  Payload ID: 10221
  Gene Symbol: MICA
  Gene Name: MHC class I polypeptide-related sequence A
  ENST ID: ENST00000420259
  CDS Start-End: 1153-1896
gtatcatttcagtgaaggtcactccagtctttcatggaggccaaactaagggtgtaaattaggatcctcactgaagtggcgggaccctaagaggctttttcctggccccttagttgtgggttttcctgcgggcggcgcagccggttcccatcagaaccgcccagaggcggacgctgccttcctggggtgacggagcagcaggaagcgttttcggatcctggaatacgtgggcggcccgtgggaggggctgaggcgcagtttcctactcacccggatcagaatcctccgcggtgctgtttcaagagagccggattccagatcgcgctccagcccggactcggaattcctgccctgcgggtctgcattttcataacgggcaggtgtgagtgccctgcagctggagaccagaagcctgaaggcagctcggccctccccagcccacagcgccgttattccgtttctatatcagtaaacacatttcattttccgtagaccagggcggggtgacgggtgatcccagtcctcgcagtgaattccgggcagcaaaattcaaaacacatgcgggcaaggccgggcacggtggttcacgcctgcaatcccagcactttgggaggtcgaggcgggcgatcacctgaggtcgggagctcgagaccaacctgaccaacatggggaaatcccgtctctactaaaaatataaaattagacgggcttggtggtgaatgcctgtaatcccagctagtcgggaggctgaggcaggagaatcgcttaaaccttggaggcggaggttgcggtgagccgagatcgcgccactgcacttcagcctgggcaacaagagggaaaactccgtcgcaaaaactttcgggggcggagcggagccccgccctgggttatgtaagcgaccgcgctgggccgtttctctttcttttccggaccctgcagtggcgcctaaagtctgagagagggaagtcgcctctgtgctgagccccacagtcttcgttataacctcacggtgctgtcctgggatggatctgtgcagtcagggtttcttgctgaggtacatctggatggtcagcccttcctgcgctatgacaggcagaaatgcagggcaaagccccagggacagtgggcagaagatgtcctgggaaataagacatgggacagagagaccagggacttgacagggaacggaaaggacctcaggatgaccctggctcatatcaaggaccagaaagaaggaatttcttgaaggaagatgccatgaagaccaagacacactatcacgctatgcatgcagactgcctgcaggaactacggcgatatctagaatccagcgtagtcctgaggagaagagtgccccccatggtgaatgtcacccgcagcgaggcctcagagggcaacatcaccgtgacatgcagggcttccagcttctatccccggaatatcacactgacctggcgtcaggatggggtatctttgagccacgacacccagcagtggggggatgtcctgcctgatgggaatggaacctaccagacctgggtggccaccaggatttgccaaggagaggagcagaggttcacctgctacatggaacacagcgggaatcacagcactcaccctgtgccctctgggaaagtgctggtgcttcagagtcattggcagacattccatgtttctgctgttgctgctgctgctgctgctatttttgttattattattttctatgtccgttgttgtaagaagaaaacatcagctgcagagggtccagagctcgtgagcctgcaggtcctggatcaacacccagttgggacgagtgaccacagggatgccacacagctcggatttcagcctctgatgtcagctcttgggtccactggctccactgagggcgcctagactctacagccaggcggctggaattgaattccctgcctggatctcacaagcactttccctcttggtgcctcagtttcctgacctatgaaacagagaaaataaaagcacttatttattgttgttggaggctgcaaaatgttagtagatatgaggcatttgcagctgtgccatattaa

SEQ ID NO: 153680 - DNA, 1005 bp, Homo sapiens; identical to SEQ ID NO: 153675
  Payload ID: 10221
  Gene Symbol: MICA
  Gene Name: MHC class I polypeptide-related sequence A
  ENST ID: ENST00000423443
  CDS Start-End: 1-672

SEQ ID NO: 153681 - DNA, 1005 bp, Homo sapiens; identical to SEQ ID NO: 153675
  Payload ID: 10221
  Gene Symbol: MICA
  Gene Name: MHC class I polypeptide-related sequence A
  ENST ID: ENST00000420744
  CDS Start-End: 1-672

SEQ ID NO: 153682 - DNA, 2221 bp, Homo sapiens; identical to SEQ ID NO: 153672
  Payload ID: 10221
  Gene Symbol: MICA
  Gene Name: MHC class I polypeptide-related sequence A
  ENST ID: ENST00000446505
  CDS Start-End: 95-964

SEQ ID NO: 153683 - DNA, 1386 bp, Homo sapiens
  Payload ID: 10221
  Gene Symbol: MICA
  Gene Name: MHC class I polypeptide-related sequence A
  ENST ID: ENST00000449934
  CDS Start-End: 55-1053
cgccttctccccggccactgcttgagccgctgagagggtggcgacgtcggggccatggggctgggcccggtctttctgcttctggctggcatcttcccttttgcacctccgggagctgctgctgagccccacagtcttcgttataacctcacggtgctgtcctgggatggatctgtgcagtcagggtttcttgctgaggtacatctggatggtcagcccttcctgcgctatgacaggcagaaatgcagggcaaagccccagggacagtgggcagaagatgtcctgggaaataagacatgggacagagagaccagggacttgacagggaacggaaaggacctcaggatgaccctggctcatatcaaggaccagaaagaaggcttgcattccctccaggagattagggtctgtgagatccatgaagacaacagcaccaggagctcccagcatttctactacgatggggagctcttcctctcccaaaacctggagactgaggaatggacagtgccccagtcctccagagctcagaccttggccatgaacgtcaggaatttcttgaaggaagatgccatgaagaccaagacacactatcacgctatgcatgcagactgcctgcaggaactacggcgatatctagaatccggcgtagtcctgaggagaacagtgccccccatggtgaatgtcacccgcagcgaggcctcagagggcaacatcaccgtgacatgcagggcttccagcttctatccccggaatatcatactgacctggcgtcaggatggggtatctttgagccacgacacccagcagtggggggatgtcctgcctgatgggaatggaacctaccagacctgggtggccaccaggatttgccgaggagaggagcagaggttcacctgctacatggaacacagcgggaatcacagcactcaccctgtgccctctgggaaagtgctggtgcttcagagtcattggcagacattccatgtttctgctgttgctgctggctgctgctatttttgttattattattttctatgtccgttgttgtaagaagaaaacatcagctgcagagggtccagagctcgtgagcctgcaggtcctggatcaacacccagttgggacgagtgaccacagggatgccacacagctcggatttcagcctctgatgtcagctcttgggtccactggctccactgagggcacctagactctacagccaggcggctggaattgaattccctgcctggatctcacaagcactttccctcttggtgcctcagtttcctgacctatgaaacagagaaaataaaagcacttatttattgttgttggaggctgcaaaatgttagtagatatgaggcatttgcagctgtgccatattaa

SEQ ID NO: 153684 - DNA, 1735 bp, Homo sapiens; identical to SEQ ID NO: 153670
  Payload ID: 10221
  Gene Symbol: MICA
  Gene Name: MHC class I polypeptide-related sequence A
  ENST ID: ENST00000415525
  CDS Start-End: 404-1402

SEQ ID NO: 153685 - DNA, 2211 bp, Homo sapiens
  Payload ID: 10221
  Gene Symbol: MICA
  Gene Name: MHC class I polypeptide-related sequence A
  ENST ID: ENST00000460798
  CDS Start-End: 95-733
agcggtcgggggaccgggccaggtgactaagtttccgcggcgccttctccccggccactgcttgagccgctgagagggtggcgacgtcggggccatggggctgggcccggtcttcctgcttctggctggcatcttcccttttgcacctccgggagctgctgctgagccccacagtcttcgttataacctcacggtgctgtcctgggatggatctgtgcagtcagggtttctcactgaggtacatctggatggtcagcccttcctgcgctgtgacaggcagaaatgcagggcaaagccccagggacagtgggcagaagatgtcctgggaaataagacatgggacagagagaccagagacttgacagggaacggaaaggacctcaggatgaccctggctcatatcaaggaccagaaagaagtcctccagagctcagaccttggccatgaacgtcaggaatttcttgaaggaagatgccatgaagaccaagacacactatcacgctatgcatgcagactgcctgcaggaactacggcgatatctaaaatccggcgtagtcctgaggagaacagtgccccccatggtgaatgtcacccgcagcgaggcctcagagggcaacattaccgtgacatgcagggcttctggcttctatccctggaatatcacactgagctggcgtcaggatggggtatctttgagccacgacacccagcagtggggggatgtcctgcctgatgggaatggaacctaccagacctgggtggccaccaggatttgccaaggagaggagcagaggttcacctgctacatggaacacagcgggaatcacagcactcaccctgtgccctctgggaaagtgctggtgcttcagagtcattggcagacattccatgtttctgctgttgctgctgctgctatttttgttattattattttctatgtccgttgttgtaagaagaaaacatcagctgcagagggtccagagctcgtgagcctgcaggtcctggatcaacacccagttgggacgagtgaccacagggatgccacacagctcggatttcagcctctgatgtcagatcttgggtccactggctccactgagggcgcctagactctacagccaggcagctgggattcaattccctgcctggatctcacgagcactttccctcttggtgcctcagtttcctgacctatgaaacagagaaaataaaagcacttatttattgttgttggaggctgcaaaatgttagtagatatgaggcgtttgcagctgtaccatattaattggtgtcactgtttctgttgttttcgtattattattattttttttaagacagagtctcaggccaggcacggtggctcacgcctgtaatcccagcactttgggaggccgaggcgggcggatcacaaggtcaagagatcgagaccatcctgatcaacatggtgaaaccctgtctctactaaaaatacaaaaaattagctgggcctggtggcatgtgcctgtagtcccagctactcaggagctgaggcaggaaaatcacttgaacctgggaggtggaggttgcagtgagctgagatcgcgccactgcactccagcctggcgacagagcgagactctgtctcaaaaaaaaaaaaaaaaaaaaaagacagagtctcactctgtcacccaggctgcagttcagtgacatgatctcagctcgttgcagcctccgcctcccgggttcaagcacttcttgtgcctcagcctcccgagtagctggggttacagacatgcaccaccatacccagctaatttttgcatttttcatagagacaggattttgccatgttggccaggctggtctcaaactcctgacctcaggtgatctgcctgcctcagcctcccaaagtgctgggattacaagcatgagccaccatacccggcctattttattacattttactatattttattttattatatcatccaccatgtctggcctattttattatattttaagatattttaatatattacatgtgttgtaattggattatcatcggtgagctttgtgagtgagtgtcttggagatgactcctcctgaccagcccaggaccagctttcttgtcaccttgaggtcccctcgccccatcacactcttacgcattactctatgtctactgttatgggtgcataattttataccatagatgtttactctttaaacaga

SEQ ID NO: 153686 - DNA, 1396 bp, Homo sapiens
  Payload ID: 10221
  Gene Symbol: MICA
  Gene Name: MHC class I polypeptide-related sequence A
  ENST ID: ENST00000546529
  CDS Start-End: 67-1065
aagtttccgcggcgccttctccccggccactgcttgagccgctgagagggtggcgacgtcggggccatggggctgggcccggtcttcctgcttctggctggcatcttcccttttgcacctccgggagctgctgctgagccccacagtcttcgttataacctcacggtgctgtcctgggatggatctgtgcagtcagggtttcttgctgaggtacatctggatggtcagcccttcctgcgctatgacaggcagaaatgcagggcaaagccccagggacagtgggcagaagatgtcctgggaaataagacatgggacagagagaccagggacttgacagggaacggaaaggacctcaggatgaccctggctcatatcaaggaccagaaagaaggcttgcattccctccaggagattagggtctgtgagatccatgaagacaacagcaccaggagctcccagcatttctactacgatggggagctcttcctctcccaaaacctggagactgaggaatggacagtgccccagtcctccagagctcagaccttggccatgaacgtcaggaatttcttgaaggaagatgccatgaagaccaagacacactatcacgctatgcatgcagactgcctgcaggaactacggcgatatctagaatccggcgtagtcctgaggagaacagtgccccccatggtgaatgtcacccgcagcgaggcctcagagggcaacatcaccgtgacatgcagggcttccagcttctatccccggaatatcatactgacctggcgtcaggatggggtatctttgagccacgacacccagcagtggggggatgtcctgcctgatgggaatggaacctaccagacctgggtggccaccaggatttgccgaggagaggagcagaggttcacctgctacatggaacacagcgggaatcacagcactcaccctgtgccctctgggaaagtgctggtgcttcagagtcattggcagacattccatgtttctgctgttgctgctggctgctgctatttttgttattattattttctatgtccgttgttgtaagaagaaaacatcagctgcagagggtccagagctcgtgagcctgcaggtcctggatcaacacccagttgggacgagtgaccacagggatgccacacagctcggatttcagcctctgatgtcagctcttgggtccactggctccactgagggcacctagactctacagccaggcggctggaattgaattccctgcctggatctcacaagcactttccctcttggtgcctcagtttcctgacctatgaaacagagaaaataaaagcacttatttattgttgttggaggctgcaaaatgttagtagatatgaggcatttgcagctgtgccatatt

SEQ ID NO: 153687 - DNA, 1392 bp, Homo sapiens
  Payload ID: 10221
  Gene Symbol: MICA
  Gene Name: MHC class I polypeptide-related sequence A
  Uniprot ID: Q29983
  ENST ID: ENST00000547609
  CDS Start-End: 67-1218
aagtttccgcggcgccttctccccggccactgcttgagccgctgagagggtggcgacgtcggggccatggggctgggcccggtcttcctgcttctggctggcatcttcccttttgcacctccgggagctgctgctgagccccacagtcttcgttataacctcacggtgctgtcctgggatggatctgtgcagtcagggtttctcactgaggtacatctggatggtcagcccttcctgcgctgtgacaggcagaaatgcagggcaaagccccagggacagtgggcagaagatgtcctgggaaataagacatgggacagagagaccagagacttgacagggaacggaaaggacctcaggatgaccctggctcatatcaaggaccagaaagaaggcttgcattccctccaggagattagggtctgtgagatccatgaagacaacagcaccaggagctcccagcatttctactacgatggggagctcttcctctcccaaaacctggagactaaggaatggacaatgccccagtcctccagagctcagaccttggccatgaacgtcaggaatttcttgaaggaagatgccatgaagaccaagacacactatcacgctatgcatgcagactgcctgcaggaactacggcgatatctaaaatccggcgtagtcctgaggagaacagtgccccccatggtgaatgtcacccgcagcgaggcctcagagggcaacattaccgtgacatgcagggcttctggcttctatccctggaatatcacactgagctggcgtcaggatggggtatctttgagccacgacacccagcagtggggggatgtcctgcctgatgggaatggaacctaccagacctgggtggccaccaggatttgccaaggagaggagcagaggttcacctgctacatggaacacagcgggaatcacagcactcaccctgtgccctctgggaaagtgctggtgcttcagagtcattggcagacattccatgtttctgctgttgctgctgctgctatttttgttattattattttctatgtccgttgttgtaagaagaaaacatcagctgcagagggtccagagctcgtgagcctgcaggtcctggatcaacacccagttgggacgagtgaccacagggatgccacacagctcggatttcagcctctgatgtcagatcttgggtccactggctccactgagggcgcctagactctacagccaggcagctgggattcaattccctgcctggatctcacgagcactttccctcttggtgcctcagtttcctgacctatgaaacagagaaaataaaagcacttatttattgttgttggaggctgcaaaatgttagtagatatgaggcgtttgcagctgtaccatatt

SEQ ID NO: 153688 - DNA, 1396 bp, Homo sapiens; identical to SEQ ID NO: 153686
  Payload ID: 10221
  Gene Symbol: MICA
  Gene Name: MHC class I polypeptide-related sequence A
  ENST ID: ENST00000547767
  CDS Start-End: 67-1065

SEQ ID NO: 153689 - DNA, 2260 bp, Homo sapiens
  Payload ID: 10221
  Gene Symbol: MICA
  Gene Name: MHC class I polypeptide-related sequence A
  ENST ID: ENST00000614103
  CDS Start-End: 1222-1929
gtatcatttcagtgaaggtcactccagtctttcatggaggccaaactaagggtgtaaattaggatcctcactgaagtggcgggaccctaagaggctttttcctggccccttagttgtgggttttcctgcgggcggcgcagccggtttccatcagaaccgcccagaggcggacgctgccttcctggggtgacggagcagcaggaagcgttttcggatcctggaatacgtgggcggcccgtgggaggggctgaggcgcagtttcctactcacccggatccgaatcctccgcggtgctgtttcaagaaagccggattccagatcgcgctccagcccggactcggaattcctgccctgcgggtctgcattttcataacgggcaggtgtgagtgccctgcagctggagaccagaagcctgaaggcagctcggccctccccagcccacagcgccgttattccgtttctatatcagtaaacacatttcattttccgtagaccagggcggggtgacgggtgatcccagtcctcgcagtgaattccgggcagcaaaattcaaaacacatgcggccaaggccgggcacggtggttcacgcctgtaatcccagcactttgggaggtcgaggcgggcgatcacctgaggtcgggagctcgagaccaacctgaccaacatggggaaatcccgtctctactaaaaatataaaattagacgggcttggtggtgaatgcctgtaatcccagctagtcgggaggctgaggcaggagaatcgcttaaaccttggaggcggaggttgcggtgagccgagatcgcgccattgcacttcagcctgggcaacaagagggaaaactccgtcgcaaaaactttcgggggcggagcggagccccgccctgggttatgtaagcgaccgcgctgggccgtttctctttcttttccggaccctgcagtggcgcctaaagtctgagagagggaagtcgcctctgtgctcgtgagtgcatggggtataagagccccacagtcttcgttataacctcacggtgctgtcctgggatggatctgtgcagtcagggtttcttgctgaggtacatctggatggtcagcccttcctgcgctatgacaggcagaaatgcagggcaaagccccagggacagtgggcagaagatgtcctgggaaataagacatgggacagagagaccagggacttgacagggaacggaaaggacctcaggatgaccctggctcatatcaaggaccagaaagaaggcttgcattccctccaggagattagggtctgtgagatccatgaagacaacagcaccaggagctcccagcatttctactacgatggggagctcttcctctcccaaaacctggagactgaggaatggacagtgccccagtcctccagagctcagaccttggccatgaacgtcaggaatttcttgaaggaagatgccatgaagaccaagacacactatcacgctatgcatgcagactgcctgcaggaactacggcgatatctagaatccggcgtagtcctgaggagaacagtgccccccatggtgaatgtcacccgcagcgaggcctcagagggcaacatcaccgtgacatgcagggcttccagcttctatccccggaatatcatactgacctggcgtcaggatggggtatctttgagccacgacacccagcagtggggggatgtcctgcctgatgggaatggaacctaccagacctgggtggccaccaggatttgccgaggagaggagcagaggttcacctgctacatggaacacagcgggaatcacagcactcaccctgtgccctctgggaaagtgctggtgcttcagagtcattggcagacattccatgtttctgctgttgctgctggctgctgctatttttgttattattattttctatgtccgttgttgtaagaagaaaacatcagctgcagagggtccagagctcgtgagcctgcaggtcctggatcaacacccagttgggacgagtgaccacagggatgccacacagctcggatttcagcctctgatgtcagctcttgggtccactggctccactgagggcacctagactctacagccaggcggctggaattgaattccctgcctggatctcacaagcactttccctcttggtgcctcagtttcctgacctatgaaacagagaaaataaaagcacttatttattgttgttggaggctgcaaaatgttagtagatatgaggcatttgcagctgtgccatatt

SEQ ID NO: 153690 - DNA, 2260 bp, Homo sapiens
  Payload ID: 10221
  Gene Symbol: MICA
  Gene Name: MHC class I polypeptide-related sequence A
  ENST ID: ENST00000616296
  CDS Start-End: 1222-1929
gtatcatttcagtgaaggtcactccagtctttcatggaggccaaactaagggtgtaaattaggatcctcactgaagtggcgggaccctaagaggctttttcctggccccttagttgtgggttttcctgcgggcggcgcagccggtttccatcagaaccgcccagaggcggacgctgccttcctggggtgacggagcagcaggaagcgttttcggatcctggaatacgtgggcggcccgtgggaggggctgaggcgcagtttcctactcacccggatccgaatcctccgcggtgctgtttcaagagagccggattccagatcacgctccagcccggactcggaattcctgccctgcgggtctgcattttcataacgggcaggtgtgagtgccctgcagctggagaccagaagcctgaaggcagctcggccctccccagcccacagcgccgttattccgtttctatatcagtaaacacatttcattttccgtagaccagggcggggtgacgggtgatcccagtcctcgcagtgaattccgggcagcaaaattcaaaacacatgcggccaaggccgggcacggtggttcacgcctgtaatcccagcactttgggaggtcgaggcgggcgatcacctgaggtcgggagctcgagaccaacctgaccaacatggggaaatcccgtctctactaaaaatataaaattagacgggcttggtggtgaatgcctgtaatcccagctagtcgggaggctgaggcaggagaatcgcttaaaccttggaggcggaggttgcggtgagccgagatcgcgccattgcacttcagcctgggcaacaagagggaaaactccgtcgcaaaaactttcgggggcggagcggagccccgccctgggttatgtaagcgaccgcgctgggccgtttctctttcttttccggaccctgcagtggcgcctaaagtctgagagagggaagtcgcctctgtgctcgtgagtgcatggggtataagagccccacagtcttcgttataacctcacggtgctgtcctgggatggatctgtgcagtcagggtttcttgctgaggtacatctggatggtcagcccttcctgcgctatgacaggcagaaatgcagggcaaagccccagggacagtgggcagaagatgtcctgggaaataagacatgggacagagagaccagggacttgacagggaacggaaaggacctcaggatgaccctggctcatatcaaggaccagaaagaaggcttgcattccctccaggagattagggtctgtgagatccatgaagacaacagcaccaggagctcccagcatttctactacgatggggagctcttcctctcccaaaacctggagactgaggaatggacagtgccccagtcctccagagctcagaccttggccatgaacgtcaggaatttcttgaaggaagatgccatgaagaccaagacacactatcacgctatgcatgcagactgcctgcaggaactacggcgatatctagaatccggcgtagtcctgaggagaacagtgccccccatggtgaatgtcacccgcagcgaggcctcagagggcaacatcaccgtgacatgcagggcttccagcttctatccccggaatatcatactgacctggcgtcaggatggggtatctttgagccacgacacccagcagtggggggatgtcctgcctgatgggaatggaacctaccagacctgggtggccaccaggatttgccgaggagaggagcagaggttcacctgctacatggaacacagcgggaatcacagcactcaccctgtgccctctgggaaagtgctggtgcttcagagtcattggcagacattccatgtttctgctgttgctgctggctgctgctatttttgttattattattttctatgtccgttgttgtaagaagaaaacatcagctgcagagggtccagagctcgtgagcctgcaggtcctggatcaacacccagttgggacgagtgaccacagggatgccacacagctcggatttcagcctctgatgtcagctcttgggtccactggctccactgagggcacctagactctacagccaggcggctggaattgaattccctgcctggatctcacaagcactttccctcttggtgcctcagtttcctgacctatgaaacagagaaaataaaagcacttatttattgttgttggaggctgcaaaatgttagtagatatgaggcatttgcagctgtgccatatt

SEQ ID NO: 153691 - DNA, 2260 bp, Homo sapiens; identical to SEQ ID NO: 153689
  Payload ID: 10221
  Gene Symbol: MICA
  Gene Name: MHC class I polypeptide-related sequence A
  ENST ID: ENST00000616968
  CDS Start-End: 1222-1929

SEQ ID NO: 153692 - DNA, 2446 bp, Homo sapiens
  Payload ID: 10222
  Gene Symbol: MICB
  Gene Name: MHC class I polypeptide-related sequence B
  ENST ID: ENST00000252229
  CDS Start-End: 80-1231
aaatttcgacggggtcttctcacgggtttcattcagttggccactgctgagcagctgagaaggtggcgacgtaggggccatggggctgggccgggtcctgctgtttctggccgtcgccttcccttttgcacccccggcagccgccgctgagccccacagtcttcgttacaacctcatggtgctgtcccaggatggatctgtgcagtcagggtttctcgctgagggacatctggatggtcagcccttcctgcgctatgacaggcagaaacgcagggcaaagccccagggacagtgggcagaaaatgtcctgggagctaagacctgggacacagagaccgaggacttgacagagaatgggcaagacctcaggaggaccctgactcatatcaaggaccagaaaggaggcttgcattccctccaggagattagggtctgtgagatccatgaagacagcagcaccaggggctcccggcatttctactacgatggggagctcttcctctcccaaaacctggagactcaagaatcgacagtgccccagtcctccagagctcagaccttggctatgaacgtcacaaatttctggaaggaagatgccatgaagaccaagacacactatcgcgctatgcaggcagactgcctgcagaaactacagcgatatctgaaatccggggtggccatcaggagaacagtgccccccatggtgaatgtcacctgcagcgaggtctcagagggcaacatcaccgtgacatgcagggcttccagcttctatccccggaatatcacactgacctggcgtcaggatggggtatctttgagccacaacacccagcagtggggggatgtcctgcctgatgggaatggaacctaccagacctgggtggccaccaggattcgccaaggagaggagcagaggttcacctgctacatggaacacagcgggaatcacggcactcaccctgtgccctctgggaaggcgctggtgcttcagagtcaacggacagactttccatatgtttctgctgctatgccatgttttgttattattattattctctgtgtcccttgttgcaagaagaaaacatcagcggcagagggtccagagcttgtgagcctgcaggtcctggatcaacacccagttgggacaggagaccacagggatgcagcacagctgggatttcagcctctgatgtcagctactgggtccactggttccactgagggcacctagactctacagccaggcggccaggattcaactccctgcctggatctcaccagcactttccctctgtttcctgacctatgaaacagagaaaataacatcacttatttattgttgttggatgctgcaaagtgttagtaggtatgaggtgtttgctgctctgccacgtagagagccagcaaagggatcatgaccaactcaacattccattggaggctatatgatcaaacagcaaattgtttatcatgaatgcaggatgtgggcaaactcacgactgctcctgccaacagaaggtttgctgagggcattcactccatggtgctcattggagttatctactgggtcatctagagcctattgtttgaggaatgcagtcttacaagcctactctggacccagcagctgactccttcttccacccctcttcttgctatctcctataccaataaatacgaagggctgtggaagatcagagcccttgttcacgagaagcaagaagccccctgaccccttgttccaaatatactcttttgtctttctctttattcccacgttcgccctttgttcagtccaatacagggttgtggggcccttaacagtgccatattaattggtatcattatttctgttgtttttgtttttgtttttgtttttgtttttgagacagagtctcactctgtcacccaggctgcagttcactggtgtgatctcagctcactgcaacctctgcctcccaggttcaagcacttctcgtacctcagactcccgaatagctgggattacagacaggcaccaccacacccagctaatttttgtattttttgtagagacggggtttcgccaagttgaccagcccagtttcaaactcctgacctcaggtgatctgcctgccttggcatcccaaagtgctgggattacaagaatgagccaccgtgcctggcctattttattatattgtaatatattttattatattagccaccatgcctgtcctattttcttatgttttaatatattttaatatattacatgtgcagtaattagattatcatgggtgaactttatgagtgagtatcttggtgatgactcctcctgaccagcccaggaccagctttcttgtcaccttgaggtcccctcgccccgtcacaccgttatgcattactctgtgtctactattatgtgtgcataatttataccgtaaatgtttactctttaaataga

SEQ ID NO: 153693 - DNA, 2446 bp, Homo sapiens
  Payload ID: 10222
  Gene Symbol: MICB
  Gene Name: MHC class I polypeptide-related sequence B
  ENST ID: ENST00000383514
  CDS Start-End: 80-1231
aaatttccacggggtcttctcaccgttttcattcagttggccactgctgagcagctgagaaggtggcgacgtaggggccatggggctgggccgggtcctgctgtttctggccgtcgccttcccttttgcacccccggcagccgccgctgagccccacagtcttcgttacaacctcatggtgctgtcccaggatggatctgtgcagtcagggtttctcgctgagggacatctggatggtcagcccttcctgcgctatgacaggcagaaacgcagggcaaagccccagggacagtgggcagaagatgtcctgggagctaagacctgggacacagagaccgaggacttgacagagaatgggcaagacctcaggaggaccctgactcatatcaaggaccagaaaggaggcttgcattccctccaggagattagggtctgtgagatccatgaagacagcagcaccaggggctcccggcatttctactacgatggggagctcttcctctcccaaaacctggagactcaagaatcgacagtgccccagtcctccagagctcagaccttggctatgaacgtcacaaatttctggaaggaagatgccatgaagaccaagacacactatcgcgctatgcaggcagactgcctgcagaaactacagcgatatctgaaatccggggtggccatcaggagaacagtgccccccatggtgaatgtcatctgcagcgaggtctcagagggcaacatcaccgtgacatgcagggcttccagcttctatccccggaatatcacactgacctggcgtcaggatggggtatctttgagccacaacacccagcagtggggggatgtcctgcctgatgggaatggaacctaccagacctgggtggccaccaggattcgccaaggagaggagcagaggttcacctgctacatggaacacagcgggaatcacggcactcaccctgtgccctctgggaaggcgctggtgcttcagagtcaacggacagactttccatatgtttctgctgctatgccatgttttgttattattattattctctgtgtcccttgttgcaagaagaaaacatcagcggcagagggtccagagcttgtgagcctgcaggtcctggatcaacacccagttgggacaggagaccacagggatgcagcacagctgggatttcagcctctgatgtcagctactgggtccactggttccactgagggcacctagactctacagccaggcggccaggattcaactccctgcctggatctcaccagcactttccctctgtttcctgacctatgaaacagagaaaataacatcacttatttattgttgttggatgctgcaaagtgttagtaggtatgaggtgtttgctgctctgccacgtagagagccagcaaagggatcatgaccaactcaacattccattggaggctatatgatcaaacagcaaattgtttatcatgaatgcaggatgtgggcaaactcacgactgctcctgccaacagaaggtttgctgagggcattcactccatggtgctcattggagttatctactgggtcatctagagcctattgtttgaggaatgcagtcttacaagcctactctggacccagcagctgactccttcttccacccctcttcttgctatctcctataccaataaatacgaagggctgtggaagatcagagcccttgttcacgagaagcaagaagccccctgaccccttgttccaaatatactcttttgtctttctctttattcccacgttcgccctttgttcagtccaatacagggttgtggggcccttaacagtgccatattaattggtatcattatttctgttgtttttgtttttgtttttgtttttgtttttgagacagagtctcactctgtcacccaggctgcagttcactggtgtgatctcagctcactgcaacctctgcctcccaggttcaagcacttctcgtacctcagactcccgaatagctgggattacagacaggcaccaccacacccagctaatttttgtattttttgtagagacggggtttcgccaagttgaccagcccagtttcaaactcctgacctcaggtgatctgcctgccttggcatcccaaagtgctgggattacaagaatgagccaccgtgcctggcctattttattatattgtaatatattttattatattagccaccatgcctgtcctattttcttatgttttaatatattttaatatattacatgtgcagtaattagattatcatgggtgaactttatgagtgagtatcttggtgatgactcctcctgaccagcccaggaccagctttcttgtcaccttgaggtcccctcgccccgtcacaccgttatgcattactctgtgtctactattatgtgtgcataatttataccgtaaatgtttactctttaaataga

SEQ ID NO: 153694 - DNA, 2346 bp, Homo sapiens
  Payload ID: 10222
  Gene Symbol: MICB
  Gene Name: MHC class I polypeptide-related sequence B
  Uniprot ID: Q29980
  ENST ID: ENST00000399150
  CDS Start-End: 109-1131
agcggtcgctgagcggggcgcaggtgactaaatttcgacggggtcttctcacgggtttcattcagttggccactgctgagcagctgagaaggtggcgacgtaggggccatggggctgggccgggtcctgctgtttctggccgtcgccttcccttttgcacccccggcagccgccgctgagccccacagtcttcgttacaacctcatggtgctgtcccaggatggatctgtgcagtcagggtttctcgctgagggacatctggatggtcagcccttcctgcgctatgacaggcagaaacgcagggcaaagccccagggacagtgggcagaaaatgtcctgggagctaagacctgggacacagagaccgaggacttgacagagaatgggcaagacctcaggaggaccctgactcatatcaaggaccagaaaggagtgccccagtcctccagagctcagaccttggctatgaacgtcacaaatttctggaaggaagatgccatgaagaccaagacacactatcgcgctatgcaggcagactgcctgcagaaactacagcgatatctgaaatccggggtggccatcaggagaacagtgccccccatggtgaatgtcacctgcagcgaggtctcagagggcaacatcaccgtgacatgcagggcttccagcttctatccccggaatatcacactgacctggcgtcaggatggggtatctttgagccacaacacccagcagtggggggatgtcctgcctgatgggaatggaacctaccagacctgggtggccaccaggattcgccaaggagaggagcagaggttcacctgctacatggaacacagcgggaatcacggcactcaccctgtgccctctgggaaggcgctggtgcttcagagtcaacggacagactttccatatgtttctgctgctatgccatgttttgttattattattattctctgtgtcccttgttgcaagaagaaaacatcagcggcagagggtccagagcttgtgagcctgcaggtcctggatcaacacccagttgggacaggagaccacagggatgcagcacagctgggatttcagcctctgatgtcagctactgggtccactggttccactgagggcacctagactctacagccaggcggccaggattcaactccctgcctggatctcaccagcactttccctctgtttcctgacctatgaaacagagaaaataacatcacttatttattgttgttggatgctgcaaagtgttagtaggtatgaggtgtttgctgctctgccacgtagagagccagcaaagggatcatgaccaactcaacattccattggaggctatatgatcaaacagcaaattgtttatcatgaatgcaggatgtgggcaaactcacgactgctcctgccaacagaaggtttgctgagggcattcactccatggtgctcattggagttatctactgggtcatctagagcctattgtttgaggaatgcagtcttacaagcctactctggacccagcagctgactccttcttccacccctcttcttgctatctcctataccaataaatacgaagggctgtggaagatcagagcccttgttcacgagaagcaagaagccccctgaccccttgttccaaatatactcttttgtctttctctttattcccacgttcgccctttgttcagtccaatacagggttgtggggcccttaacagtgccatattaattggtatcattatttctgttgtttttgtttttgtttttgtttttgtttttgagacagagtctcactctgtcacccaggctgcagttcactggtgtgatctcagctcactgcaacctctgcctcccaggttcaagcacttctcgtacctcagactcccgaatagctgggattacagacaggcaccaccacacccagctaatttttgtattttttgtagagacggggtttcgccaagttgaccagcccagtttcaaactcctgacctcaggtgatctgcctgccttggcatcccaaagtgctgggattacaagaatgagccaccgtgcctggcctattttattatattgtaatatattttattatattagccaccatgcctgtcctattttcttatgttttaatatattttaatatattacatgtgcagtaattagattatcatgggtgaactttatgagtgagtatcttggtgatgactcctcctgaccagcccaggaccagctttcttgtcaccttgaggtcccctcgccccgtcacaccgttatgcattactctgtgtctactattatgtgtgcataatttataccgtaaatgtttactctttaaataga

SEQ ID NO: 153695 - DNA, 2338 bp, Homo sapiens
  Payload ID: 10222
  Gene Symbol: MICB
  Gene Name: MHC class I polypeptide-related sequence B
  ENST ID: ENST00000400313
  CDS Start-End: 109-1131
agcggtcgctgagcggggcgcaggtgactaaatttcgacggggtcttctcaccggtttcattcagttggccactgctgagcagctgagaaggtggcgacgtaggggccatggggctgggccgggtcctgctgtttctggccgtcgccttcccttttgcacccccggcagccgccgctgagccccacagtcttcgttacaacctcatggtgctgtcccaggatggatctgtgcagtcagggtttctcgctgagggacatctggatggtcagcccttcctgcgctatgacaggcagaaacgcagggcaaagccccagggacagtgggcagaagatgtcctgggagctaagacctgggacacagagaccgaggacttgacagagaatgggcaagacctcaggaggaccctgactcatatcaaggaccagaaaggagtgccccagtcctccagagctcagaccttggctatgaacgtcacaaatttctggaaggaagatgccatgaagaccaagacacactatcgcgctatgcaggcagactgcctgcagaaactacagcgatatctgaaatccggggtggccatcaggagaacagtgccccccatggtgaatgtcacctgcagcgaggtctcagagggcaacatcaccgtgacatgcagggcttccagcttctatccccggaatatcacactgacctggcgtcaggatggggtatctttgagccacaacacccagcagtggggggatgtcctgcctgatgggaatggaacctaccagacctgggtggccaccaggattcgccaaggagaggagcagaggttcacctgctacatggaacacagcgggaatcacggcactcaccctgtgccctctgggaaggcgctggtgcttcagagtcaacggacagactttccatatgtttctgctgctatgccatgttttgttattattattattctctgtgtcccttgttgcaagaagaaaacatcagcggcagagggtccagagcttgtgagcctgcaggtcctggatcaacacccagttgggacaggagaccacagggatgcagcacagctgggatttcagcctctgatgtcagctactgggtccactggttccactgagggcgcctagactctacagccaggcggccaggattcaactccctgcctggatctcaccagcactttccctctgtttcctgacctatgaaacagaaaataacatcacttatttattgttgttggatgctgcaaagtgttagtaggtatgaggtgtttgctgctctgccacgtagagagccagcaaagggatcatgaccaactcaacattccattggaggctatatgatcaaacagcaaattgtttatcatgaatgcaggatgtgggcaaactcacgactgctcctgccaacagaaggtttgctgagggcattcactccatggtgctcattggagttatctactgggtcatctagagcctattgtttgaggaatgcagtcttacaagcctactctggacccagcagctgactccttcttccacccctcttcttgctatctcctataccaataaatacgaagggctgtggaagatcagagcccttgttcacgagaagcaagaagccccctgaccccttgttccaaatatactcttttgtctttctctttattcccacgttcgccctttgttcagtccaatacagggttgtggggcccttaacagtgccatattaattggtatcattatttctgttgtttttgtttttgtttttgtttttgagacagagtctcactctgtcacccaggctgcagttcactggtgtgatctcagctcactgcaacctctgcctcccaggttcaagcacttctcgtacctcagactcccgaatagctgggattacagacaggcaccaccacacccagctaatttttgtattttttgtagagacgggatttcgccaagttgaccagcccagtttcaaactcctgacctcaggtgatctgcctgccttggcatcccaaagtgctgggattacaagaatgagccaccgtgcctggcctattttattatattgtaatatattttattatattagccaccatgcctgtcctattttcttatgttttaatatattttaatatattacatgtgcagtaattagattatcatgggtgaactttatgagtgagtatcttggtgatgactcctcctgaccagcccaggaccagctttcttgtcaccttgaggtcccctcgccccgtcacaccgttatgcattactctgtgtctactattatgtgtgcataatttataccgtaaatgtttactctttaaataga

SEQ ID NO: 153696 - DNA, 2346 bp, Homo sapiens; identical to SEQ ID NO: 153694
  Payload ID: 10222
  Gene Symbol: MICB
  Gene Name: MHC class I polypeptide-related sequence B
  ENST ID: ENST00000442104
  CDS Start-End: 109-1131

SEQ ID NO: 153697 - DNA, 2450 bp, Homo sapiens
  Payload ID: 10222
  Gene Symbol: MICB
  Gene Name: MHC class I polypeptide-related sequence B
  Uniprot ID: Q29980
  ENST ID: ENST00000443156
  CDS Start-End: 80-1231
aaatttcgacggggtcttctcaccggtttcattcagttggccactgctgagcagctgagaaggtggcgacgtaggggccatggggctgggccgggtcctgctgtttctggccgtcgccttcccttttgcacccccggcagccgccgctgagccccacagtcttcgttacaacctcatggtgctgtcccaggatggatctgtgcagtcagggtttctcgctgagggacatctggatggtcagcccttcctgcgctatgacaggcagaaacgcagggcaaagccccagggacagtgggcagaagatgtcctgggagctaagacctgggacacagagaccgaggacttgacagagaatgggcaagacctcaggaggaccctgactcatatcaaggaccagaaaggaggcttgcattccctccaggagattagggtctgtgagatccatgaagacagcagcaccaggggctcccggcatttctactacgatggggagctcttcctctcccaaaacctggagactcaagaatcgacagtgccccagtcctccagagctcagaccttggctatgaacgtcacaaatttctggaaggaagatgccatgaagaccaagacacactatcgcgctatgcaggcagactgcctgcagaaactacagcgatatctgaaatccggggtggccatcaggagaacagtgccccccatggtgaatgtcacctgcagcgaggtctcagagggcaacatcaccgtgacatgcagggcttccagcttctatccccggaatatcacactgacctggcgtcaggatggggtatctttgagccacaacacccagcagtggggggatgtcctgcctgatgggaatggaacctaccagacctgggtggccaccaggattcgccaaggagaggagcagaggttcacctgctacatggaacacagcgggaatcacggcactcaccctgtgccctctgggaaggcgctggtgcttcagagtcaacggacagactttccatatgtttctgctgctatgccatgttttgttattattattattctctgtgtcccttgttgcaagaagaaaacatcagcggcagagggtccagagcttgtgagcctgcaggtcctggatcaacacccagttgggacaggagaccacagggatgcagcacagctgggatttcagcctctgatgtcagctactgggtccactggttccactgagggcgcctagactctacagccaggcggccaggattcaactccctgcctggatctcaccagcactttccctctgtttcctgacctatgaaacagaaaataacatcacttatttattgttgttggatgctgcaaagtgttagtaggtatgaggtgtttgctgctctgccacgtagagagccagcaaagggatcatgaccaactcaacattccattggaggctatatgatcaaacagcaaattgtttatcatgaatgcaggatgtgggcaaactcacgactgctcctgccaacagaaggtttgctgagggcattcactccatggtgctcattggagttatctactgggtcatctagagcctattgtttgaggaatgcagtcttacaagcctactctggacccagcagctgactccttcttccacccctcttcttgctatctcctataccaataaatacgaagggctgtggaagatcagagcccttgttcacgagaagcaagaagccccctgaccccttgttccaaatatactcttttgtctttctctttattcccacgttcgccctttgttcagtccaatacagggttgtggggcccttaacagtgccatattaattggtatcattatttctgttgtttttgtttttgtttttgtttttgtttttgtttttgagacagagtctcactctgtcacccaggctgcagttcactggtgtgatctcagctcactgcaacctctgcctcccaggttcaagcacttctcgtacctcagactcccgaatagctgggattacagacaggcaccaccacacccagctaatttttgtattttttgtagagacggggtttcgccaagttgaccagcccagtttcaaactcctgacctcaggtgatctgcctgccttggcatcccaaagtgctgggattacaagaatgagccaccgtgcctggcctattttattatattgtaatatattttattatattagccaccatgcctgtcctattttcttatgttttaatatattttaatatattacatgtgcagtaattagattatcatgggtgaactttatgagtgagtatcttggtgatgactcctcctgaccagcccaggaccagctttcttgtcaccttgaggtcccctcgccccgtcacaccgttatgcattactctgtgtctactattatgtgtgcataatttataccgtaaatgtttactctttaaataga

SEQ ID NO: 153698 - DNA, 2295 bp, Homo sapiens
  Payload ID: 10222
  Gene Symbol: MICB
  Gene Name: MHC class I polypeptide-related sequence B
  ENST ID: ENST00000428059
  CDS Start-End: 1-1082
agccccacagtcttcgttacaacctcatggtgctgtcccaggatggatctgtgcagtcagggtttctcgctgagggacatctggatggtcagcccttcctgcgctatgacaggcagaaacgcagggcaaagccccagggacagtgggcagaagatgtcctgggagctaagacctgggacacagagaccgaggacttgacagagaatgggcaagacctcaggaggaccctgactcatatcaaggaccagaaaggaggcttgcattccctccaggagattagggtctgtgagatccatgaagacagcagcaccaggggctcccggcatttctactacgatggggagctcttcctctcccaaaacctggagactcaagaatcgacagtgccccagtcctccagagctcagaccttggctatgaacgtcacaaatttctggaaggaagatgccatgaagaccaagacacactatcgcgctatgcaggcagactgcctgcagaaactacagcgatatctgaaatccggggtggccatcaggagaacagtgccccccatggtgaatgtcacctgcagcgaggtctcagagggcaacatcaccgtgacatgcagggcttccagcttctatccccggaatatcacactgacctggcgtcaggatggggtatctttgagccacaacacccagcagtggggggatgtcctgcctgatgggaatggaacctaccagacctgggtggccaccaggattcgccaaggagaggagcagaggttcacctgctacatggaacacagcgggaatcacggcactcaccctgtgccctctgggaaggcgctggtgcttcagagtcaacggacagactttccatatgtttctgctgctatgccatgttttgttattattattattctctgtgtcccttgttgcaagaagaaaacatcagcggcagagggtccagagcttgtgagcctgcaggtcctggatcaacacccagttgggacaggagaccacagggatgcagcacagctgggatttcagcctctgatgtcagctactgggtccactggttccactgagggcgcctagactctacagccaggcggccaggattcaactccctgcctggatctcaccagcactttccctctgtttcctgacctatgaaacagaaaataacatcacttatttattgttgttggatgctgcaaagtgttagtaggtatgaggtgtttgctgctctgccacgtagagagccagcaaagggatcatgaccaactcaacattccattggaggctatatgatcaaacagcaaattgtttatcatgaatgcaggatgtgggcaaactcacgactgctcctgccaacagaaggtttgctgagggcattcactccatggtgctcattggagttatctactgggtcatctagagcctattgtttgaggaatgcagtcttacaagcctactctggacccagcagctgactccttcttccacccctcttcttgctatctcctataccaataaatacgaagggctgtggaagatcagagcccttgttcacgagaagcaagaagccccctgaccccttgttccaaatatactcttttgtctttctctttattcccacgttcgccctttgttcagtccaatacagggttgtggggcccttaacagtgccatattaattggtatcattatttctgttgtttttgtttttgtttttgtttttgtttttgagacagagtctcactctgtcacccaggctgcagttcactggtgtgatctcagctcactgcaacctctgcctcccaggttcaagcacttctcgtacctcagactcccgaatagctgggattacagacaggcaccaccacacccagctaatttttgtattttttgtagagacggggtttcgccaagttgaccagcccagtttcaaactcctgacctcaggtgatctgcctgccttggcatcccaaagtgctgggattacaagaatgagccaccgtgcctggcctattttattatattgtaatatattttattatattagccaccatgcctgtcctattttcttatgttttaatatattttaatatattacatgtgcagtaattagattatcatgggtgaactttatgagtgagtatcttggtgatgactcctcctgaccagcccaggaccagctttcttgtcaccttgaggtcccctcgccccgtcacaccgttatgcattactctgtgtctactattatgtgtgcataatttataccgtaaatgtttactctttaaataga

SEQ ID NO: 153699 - DNA, 2344 bp, Homo sapiens
  Payload ID: 10222
  Gene Symbol: MICB
  Gene Name: MHC class I polypeptide-related sequence B
  Uniprot ID: Q29980
  ENST ID: ENST00000438954
  CDS Start-End: 109-1131
agcggtcgctgagcggggcgcaggtgactaaatttcgacggggtcttctcaccggtttcattcagttggccactgctgagcagctgagaaggtggcgacgtaggggccatggggctgggccgggtcctgctgtttctggccgtcgccttcccttttgcacccccggcagccgccgctgagccccacagtcttcgttacaacctcatggtgctgtcccaggatggatctgtgcagtcagggtttctcgctgagggacatctggatggtcagcccttcctgcgctatgacaggcagaaacgcagggcaaagccccagggacagtgggcagaagatgtcctgggagctgagacctgggacacagagaccgaggacttgacagagaatgggcaagacctcaggaggaccctgactcatatcaaggaccagaaaggagtgccccagtcctccagagctcagaccttggctatgaacgtcacaaatttctggaaggaagatgccatgaagaccaagacacactatcgcgctatgcaggcagactgcctgcagaaactacagcgatatctgaaatccggggtggccatcaggagaacagtgccccccatggtgaatgtcacctgcagcgaggtctcagagggcaacatcaccgtgacatgcagggcttccagcttctatccccggaatatcacactgacctggcgtcaggatggggtatctttgagccacaacacccagcagtggggggatgtcctgcctgatgggaatggaacctaccagacctgggtggccaccaggattcgccaaggagaggagcagaggttcacctgctacatggaacacagcgggaatcacggcactcaccctgtgccctctgggaaggcgctggtgcttcagagtcaacggacagactttccatatgtttctgctgctatgccatgttttgttattattattattctctgtgtcccttgttgcaagaagaaaacatcagcggcagagggtccagagcttgtgagcctgcaggtcctggatcaacacccagttgggacaggagaccacagggatgcagcacagctgggatttcagcctctgatgtcagctactgggtccactggttccactgagggcgcctagactctacagccaggcggccaggattcaactccctgcctggatctcaccagcactttccctctgtttcctgacctatgaaacagaaaataacatcacttatttattgttgttggatgctgcaaagtgttagtaggtatgaggtgtttgctgctctgccacgtagagagccagcaaagggatcatgaccaactcaacattccattggaggctatatgatcaaacagcaaattgtttatcatgaatgcaggatgtgggcaaactcacgactgctcctgccaacagaaggtttgctgagggcattcactccatggtgctcattggagttatctactgggtcatctagagcctattgtttgaggaatgcagtcttacaagcctactctggacccagcagctgactccttcttccacccctcttcttgctatctcctataccaataaatacgaagggctgtggaagatcagagcccttgttcacgagaagcaagaagccccctgaccccttgttccaaatatactcttttgtctttctctttattcccacgttcgccctttgttcagtccaatacagggttgtggggcccttaacagtgccatattaattggtatcattatttctgttgtttttgtttttgtttttgtttttgtttttgagacagagtctcactctgtcacccaggctgcagttcactggtgtgatctcagctcactgcaacctctgcctcccaggttcaagcacttctcgtacctcagactcccgaatagctgggattacagacaggcaccaccacacccagctaatttttgtattttttgtagagacggggtttcgccaagttgaccagcccagtttcaaactcctgacctcaggtgatctgcctgccttggcatcccaaagtgctgggattacaagaatgagccaccgtgcctggcctattttattatattgtaatatattttattatattagccaccatgcctgtcctattttcttatgttttaatatattttaatatattacatgtgcagtaattagattatcatgggtgaactttatgagtgagtatcttggtgatgactcctcctgaccagcccaggaccagctttcttgtcaccttgaggtcccctcgccccgtcacaccgttatgcattactctgtgtctactattatgtgtgcataatttataccgtaaatgtttactctttaaataga

SEQ ID NO: 153700 - DNA, 2438 bp, Homo sapiens
  Payload ID: 10222
  Gene Symbol: MICB
  Gene Name: MHC class I polypeptide-related sequence B
  Uniprot ID: Q29980
  ENST ID: ENST00000428416
  CDS Start-End: 80-1231
aaatttcgacggggtcttctcaccggtttcattcagttggccactgctgagcagctgagaaggtggcgacgtaggggccatggggctgggccgggtcctgctgtttctggccgtcgccttcccttttgcacccccggcagccgccgctgagccccacagtcttcgttacaacctcatggtgctgtcccaggatggatctgtgcagtcagggtttctcgctgagggacatctggatggtcagcccttcctgcgctatgacaggcagaaacgcagggcaaagccccagggacagtgggcagaagatgtcctgggagctaagacctgggacacagagaccgaggacttgacagagaatgggcaagacctcaggaggaccctgactcatatcaaggaccagaaaggaggcttgcattccctccaggagattagggtctgtgagatccatgaagacagcagcaccaggggctcccggcatttctactacgatggggagctcttcctctcccaaaacctggagactcaagaatcgacagtgccccagtcctccagagctcagaccttggctatgaacgtcacaaatttctggaaggaagatgccatgaagaccaagacacactatcgcgctatgcaggcagactgcctgcagaaactacagcgatatctgaaatccggggtggccatcaggagaacagtgccccccatggtgaatgtcacctgcagcgaggtctcagagggcaacatcaccgtgacatgcagggcttccagcttctatccccggaatatcacactgacctggcgtcaggatggggtatctttgagccacaacacccagcagtggggggatgtcctgcctgatgggaatggaacctaccagacctgggtggccaccaggattcgccaaggagaggagcagaggttcacctgctacatggaacacagcgggaatcacggcactcaccctgtgccctctgggaaggcgctggtgcttcagagtcaacggacagactttccatatgtttctgctgctatgccatgttttgttattattattattctctgtgtcccttgttgcaagaagaaaacatcagcggcagagggtccagagcttgtgagcctgcaggtcctggatcaacacccagttgggacaggagaccacagggatgcagcacagctgggatttcagcctctgatgtcagctactgggtccactggttccactgagggcgcctagactctacagccaggcggccaggattcaactccctgcctggatctcaccagcactttccctctgtttcctgacctatgaaacagaaaataacatcacttatttattgttgttggatgctgcaaagtgttagtaggtatgaggtgtttgctgctctgccacgtagagagccagcaaagggatcatgaccaactcaacattccattggaggctatatgatcaaacagcaaattgtttatcatgaatgcaggatgtgggcaaactcacgactgctcctgccaacagaaggtttgctgagggcattcactccatggtgctcattggagttatctactgggtcatctagagcctattgtttgaggaatgcagtcttacaagcctactctggacccagcagctgactccttcttccacccctcttcttgctatctcctataccaataaatacgaagggctgtggaagatcagagcccttgttcacgagaagcaagaagccccctgaccccttgttccaaatatactcttttgtctttctctttattcccacgttcgccctttgttcagtccaatacagggttgtggggcccttaacagtgccatattaattggtatcattatttctgttgtttttgtttttgtttttgtttttgagacagagtctcactctgtcacccaggctgcagttcactggtgtgatctcagctcactgcaacctctgcctcccaggttcaagcacttctcgtacctcagactcccgaatagctgggattacagacaggcaccaccacacccagctaatttttgtattttttgtagagacgggatttcgccaagttgaccagcccagtttcaaactcctgacctcaggtgatctgcctgccttggcatcccaaagtgctgggattacaagaatgagccaccgtgcctggcctattttattatattgtaatatattttattatattagccaccatgcctgtcctattttcttatgttttaatatattttaatatattacatgtgcagtaattagattatcatgggtgaactttatgagtgagtatcttggtgatgactcctcctgaccagcccaggaccagctttcttgtcaccttgaggtcccctcgccccgtcacaccgttatgcattactctgtgtctactattatgtgtgcataatttataccgtaaatgtttactctttaaataga

SEQ ID NO: 153701 - DNA, 2346 bp, Homo sapiens
  Payload ID: 10222
  Gene Symbol: MICB
  Gene Name: MHC class I polypeptide-related sequence B
  ENST ID: ENST00000437651
  CDS Start-End: 109-1131
agcggtcgctgagcggggcgcaggtgactaaatttccacggggtcttctcaccgttttcattcagttggccactgctgagcagctgagaaggtggcgacgtaggggccatggggctgggccgggtcctgctgtttctggccgtcgccttcccttttgcacccccggcagccgccgctgagccccacagtcttcgttacaacctcatggtgctgtcccaggatggatctgtgcagtcagggtttctcgctgagggacatctggatggtcagcccttcctgcgctatgacaggcagaaacgcagggcaaagccccagggacagtgggcagaagatgtcctgggagctaagacctgggacacagagaccgaggacttgacagagaatgggcaagacctcaggaggaccctgactcatatcaaggaccagaaaggagtgccccagtcctccagagctcagaccttggctatgaacgtcacaaatttctggaaggaagatgccatgaagaccaagacacactatcgcgctatgcaggcagactgcctgcagaaactacagcgatatctgaaatccggggtggccatcaggagaacagtgccccccatggtgaatgtcatctgcagcgaggtctcagagggcaacatcaccgtgacatgcagggcttccagcttctatccccggaatatcacactgacctggcgtcaggatggggtatctttgagccacaacacccagcagtggggggatgtcctgcctgatgggaatggaacctaccagacctgggtggccaccaggattcgccaaggagaggagcagaggttcacctgctacatggaacacagcgggaatcacggcactcaccctgtgccctctgggaaggcgctggtgcttcagagtcaacggacagactttccatatgtttctgctgctatgccatgttttgttattattattattctctgtgtcccttgttgcaagaagaaaacatcagcggcagagggtccagagcttgtgagcctgcaggtcctggatcaacacccagttgggacaggagaccacagggatgcagcacagctgggatttcagcctctgatgtcagctactgggtccactggttccactgagggcacctagactctacagccaggcggccaggattcaactccctgcctggatctcaccagcactttccctctgtttcctgacctatgaaacagagaaaataacatcacttatttattgttgttggatgctgcaaagtgttagtaggtatgaggtgtttgctgctctgccacgtagagagccagcaaagggatcatgaccaactcaacattccattggaggctatatgatcaaacagcaaattgtttatcatgaatgcaggatgtgggcaaactcacgactgctcctgccaacagaaggtttgctgagggcattcactccatggtgctcattggagttatctactgggtcatctagagcctattgtttgaggaatgcagtcttacaagcctactctggacccagcagctgactccttcttccacccctcttcttgctatctcctataccaataaatacgaagggctgtggaagatcagagcccttgttcacgagaagcaagaagccccctgaccccttgttccaaatatactcttttgtctttctctttattcccacgttcgccctttgttcagtccaatacagggttgtggggcccttaacagtgccatattaattggtatcattatttctgttgtttttgtttttgtttttgtttttgtttttgagacagagtctcactctgtcacccaggctgcagttcactggtgtgatctcagctcactgcaacctctgcctcccaggttcaagcacttctcgtacctcagactcccgaatagctgggattacagacaggcaccaccacacccagctaatttttgtattttttgtagagacggggtttcgccaagttgaccagcccagtttcaaactcctgacctcaggtgatctgcctgccttggcatcccaaagtgctgggattacaagaatgagccaccgtgcctggcctattttattatattgtaatatattttattatattagccaccatgcctgtcctattttcttatgttttaatatattttaatatattacatgtgcagtaattagattatcatgggtgaactttatgagtgagtatcttggtgatgactcctcctgaccagcccaggaccagctttcttgtcaccttgaggtcccctcgccccgtcacaccgttatgcattactctgtgtctactattatgtgtgcataatttataccgtaaatgtttactctttaaataga

SEQ ID NO: 153702 - DNA, 2444 bp, Homo sapiens
  Payload ID: 10222
  Gene Symbol: MICB
  Gene Name: MHC class I polypeptide-related sequence B
  Uniprot ID: Q29980
  ENST ID: ENST00000436655
  CDS Start-End: 80-1231
aaatttcgacggggtcttctcaccggtttcattcagttggccactgctgagcagctgagaaggtggcgacgtaggggccatggggctgggccgggtcctgctgtttctggccgtcgccttcccttttgcacccccggcagccgccgctgagccccacagtcttcgttacaacctcatggtgctgtcccaggatggatctgtgcagtcagggtttctcgctgagggacatctggatggtcagcccttcctgcgctatgacaggcagaaacgcagggcaaagccccagggacagtgggcagaagatgtcctgggagctgagacctgggacacagagaccgaggacttgacagagaatgggcaagacctcaggaggaccctgactcatatcaaggaccagaaaggaggcttgcattccctccaggagattagggtctgtgagatccatgaagacagcagcaccaggggctcccggcatttctactacaatggggagctcttcctctcccaaaacctggagactcaagaatcgacagtgccccagtcctccagagctcagaccttggctatgaacgtcacaaatttctggaaggaagatgccatgaagaccaagacacactatcgcgctatgcaggcagactgcctgcagaaactacagcgatatctgaaatccggggtggccatcaggagaacagtgccccccatggtgaatgtcacctgcagcgaggtctcagagggcaacatcaccgtgacatgcagggcttccagcttctatccccggaatatcacactgacctggcgtcaggatggggtatctttgagccacaacacccagcagtggggggatgtcctgcctgatgggaatggaacctaccagacctgggtggccaccaggattcgccaaggagaggagcagaggttcacctgctacatggaacacagcgggaatcacggcactcaccctgtgccctctgggaaggcgctggtgcttcagagtcaacggacagactttccatatgtttctgctgctatgccatgttttgttattattattattctctgtgtcccttgttgcaagaagaaaacatcagcggcagagggtccagagcttgtgagcctgcaggtcctggatcaacacccagttgggacaggagaccacagggatgcagcacagctgggatttcagcctctgatgtcagctactgggtccactggttccactgagggcgcctagactctacagccaggcggccaggattcaactccctgcctggatctcaccagcactttccctctgtttcctgacctatgaaacagaaaataacatcacttatttattgttgttggatgctgcaaagtgttagtaggtatgaggtgtttgctgctctgccacgtagagagccagcaaagggatcatgaccaactcaacattccattggaggctatatgatcaaacagcaaattgtttatcatgaatgcaggatgtgggcaaactcacgactgctcctgccaacagaaggtttgctgagggcattcactccatggtgctcattggagttatctactgggtcatctagagcctattgtttgaggaatgcagtcttacaagcctactctggacccagcagctgactccttcttccacccctcttcttgctatctcctataccaataaatacgaagggctgtggaagatcagagcccttgttcacgagaagcaagaagccccctgaccccttgttccaaatatactcttttgtctttctctttattcccacgttcgccctttgttcagtccaatacagggttgtggggcccttaacagtgccatattaattggtatcattatttctgttgtttttgtttttgtttttgtttttgtttttgagacagagtctcactctgtcacccaggctgcagttcactggtgtgatctcagctcactgcaacctctgcctcccaggttcaagcacttctcgtacctcagactcccgaatagctgggattacagacaggcaccaccacacccagctaatttttgtattttttgtagagacggggtttcgccaagttgaccagcccagtttcaaactcctgacctcaggtgatctgcctgccttggcatcccaaagtgctgggattacaagaatgagccaccgtgcctggcctattttattatattgtaatatattttattatattagccaccatgcctgtcctattttcttatgttttaatatattttaatatattacatgtgcagtaattagattatcatgggtgaactttatgagtgagtatcttggtgatgactcctcctgaccagcccaggaccagctttcttgtcaccttgaggtcccctcgccccgtcacaccgttatgcattactctgtgtctactattatgtgtgcataatttataccgtaaatgtttactctttaaataga

SEQ ID NO: 153703 - DNA, 2166 bp, Homo sapiens
  Payload ID: 10222
  Gene Symbol: MICB
  Gene Name: MHC class I polypeptide-related sequence B
  ENST ID: ENST00000456351
  CDS Start-End: 1-953
agccccacagtcttcgttacaacctcatggtgctgtcccaggatggatctgtgcagtcagggtttctcgctgagggacatctggatggtcagcccttcctgcgctatgacaggcagaaacgcagggcaaagccccagggacagtgggcagaagatgtcctgggagctaagacctgggacacagagaccgaggacttgacagagaatgggcaagacctcaggaggaccctgactcatatcaaggaccagaaaggagtgccccagtcctccagagctcagaccttggctatgaacgtcacaaatttctggaaggaagatgccatgaagaccaagacacactatcgcgctatgcaggcagactgcctgcagaaactacagcgatatctgaaatccggggtggccatcaggagaacagtgccccccatggtgaatgtcacctgcagcgaggtctcagagggcaacatcaccgtgacatgcagggcttccagcttctatccccggaatatcacactgacctggcgtcaggatggggtatctttgagccacaacacccagcagtggggggatgtcctgcctgatgggaatggaacctaccagacctgggtggccaccaggattcgccaaggagaggagcagaggttcacctgctacatggaacacagcgggaatcacggcactcaccctgtgccctctgggaaggcgctggtgcttcagagtcaacggacagactttccatatgtttctgctgctatgccatgttttgttattattattattctctgtgtcccttgttgcaagaagaaaacatcagcggcagagggtccagagcttgtgagcctgcaggtcctggatcaacacccagttgggacaggagaccacagggatgcagcacagctgggatttcagcctctgatgtcagctactgggtccactggttccactgagggcgcctagactctacagccaggcggccaggattcaactccctgcctggatctcaccagcactttccctctgtttcctgacctatgaaacagaaaataacatcacttatttattgttgttggatgctgcaaagtgttagtaggtatgaggtgtttgctgctctgccacgtagagagccagcaaagggatcatgaccaactcaacattccattggaggctatatgatcaaacagcaaattgtttatcatgaatgcaggatgtgggcaaactcacgactgctcctgccaacagaaggtttgctgagggcattcactccatggtgctcattggagttatctactgggtcatctagagcctattgtttgaggaatgcagtcttacaagcctactctggacccagcagctgactccttcttccacccctcttcttgctatctcctataccaataaatacgaagggctgtggaagatcagagcccttgttcacgagaagcaagaagccccctgaccccttgttccaaatatactcttttgtctttctctttattcccacgttcgccctttgttcagtccaatacagggttgtggggcccttaacagtgccatattaattggtatcattatttctgttgtttttgtttttgtttttgtttttgtttttgagacagagtctcactctgtcacccaggctgcagttcactggtgtgatctcagctcactgcaacctctgcctcccaggttcaagcacttctcgtacctcagactcccgaatagctgggattacagacaggcaccaccacacccagctaatttttgtattttttgtagagacggggtttcgccaagttgaccagcccagtttcaaactcctgacctcaggtgatctgcctgccttggcatcccaaagtgctgggattacaagaatgagccaccgtgcctggcctattttattatattgtaatatattttattatattagccaccatgcctgtcctattttcttatgttttaatatattttaatatattacatgtgcagtaattagattatcatgggtgaactttatgagtgagtatcttggtgatgactcctcctgaccagcccaggaccagctttcttgtcaccttgaggtcccctcgccccgtcacaccgttatgcattactctgtgtctactattatgtgtgcataatttataccgtaaatgtttactctttaaataga

SEQ ID NO: 153704 - DNA, 2444 bp, Homo sapiens
  Payload ID: 10222
  Gene Symbol: MICB
  Gene Name: MHC class I polypeptide-related sequence B
  ENST ID: ENST00000458032
  CDS Start-End: 80-1231
aaatttcgacggggtcttctcaccggtttcattcagttggccactgctgagcagctgagaaggtggcgacgtaggggccatggggctgggccgggtcctgctgtttctggccgtcgccttcccttttgcacccccggcagccgccgctgagccccacagtcttcgttacaacctcatggtgctgtcccaggatggatctgtgcagtcagggtttctcgctgagggacatctggatggtcagcccttcctgcgctatgacaggcagaaacgcagggcaaagccccagggacagtgggcagaagatgtcctgggagctgagacctgggacacagagaccgaggacttgacagagaatgggcaagacctcaggaggaccctgactcatatcaaggaccagaaaggaggcttgcattccctccaggagattagggtctgtgagatgcatgaagacagcagcaccaggggctcccggcatttctactacaatggggagctcttcctctcccaaaacctggagactcaagaatcgacagtgccccagtcctccagagctcagaccttggctatgaacgtcacaaatttctggaaggaagatgccatgaagaccaagacacactatcgcgctatgcaggcagactgcctgcagaaactacagcgatatctgaaatccggggtggccatcaggagaacagtgccccccatggtgaatgtcacctgcagcgaggtctcagagggcaacatcaccgtgacatgcagggcttccagcttctatccccggaatatcacactgacctggcgtcaggatggggtatctttgagccacaacacccagcagtggggggatgtcctgcctgatgggaatggaacctaccagacctgggtggccaccaggattcgccaaggagaggagcagaggttcacctgctacatggaacacagcgggaatcacggcactcaccctgtgccctctgggaaggcgctggtgcttcagagtcaacggacagactttccatatgtttctgctgctatgccatgttttgttattattattattctctgtgtcccttgttgcaagaagaaaacatcagcggcagagggtccagagcttgtgagcctgcaggtcctggatcaacacccagttgggacaggagaccacagggatgcagcacagctgggatttcagcctctgatgtcagctactgggtccactggttccactgagggcgcctagactctacagccaggcggccaggattcaactccctgcctggatctcaccagcactttccctctgtttcctgacctatgaaacagaaaataacatcacttatttattgttgttggatgctgcaaagtgttagtaggtatgaggtgtttgctgctctgccacgtagagagccagcaaagggatcatgaccaactcaacattccattggaggctatatgatcaaacagcaaattgtttatcatgaatgcaggatgtgggcaaactcacgactgctcctgccaacagaaggtttgctgagggcattcactccatggtgctcattggagttatctactgggtcatctagagcctattgtttgaggaatgcagtcttacaagcctactctggacccagcagctgactccttcttccacccctcttcttgctatctcctataccaataaatacgaagggctgtggaagatcagagcccttgttcacgagaagcaagaagccccctgaccccttgttccaaatatactcttttgtctttctctttattcccacgttcgccctttgttcagtccaatacagggttgtggggcccttaacagtgccatattaattggtatcattatttctgttgtttttgtttttgtttttgtttttgtttttgagacagagtctcactctgtcacccaggctgcagttcactggtgtgatctcagctcactgcaacctctgcctcccaggttcaagcacttctcgtacctcagactcccgaatagctgggattacagacaggcaccaccacacccagctaatttttgtattttttgtagagacggggtttcgccaagttgaccagcccagtttcaaactcctgacctcaggtgatctgcctgccttggcatcccaaagtgctgggattacaagaatgagccaccgtgcctggcctattttattatattgtaatatattttattatattagccaccatgcctgtcctattttcttatgttttaatatattttaatatattacatgtgcagtaattagattatcatgggtgaactttatgagtgagtatcttggtgatgactcctcctgaccagcccaggaccagctttcttgtcaccttgaggtcccctcgccccgtcacaccgttatgcattactctgtgtctactattatgtgtgcataatttataccgtaaatgtttactctttaaataga

SEQ ID NO: 153705 - DNA, 2446 bp, Homo sapiens; identical to SEQ ID NO: 153692
  Payload ID: 10222
  Gene Symbol: MICB
  Gene Name: MHC class I polypeptide-related sequence B
  ENST ID: ENST00000451603
  CDS Start-End: 80-1231

SEQ ID NO: 153706 - DNA, 2350 bp, Homo sapiens
  Payload ID: 10222
  Gene Symbol: MICB
  Gene Name: MHC class I polypeptide-related sequence B
  ENST ID: ENST00000451789
  CDS Start-End: 109-1131
agcggtcgctgagcggggcgcaggtgactaaatttcgacggggtcttctcaccggtttcattcagttggccactgctgagcagctgagaaggtggcgacgtaggggccatggggctgggccgggtcctgctgtttctggccgtcgccttcccttttgcacccccggcagccgccgctgagccccacagtcttcgttacaacctcatggtgctgtcccaggatggatctgtgcagtcagggtttctcgctgagggacatctggatggtcagcccttcctgcgctatgacaggcagaaacgcagggcaaagccccagggacagtgggcagaagatgtcctgggagctaagacctgggacacagagaccgaggacttgacagagaatgggcaagacctcaggaggaccctgactcatatcaaggaccagaaaggagtgccccagtcctccagagctcagaccttggctatgaacgtcacaaatttctggaaggaagatgccatgaagaccaagacacactatcgcgctatgcaggcagactgcctgcagaaactacagcgatatctgaaatccggggtggccatcaggagaacagtgccccccatggtgaatgtcacctgcagcgaggtctcagagggcaacatcaccgtgacatgcagggcttccagcttctatccccggaatatcacactgacctggcgtcaggatggggtatctttgagccacaacacccagcagtggggggatgtcctgcctgatgggaatggaacctaccagacctgggtggccaccaggattcgccaaggagaggagcagaggttcacctgctacatggaacacagcgggaatcacggcactcaccctgtgccctctgggaaggcgctggtgcttcagagtcaacggacagactttccatatgtttctgctgctatgccatgttttgttattattattattctctgtgtcccttgttgcaagaagaaaacatcagcggcagagggtccagagcttgtgagcctgcaggtcctggatcaacacccagttgggacaggagaccacagggatgcagcacagctgggatttcagcctctgatgtcagctactgggtccactggttccactgagggcgcctagactctacagccaggcggccaggattcaactccctgcctggatctcaccagcactttccctctgtttcctgacctatgaaacagaaaataacatcacttatttattgttgttggatgctgcaaagtgttagtaggtatgaggtgtttgctgctctgccacgtagagagccagcaaagggatcatgaccaactcaacattccattggaggctatatgatcaaacagcaaattgtttatcatgaatgcaggatgtgggcaaactcacgactgctcctgccaacagaaggtttgctgagggcattcactccatggtgctcattggagttatctactgggtcatctagagcctattgtttgaggaatgcagtcttacaagcctactctggacccagcagctgactccttcttccacccctcttcttgctatctcctataccaataaatacgaagggctgtggaagatcagagcccttgttcacgagaagcaagaagccccctgaccccttgttccaaatatactcttttgtctttctctttattcccacgttcgccctttgttcagtccaatacagggttgtggggcccttaacagtgccatattaattggtatcattatttctgttgtttttgtttttgtttttgtttttgtttttgtttttgagacagagtctcactctgtcacccaggctgcagttcactggtgtgatctcagctcactgcaacctctgcctcccaggttcaagcacttctcgtacctcagactcccgaatagctgggattacagacaggcaccaccacacccagctaatttttgtattttttgtagagacggggtttcgccaagttgaccagcccagtttcaaactcctgacctcaggtgatctgcctgccttggcatcccaaagtgctgggattacaagaatgagccaccgtgcctggcctattttattatattgtaatatattttattatattagccaccatgcctgtcctattttcttatgttttaatatattttaatatattacatgtgcagtaattagattatcatgggtgaactttatgagtgagtatcttggtgatgactcctcctgaccagcccaggaccagctttcttgtcaccttgaggtcccctcgccccgtcacaccgttatgcattactctgtgtctactattatgtgtgcataatttataccgtaaatgtttactctttaaataga

SEQ ID NO: 153707 - DNA, 2344 bp, Homo sapiens; identical to SEQ ID NO: 153699
  Payload ID: 10222
  Gene Symbol: MICB
  Gene Name: MHC class I polypeptide-related sequence B
  Uniprot ID: Q29980
  ENST ID: ENST00000436531
  CDS Start-End: 109-1131

SEQ ID NO: 153708 - DNA, 2411 bp, Homo sapiens
  Payload ID: 10222
  Gene Symbol: MICB
  Gene Name: MHC class I polypeptide-related sequence B
  ENST ID: ENST00000538442
  CDS Start-End: 142-1197
gaattttgtgagcgaccgcgctgggccgtttctctttcttttccggaccctgcagtggcgcctaaagtctgcgaggaggaagtcgcctctgtgctcgtgagtccagggatctaagagccccacagtcttcgttacaacctcatggtgctgtcccaggatggatctgtgcagtcagggtttctcgctgagggacatctggatggtcagcccttcctgcgctatgacaggcagaaacgcagggcaaagccccagggacagtgggcagaaaatgtcctgggagctaagacctgggacacagagaccgaggacttgacagagaatgggcaagacctcaggaggaccctgactcatatcaaggaccagaaaggaggcttgcattccctccaggagattagggtctgtgagatccatgaagacagcagcaccaggggctcccggcatttctactacgatggggagctcttcctctcccaaaacctggagactcaagaatcgacagtgccccagtcctccagagctcagaccttggctatgaacgtcacaaatttctggaaggaagatgccatgaagaccaagacacactatcgcgctatgcaggcagactgcctgcagaaactacagcgatatctgaaatccggggtggccatcaggagaacagtgccccccatggtgaatgtcacctgcagcgaggtctcagagggcaacatcaccgtgacatgcagggcttccagcttctatccccggaatatcacactgacctggcgtcaggatggggtatctttgagccacaacacccagcagtggggggatgtcctgcctgatgggaatggaacctaccagacctgggtggccaccaggattcgccaaggagaggagcagaggttcacctgctacatggaacacagcgggaatcacggcactcaccctgtgccctctgggaaggcgctggtgcttcagagtcaacggacagactttccatatgtttctgctgctatgccatgttttgttattattattattctctgtgtcccttgttgcaagaagaaaacatcagcggcagagggtccagagcttgtgagcctgcaggtcctggatcaacacccagttgggacaggagaccacagggatgcagcacagctgggatttcagcctctgatgtcagctactgggtccactggttccactgagggcacctagactctacagccaggcggccaggattcaactccctgcctggatctcaccagcactttccctctgtttcctgacctatgaaacagagaaaataacatcacttatttattgttgttggatgctgcaaagtgttagtaggtatgaggtgtttgctgctctgccacgtagagagccagcaaagggatcatgaccaactcaacattccattggaggctatatgatcaaacagcaaattgtttatcatgaatgcaggatgtgggcaaactcacgactgctcctgccaacagaaggtttgctgagggcattcactccatggtgctcattggagttatctactgggtcatctagagcctattgtttgaggaatgcagtcttacaagcctactctggacccagcagctgactccttcttccacccctcttcttgctatctcctataccaataaatacgaagggctgtggaagatcagagcccttgttcacgagaagcaagaagccccctgaccccttgttccaaatatactcttttgtctttctctttattcccacgttcgccctttgttcagtccaatacagggttgtggggcccttaacagtgccatattaattggtatcattatttctgttgtttttgtttttgtttttgtttttgtttttgagacagagtctcactctgtcacccaggctgcagttcactggtgtgatctcagctcactgcaacctctgcctcccaggttcaagcacttctcgtacctcagactcccgaatagctgggattacagacaggcaccaccacacccagctaatttttgtattttttgtagagacggggtttcgccaagttgaccagcccagtttcaaactcctgacctcaggtgatctgcctgccttggcatcccaaagtgctgggattacaagaatgagccaccgtgcctggcctattttattatattgtaatatattttattatattagccaccatgcctgtcctattttcttatgttttaatatattttaatatattacatgtgcagtaattagattatcatgggtgaactttatgagtgagtatcttggtgatgactcctcctgaccagcccaggaccagctttcttgtcaccttgaggtcccctcgccccgtcacaccgttatgcattactctgtgtctactattatgtgtgcataatttataccgtaaatgtttactctttaaatag

SEQ ID NO: 153709 - DNA, 2411 bp, Homo sapiens; identical to SEQ ID NO: 153708
  Payload ID: 10222
  Gene Symbol: MICB
  Gene Name: MHC class I polypeptide-related sequence B
  ENST ID: ENST00000619506
  CDS Start-End: 142-1197

SEQ ID NO: 153710 - DNA, 2363 bp, Homo sapiens
  Payload ID: 10222
  Gene Symbol: MICB
  Gene Name: MHC class I polypeptide-related sequence B
  ENST ID: ENST00000614843
  CDS Start-End: 6-1157
gggccatggggctgggcccggtcttcctgcttctggctggcatcttcccttttgcacctccgggagctgctgctgagccccacagtcttcgttacaacctcatggtgctgtcccaggatggatctgtgcagtcagggtttctcgctgagggacatctggatggtcagcccttcctgcgctatgacaggcagaaacgcagggcaaagccccagggacagtgggcagaagatgtcctgggagctaagacctgggacacagagaccgaggacttgacagagaatgggcaagacctcaggaggaccctgactcatatcaaggaccagaaaggaggcttgcattccctccaggagattagggtctgtgagatccatgaagacagcagcaccaggggctcccggcatttctactacgatggggagctcttcctctcccaaaacctggagactcaagaatcgacagtgccccagtcctccagagctcagaccttggctatgaacgtcacaaatttctggaaggaagatgccatgaagaccaagacacactatcgcgctatgcaggcagactgcctgcagaaactacagcgatatctgaaatccggggtggccatcaggagaacagtgccccccatggtgaatgtcacctgcagcgaggtctcagagggcaacatcaccgtgacatgcagggcttccagcttctatccccggaatatcacactgacctggcgtcaggatggggtatctttgagccacaacacccagcagtggggggatgtcctgcctgatgggaatggaacctaccagacctgggtggccaccaggattcgccaaggagaggagcagaggttcacctgctacatggaacacagcgggaatcacggcactcaccctgtgccctctgggaaggcgctggtgcttcagagtcaacggacagactttccatatgtttctgctgctatgccatgttttgttattattattattctctgtgtcccttgttgcaagaagaaaacatcagcggcagagggtccagagcttgtgagcctgcaggtcctggatcaacacccagttgggacaggagaccacagggatgcagcacagctgggatttcagcctctgatgtcagctactgggtccactggttccactgagggcgcctagactctacagccaggcggccaggattcaactccctgcctggatctcaccagcactttccctctgtttcctgacctatgaaacagaaaataacatcacttatttattgttgttggatgctgcaaagtgttagtaggtatgaggtgtttgctgctctgccacgtagagagccagcaaagggatcatgaccaactcaacattccattggaggctatatgatcaaacagcaaattgtttatcatgaatgcaggatgtgggcaaactcacgactgctcctgccaacagaaggtttgctgagggcattcactccatggtgctcattggagttatctactgggtcatctagagcctattgtttgaggaatgcagtcttacaagcctactctggacccagcagctgactccttcttccacccctcttcttgctatctcctataccaataaatacgaagggctgtggaagatcagagcccttgttcacgagaagcaagaagccccctgaccccttgttccaaatatactcttttgtctttctctttattcccacgttcgccctttgttcagtccaatacagggttgtggggcccttaacagtgccatattaattggtatcattatttctgttgtttttgtttttgtttttgtttttgtttttgagacagagtctcactctgtcacccaggctgcagttcactggtgtgatctcagctcactgcaacctctgcctcccaggttcaagcacttctcgtacctcagactcccgaatagctgggattacagacaggcaccaccacacccagctaatttttgtattttttgtagagacggggtttcgccaagttgaccagcccagtttcaaactcctgacctcaggtgatctgcctgccttggcatcccaaagtgctgggattacaagaatgagccaccgtgcctggcctattttattatattgtaatatattttattatattagccaccatgcctgtcctattttcttatgttttaatatattttaatatattacatgtgcagtaattagattatcatgggtgaactttatgagtgagtatcttggtgatgactcctcctgaccagcccaggaccagctttcttgtcaccttgaggtcccctcgccccgtcacaccgttatgcattactctgtgtctactattatgtgtgcataatttataccgtaaatgtttactcttt

SEQ ID NO: 153711 - DNA, 1229 bp, Homo sapiens
  Payload ID: 10223
  Gene Symbol: MIA-RAB4B
  Gene Name: MIA-RAB4B readthrough (NMD candidate)
  ENST ID: ENST00000600729
  CDS Start-End: 423-818
aggtagacagaaaagttctccaagtcctcaccggcccagaggcccagccatcttcacctctcaagctgtctgtagaggtccacgtgtcaagaaaactgaggacagaggccctcagtccagttcccacaagcaactgcatctccccaacagctgcctgaatgagtttggaagcagtcctcccaccattcagccttcagatgaaactgcacccctggctgacaggctgattgcagccttatagcagaccttaagcctgagacattcgacccacagaaaaggtgataattttggtctttttttttctaaacaggttcttgctctagagtgcagtggcacgatcatggctcactgcggcctctacatcctgggttcaagtggtcctcccacctcaacctcctgagtggctgggactacagtccacgatggcccggtccctggtgtgccttggtgtcatcatcttgctgtctgccttctccggacctggtgtcaggggtggtcctatgcccaagctggctgaccggaagctgtgtgcggaccaggagtgcagccaccctatctccatggctgtggcccttcaggactacatggcccccgactgccgattcctgaccattcaccggggccaagtggtgtatgtcttctccaagctgaagggccgtgggcggctcttctggggaggcagcgttcagggagattactatggagatctggctgctcgcctgggctatttccccagtagcattgtccgagaggaccagaccctgaaacctggcaaagtcgatgtgaagacagacacttcctcttcaaattcctggtgattggcagtgcaggaactggcaaatcatgtctccttcatcagttcattgagaataagttcaaacaggactccaaccacacaatcggcgtggagtttggatcccgggtggtcaacgtgggtgggaagactgtgaagctacagatttgggacacggctggccaggagcggtttcggtcagtgacgcggagttattaccgaggggcggctggagccctgctggtgtacgacatcaccagccgggagacatacaactcactggctgcctggctgacggatgcccgcaccctggccagccccaacatcgtggtcatcctctgtggcaacaagaaggacctggaccctgagcgggaggtcactttcctggaggcctcccgctttgcccaggagaatgagctgatgttcctggagacca

SEQ ID NO: 153712 - DNA, 3044 bp, Homo sapiens
  Payload ID: 10224
  Gene Symbol: MICALCL
  Gene Name: MICAL C-terminal like
  Uniprot ID: Q6ZW33
  ENST ID: ENST00000256186
  CDS Start-End: 292-2379
aagtttggtagagtgtgttgtggggacagcagtatggtgtgagggaaggagagagttcagtctattataatcattagtctattgacttgtggtaattgagctataggagataaattcctacttactctacacatttaatggactcttcctcccaccccatcttccctgtccctttctttttccacagcagctctgcaacgggccaatagcttccagtctccaaccccaagcaaataccagaactggaggagagaattctggtggagtttgacgccagtgaacaaaagaactatgtcacctcctaaggacccttctccttctcttcctcttccttcatcgtcttcccattcatcttccccaccatcttcttcttcaaccagtgtttctgggaatgctccagatggttcctccccgcctcagatgacagcttctgagcccctctcgcaagtctcgagaggtcatccaagtcctcccaccccaaactttcggaggcgagccgtagcccaaggagcacccagggaaattcccctgtatctgcctcatcacccaaagccagagtgggcagagtactgcctggtgagccctggtgaagatggcctctcagaccctgcagagatgacttctgatgagtgccagccagcagaggcccctcttggggacatcggaagcaaccacagagacccacaccccatctgggggaaggacaggagctggacagggcaagagctatctcccttggctggagaagaccgggaaaaagggagtactggagccaggaaggaagaagagggagggccagtgctggtaaaggagaagttgggcctgaagaagttagtcctcactcaggagcagaagaccatgttgttggattggaatgactccatccctgagagtgtgcacctcaaagctggggagcgaatttcccagaaaagtgctgagaatggtagaggaggccgtgtgctaaaaccagtccgccccctgctgctccctagggcagcaggagagcccctgccaacccagagaggggcccaggagaagatggggacccctgcggaacaagctcaaggggagcgaaacgtgcctccacccaagtccccactgcggctcatagccaatgccatccgaaggtctctagagcccctcctttccaactctgaaggcgggaagaaggcctgggccaagcaagaatccaaaactttgcccgcacaggcctgcactcgctcattcagccttcggaaaaccaattccaataaagacggggaccagcattcccctgggagaaaccagtcctcagcctttagccctcctgaccctgccctccgcacccacagtttgcccaatcggccatccaaggtctttcctgcacttaggtccccaccctgcagcaagattgaagatgtccccacactcctcgagaaagtgagtttgcaagagaacttcccagatgcttctaagcctccaaagaaaagaatctcacttttttcctccctcagactcaaagacaaatcttttgagagtttcctccaagaatccagacaaagaaaggacatcagggacctctttggcagccccaagaggaaggtgctgcctgaagatagtgcgcaggccctggagaagctgctgcagcctttcaaaagcacctccctgcgccaggcagctcctcctcctcctcctcctcctcctcctcctcctcctcctcctacagcgggaggtgcagactccaagaactttcccctcagagcacaggtaacagaggcttcctcttctgcctcttcaacctcctcctcctctgcagatgaagaatttgatccccagctttccttgcagttaaaggagaagaagacacttagaagaagaaagaagctagaaaaagcaatgaagcagttggttaagcaagaagaattgaaaagactctataaggctcaggccatccagaggcagctggaggaggtggaggagcggcagagggcttctgagatccagggtgtgaggctggagaaggcgttgcgaggagaagcagattcaggcacacaggatgaagcacagcttttgcaggaatggtttaagctggttctggagaagaataaattaatgcgatatgagtcggagctcctaatcatggcccaggaactggaattagaagatcatcaaagcagactggagcagaaactgagagagaaaatgctcaaggaggagagccagaaagatgagaaggatctaaacgaagagcaagaagtattcaccgagctgatgcaagtgattgagcaaagggacaaactcgtcgattccttagaggaacaacgcatcagagaaaaagccgaggaccagcactttgaaagcttcgtattctccagaggctgtcagctgagcaggacttgaggaggcccgtagtccctctccctggctgcacgttgggaccggatcaggccaagtgcaccacacaccctcatgggtctttctgcaggatttatcatccctggaacttgttataccttactgcattttttaaaattaaaattctcttgcacgcatggcagcttcccaaggttcttccagagattcaaatgaagaaaacccaaagactctttggcaattggcagtcaacttcagccaggctctcagactggaggtgttgttggcagatgaccagcattgttttccctagaaagtgacacaaagacttgactttcctgctacttttatcattttccttcccaattcattgagttacatactttaagatttttgagaagctgccttttcattaatatatccatatttgccttttttgtatggatgaccagtttccaaatgtcagaaagaagcagccgcagtttaaagattaggttaatatttaaattgtgtttccagagaaagaggagaaaccttgagattactgattacataaagcaaataactcatatagcaggtgttaattcaatccagggtgaatttaatttaccaggtgcatttataagccttaatataatatacataagcaatgagagcttaatagaacatttgagccttaattttattttaag

SEQ ID NO: 153713 - DNA, 343 bp, Homo sapiens
  Payload ID: 10224
  Gene Symbol: MICALCL
  Gene Name: MICAL C-terminal like
  ENST ID: ENST00000533534
  CDS Start-End: 257-343
gtctgactatggtggcagcgagggctcccacacagaaccctgtgaagagaaaccctggcggccaggatccccgcatctaccgcacacgtccctaggggaggccctgagcagggcagtctctccacagtgccctgaggagcccagagctgtgcacgctctgcaacgggccaatagcttccagtctccaaccccaagcaaataccagaactggaggagagaattctggtggagtttgacgccagtgaacaaaagaactatgtcacctcctaaggacccttctccttctcttcctcttccttcatcgtcttcccattcatcttccccaccatcttcttcttcaacc

SEQ ID NO: 153714 - DNA, 4710 bp, Homo sapiens
  Payload ID: 10225
  Gene Symbol: MICALL1
  Gene Name: MICAL-like 1
  Uniprot ID: Q8N3F8
  ENST ID: ENST00000215957
  CDS Start-End: 127-2718
gcctgccggtcggcgcccgagctcggagccgcagccgcagccggaaaccgggcccgcgcggcggccgccgtcccggccaagccggggccccgaagccagagccggagccgggcgggccgcggggtcatggctgggccgcggggcgcgctgctggcctggtgccgccgccagtgcgagggctaccgcggcgtggagatccgcgacctgagcagctccttccgggacggcctggccttctgcgccatcctgcaccggcaccggcccgacctgctagattttgattcgctttccaaggacaatgtcttcgagaataaccgtttggcctttgaagtggctgagaaggagctggggatccccgctctcctggaccccaatgacatggtctccatgagcgtccctgactgcctcagcatcatgacctatgtgtcccagtattacaaccacttctgcagtcctggccaagctggtgtctcgccacccagaaagggccttgcaccctgttccccgccgtctgtagcacccactccagtggaaccagaagatgtggctcagggcgaggagctctcctcaggcagcctgtcagagcagggcaccggccagacccccagcagcacgtgcgcagcctgccagcagcatgtgcacttggtgcagcgctacctggctgacggcaggctgtaccatcgccactgcttccggtgtcggcggtgctccagcaccctgctccctggggcttatgagaatgggcctgaggagggcacctttgtgtgtgcagaacactgtgccaggctgggcccggggacacggtcggggaccaggcctgggcccttctcacagccaaagcagcagcaccagcagcaactcgcagaagatgccaaggatgttccaggaggcggccccagctccagtgctcctgcaggggctgaggccgatggacccaaggccagccctgaggcccggccgcagatccctaccaagccccgggttcctggcaaactacaggagctggccagcccccctgcgggccgccccacccctgcccccaggaaggcctctgagagcaccaccccagcaccccccacgccccggccccgctccagtctgcagcaggagaacctggtggagcaggctggcagcagcagcctggtgaacgggagactgcacgaactgcctgtccccaagccgagggggacaccgaagccgtccgaggggacaccagcccccaggaaggaccccccatggatcacgctggtgcaggcagaaccaaagaagaagccagccccacttcccccaagcagcagcccggggccaccaagccaggacagcaggcaggtggagaatggaggcaccgaggaggtggcccagccgagcccaacggccagcctggagtccaaaccctataacccctttgaggaggaggaggaggacaaggaggaagaggctccagctgcacccagcctggccaccagccctgccctgggccacccggagtccacacccaagtccctgcacccctggtacggcatcacccctaccagcagccccaagacaaagaagcgccctgccccgcgcgcacccagcgcgtccccactggctctccacgcctcccgcctctcgcactcggagccgccctcggccacaccatcgccagcgctcagcgtggagagcctgtcgtctgagagcgccagccagactgcaggtgcagagcttctggagccgccagctgtgcccaagagctcctcagagcctgctgtccatgcccctggtacccctggaaaccctgtcagcctctctaccaactcctccctggcctcctctggggaactagtggagcctagagtggaacaaatgcctcaagccagccctggccttgcccccaggaccaggggcagctcaggtccccagccagccaagccctgcagtggcgccaccccaacgcctctcttgttggttggagacaggagcccggtgccttcccctggaagctcgtccccacagctgcaggtaaagtcctcctgcaaggagaatccttttaaccggaagccatcacctgcagcgtccccagccacaaagaaggccaccaagggatccaagccagtgaggccacctgcccctggacacggctttccactcatcaaacgcaaggtccaggctgaccagtacatccctgaggaggacatccatggagagatggataccattgagcgccggctggatgccctggagcaccgtggggtgctgctggaggagaagctgcgtggcggcctgaatgagggccgtgaggatgacatgctggtggactggttcaagctcatccacgagaagcacctactggtgcggcgagagtccgagctcatctatgtcttcaagcagcagaacctggagcagcgccaggctgatgtcgagtatgagctccggtgcctcctcaataagccagaaaaggactggacggaggaggaccgggcccgggagaaggtgctgatgcaggagcttgtgaccctcattgagcagcgcaacgctatcatcaactgcctggatgaggaccggcagagggaggaagaggaagacaagatgttggaagccatgatcaagaagaaagagttccagagggaggctgaacctgagggcaagaagaaggggaagttcaagaccatgaagatgttgaaactgctaggaaacaaacgtgatgccaagagcaagtcccccagagacaagagctaacagcacgagaagccagttggggactgccccctcctggagcagctcctgggctgtgctctgtttgaagggggcgccctgctcccctcagatcagtcaggaggaagatgactaaggggagggatcctctgggtgatggcctcttcctcctcagggacctctgactgctctgggccaaagaatctcttgtttcttctccgagccccaggcagcggtgattcagccctgcccaacctgattctgatgactgcggatgctgtgacggacccaaggggcaaatagggtcccagggtccagggaggggcgcctgctgagcacttccgcccctcaccctgcccagcccctgccatgagctctgggctgggtctccgcctccagggttctgctcttccaggcaggccagcaagtggcgctgggccacactggcttcttcctgccccatccctggctctgagtctctgtcttcctgtcctgtgcaggcgcccttggatctcagtttccctcactcaggaactctgtttctgaagtcttcagttaagtttgagtttatgactgagtggcctgtactgtcagacgtgaatgggcctgacgggcaaatccatccctctctccctcacagttccaggagcggcttccctcgtctccccttactccacagggagcctcccttgccaggaccagggctgcgacggccatgctggggcaggtgagtgctctgttagctgctcccagtgctgtccccaggctgcagttctggtccctggttgtcaggtaggaagggtgcacttgaagcaggtgctcatctcggttccttaacgtttatagtctgacccctcacttaggctttcctctgccaccccggtccagggaagaggctcgctcccgcccatggtcatcactggtctgtctgctctgttgtctgttctttccctgactccctcccaccgaaggcctgatggctactcacccctctgggatggctatgggagaggaggagtgatggggaccgccaccttttctgcaggaaatgtgcccagcagctcttggtcaaagcactgttgctataagctatctctgggatgcctctaggcccccttccctctacacacctctgggaaaagattacactgtattaactctcgaggagtttcctcaccaataaacagacaacctcaactgccagtgccctgcagcctcgggccacagcggcagccttgtttgccttcccacctgcctctgccacacctggtggctgaacatctctggtcgcccagaggccatgttggggccatcctccaagagggatctctgccctcaccgcctgccactgggcaggatccctttcctctgcagggagaggtggctcctcggccatgcagcccctggcaggctccttctaaacatgcctgttgacctggagctggcgccaccaactccagggcctttccagggccagacaggtaacacgcatgaacccgagtgacagctctgacgggctgtttcggtgtcaggagacaaagctggcaggggcaggggtgaactggaggcaagtcaagtcacctgtggcctgtggggctgaatgtgggcccggtgttgccagatcctttgtcataagaagctagaaatccagattttatgtgtgtgtaatttgtaaatgctgaaagctagcctgaattttttttttttttttttgagacagagtctcgctctgtcgcccaggctggagtgcagtggcgcgatctcagctcactgcaagctccgcctcctgggttcacgccatcctcctgcctcggcctcctgagcagctgggactacaggcgcatgctacgacgcctggctaattttttgtatttttagtagagacggggtttcaccgtgttaaccaggatggtctcgatctcctgaccttgtgatccacccaccttggcctcccaaagtgctgggattacaggcgtgagccaccacgcccggccactagcctgaatttcaatcaag

SEQ ID NO: 153715 - DNA, 808 bp, Homo sapiens
  Payload ID: 10225
  Gene Symbol: MICALL1
  Gene Name: MICAL-like 1
  ENST ID: ENST00000445494
  CDS Start-End: 177-808
gggtctccctgccaagctatgggggaggggatggtggacatgacaacttccagctcagcggtgctttaggagattttgattcgctttccaaggacaatgtcttcgagaataaccgtttggcctttgaagtggctgagaaggagctggggatccccgctctcctggaccccaatgacatggtctccatgagcgtccctgactgcctcagcatcatgacctatgtgtcccagtattacaaccacttctgcagtcctggccaagctggtgtctcgccacccagaaagggccttgcaccctgttccccgccgtctgtagcacccactccagtggaaccagaagatgtggctcagggcgaggagctctcctcaggcagcctgtcagagcagggcaccggccagacccccagcagcacgtgcgcagcctgccagcagcatgtgcacttggtgcagcgctacctggctgacggcaggctgtaccatcgccactgcttccggtgtcggcggtgctccagcaccctgctccctggggcttatgagaatgggcctgaggagggcacctttgtgtgtgcagaacactgtgccaggctgggcccggggacacggtcggggaccaggcctgggcccttctcacagccaaagcagcagcaccagcagcaactcgcagaagatgccaaggatgttccaggaggcggccccagctccagtgctcctgcaggggctgaggccgatggacccaaggccagccctgaggcccggccgcagatccctaccaagccccgggttcctggcaaactacaggagctggccag

SEQ ID NO: 153716 - DNA, 1108 bp, Homo sapiens
  Payload ID: 10225
  Gene Symbol: MICALL1
  Gene Name: MICAL-like 1
  ENST ID: ENST00000454685
  CDS Start-End: 1-1108
ctataacccctttgaggaggaggaggaggacaaggaggaagaggctccagctgcacccagcctggccaccagccctgccctgggccacccggagtccacacccaagtccctgcacccctggtacggcatcacccctaccagcagccccaagacaaagaagcgccctgccccgcgcgcacccagcgcgtccccactggctctccacgcctcccgcctctcgcactcggagccgccctcggccacaccatcgccagcgctcagcgtggagagcctgtcgtctgagagcgccagccagactgcaggtgcagagcttctggagccgccagctgtgcccaagagctcctcagagcctgctgtccatgcccctggtacccctggaaaccctgtcagcctctctaccaactcctccctggcctcctctggggaactagtggagcctagagtggaacaaatgcctcaagccagccctggccttgcccccaggaccaggggcagctcaggtccccagccagccaagccctgcagtggcgccaccccaacgcctctcttgttggttggagacaggagcccggtgccttcccctggaagctcgtccccacagctgcagtcctcctgcaaggagaatccttttaaccggaagccatcacctgcagcgtccccagccacaaagaaggccaccaagggatccaagccagtgaggccacctgcccctggacacggctttccactcatcaaacgcaaggtccaggctgaccagtacatccctgaggaggacatccatggagagatggataccattgagcgccggctggatgccctggagcaccgtggggtgctgctggaggagaagctgcgtggcggcctgaatgagggccgtgaggatgacatgctggtggactggttcaagctcatccacgagaagcacctactggtgcggcgagagtccgagctcatctatgtcttcaagcagcagaacctggagcagcgccaggctgatgtcgagtatgagctccggtgcctcctcaataagccagaaaaggactggacggaggaggaccgggcccgggagaaggtgctgatgcaggagcttgtgaccctcattgagcag

SEQ ID NO: 153717 - DNA, 918 bp, Homo sapiens
  Payload ID: 10225
  Gene Symbol: MICALL1
  Gene Name: MICAL-like 1
  ENST ID: ENST00000424008
  CDS Start-End: 1-561
gagatggataccattgagcgccggctggatgccctggagcaccgtggggtgctgctggaggagaagctgcgtggcggcctgaatgagggccgtgaggatgacatgctggtggactggttcaagctcatccacgagaagcacctactggtgcggcgagagtccgagctcatctatgtcttcaagcagcagaacctggagcagcgccaggctgatgtcgagtatgagctccggtgcctcctcaataagccagaaaaggactggacggaggaggaccgggcccgggagaaggtgctgatgcaggagcttgtgaccctcattgagcagcgcaacgctatcatcaactgcctggatgaggaccggcagagggaggaagaggaagacaagatgttggaagccatgatcaagaagaaaggtgaggcccttgctggggatgaggctgagttccagagggaggctgaacctgagggcaagaagaaggggaagttcaagaccatgaagatgttgaaactgctaggaaacaaacgtgatgccaagagcaagtcccccagagacaagagctaacagcacgagaagccagttggggactgccccctcctggagcagctcctgggctgtgctctgtttgaagggggcgccctgctcccctcagatcagtcaggaggaagatgactaaggggagggatcctctgggtgatggcctcttcctcctcagggacctctgactgctctgggccaaagaatctcttgtttcttctccgagccccaggcagcggtgattcagccctgcccaacctgattctgatgactgcggatgctgtgacggacccaaggggcaaatagggtcccagggtccagggaggggcgcctgctgagcacttccgcccctcaccctgcccagcccctgccatgagctctggg

SEQ ID NO: 153718 - DNA, 3121 bp, Homo sapiens
  Payload ID: 10226
  Gene Symbol: MICALL2
  Gene Name: MICAL-like 2
  Uniprot ID: Q8IY33
  ENST ID: ENST00000297508
  CDS Start-End: 177-2891
cttctcttagggacccggcactcgtcgccctcagtccggctcagctggggctgggcgccgtgggtctggcggttccgtagcggtcccagcgtctgtcccgccggccgggcggtcgcggcacagccgcgggaaggtgtcggagggcggttccgccgcgcggcgggcgcgccgcccacatggcggccatcagggcgctgcaacagtggtgccggcagcagtgcgagggctaccgcgacgtgaatatctgcaacatgaccacgtcgttccgcgacggcctggctttctgcgccatcctgcaccgccaccggcccgacctcataaacttcagtgctctcaagaaggaaaatatttatgaaaacaataaactggccttccgcgtggccgaggagcacttgggcatcccagccttgctggatgccgaggacatggtggccttgaaggtgcctgaccggctgagcatcttgacctacgtgtcccagtattacaactacttccacggccgctcccccattgggggcatggcaggcgtgaagagggcctcggaggactctgaggaggagccgtcagggaagaaggctccagtccaggcggccaagctgccctcgcccgccccagcccggaagcctccactatctccagcccagacaaaccctgtggtccagaggaggaatgagggtgcagggggcccgccccccaagactgaccaggcattggcgggcagcttggtcagcagcacctgcggggtctgcggcaagcacgtgcacctggtacagcggcacctggccgacgggaggctttaccaccggagctgcttcaggtgtaagcagtgctcctgcacgctgcactcgggggcctacaaggccacaggagagccgggcaccttcgtctgcaccagccacctccccgcagccgcctctgcaagccccaagttgacgggtctggtcccccgacagccaggggccatgggtgtggattccaggacctcctgttccccacagaaggcccaggaggcaaacaaggccagaccgtcggcctgggagcctgctgcgggcaactcgcctgccagggcttccgttccagctgcacccaaccctgcagccaccagcgccacgtccgtccacgtgaggagcccagccaggccctctgagagccgcctggcccccactcccacggaggggaaagtccgccctcgtgtgaccaatagctccccgatgggctggtcgtcagctgccccgtgcacagcagcggctgcctcccatcccgccgtgcccccgagtgccccagaccctcgcccggccacaccccagggtgggggagccccccgagtggcagctcctcaaaccacactcagttcaagctccacatctgcagccacggtggaccccccagcctggaccccgtccgcctccaggacccagcaggcccggaataagtttttccaaacatcagcagtgccccccggcaccagcctttctggcagaggtcccaccccgtcacttgttctatccaaggacagcagcaaggagcaggcgcggaacttcctcaagcaggccctctcagcgctggaagaggctggcgctccggcgcctggcaggccctccccagccactgccgctgttcccagttctcagcccaaaactgaagcaccacaagcaagtcccttagccaagccgttacagtcctcgtctccccgggtgcttggcctcccttcgaggatggaaccgccagccccgctgagcacgagcagtacctctcaggcatccgcgttgcccccggcaggcaggaggaacttggcggaatcctcaggggtcggcagggtgggtgctggctccaggccgaagccagaggccccgatggcaaagggtaaaagcaccaccttaacgcaggacatgagcaccagcctccaggaaggccaggaggacgggccggcaggatggagagcgaatctgaagcccgtggacaggagaagcccagctgagaggactctgaagcccaaggaaccacgggccctggcagagccgagggcgggggaggcccccaggaaggtctcaggcagctttgctgggagtgtccacatcaccctgacccccgtgaggcctgacaggaccccacgcccagccagcccaggacccagcctcccagccaggtccccctccccaccccgccgcaggagactggccgtccctgccagcctcgacgtttgtgacaactggcttcggccggagccccctggccaggaagcccgagtgcagagctggaaggaggaggagaagaaacctcaccttcagggcaaaccagggagacccttgtccccggccaatgtccctgctctgcctggcgagacggtgacctccccagtcaggctgcaccccgactacctctccccggaggagatacagaggcagctgcaggacatcgagaggcggctggacgccctggagctccgcggcgtggagctggagaagcgactgcgggcggccgagggagatgacgctgaggatagcctcatggtggactggttctggctcattcacgagaagcagcttctgctgagacaggagtcagagctgatgtacaagtccaaggcccagcgtctggaggagcagcagctggacatcgagggcgagctgcgccggctcatggccaagcccgaggctctgaagtcactgcaggagcggcggcgggagcaggagctgctggagcagtacgtgagcaccgtgaacgaccgcagtgacatcgtggactcgctggacgaggaccggctccgggaacaagaggaggatcagatgctgcgggacatgattgagaagctgggcctccagaggaagaagtccaagttccgcttgtccaagatctggtcaccaaaaagcaaaagcagcccctcccagtagtagccagtagggccgtgggctcggcccggacctggcatccggacttggactcggggccatgggcttggcccggacccggaacccggacttgtactcggggccgtgggctcggcccggacccggcattcggacttggactcgggaagggcctcctgtccctacaaggggcatgtggacagcagggacctgcgctaccgtctgtggtctcaataaagaaaccgaccacatgg

SEQ ID NO: 153719 - DNA, 3046 bp, Homo sapiens
  Payload ID: 10226
  Gene Symbol: MICALL2
  Gene Name: MICAL-like 2
  Uniprot ID: Q8IY33
  ENST ID: ENST00000413446
  CDS Start-End: 232-2274
tgtcagggtacaggaggtgaagctggggccgtctgatgtcgtactacggtcccagcagcatcaccgtggccggagcagggccgggagccctggcctctgcccacctgtggtcctgtgccacctcattccttcacagccccccatcctggcctcggtttctctgtttgggcaagatgacctctgaggccctccagcccctcccttcgtggactctgagctgctttggacatcatgtttttatcttccagaaacttcagtgctctcaagaaggaaaatatttatgaaaacaataaactggccttccgcgtggccgaggagcacttgggcatcccagccttgctggatgccgaggacatggtggccttgaaggtgcctgaccggctgagcatcttgacctacgtgtcccagtattacaactacttccacggccgctcccccattgggggcatggcaggcgtgaagagggcctcggaggactctgaggaggagccgtcagggaagaaggctccagtccaggcggccaagctgccctcgcccgccccagcccggaagcctccactatctccagcccagacaaaccctgtggtccagaggaggaatgagggtgcagggggcccgccccccaagactgaccaggcattggcgggcagcttggtcagcagcacctgcggggtctgcggcaagcacgtgcacctggtacagcggcacctggccgacgggaggctttaccaccggagctgcttcaggtgtaagcagtgctcctgcacgctgcactcgggggcctacaaggccacaggagagccgggcaccttcgtctgcaccagccacctccccgcagccgcctctgcaagccccaagttgacgggtctggtcccccgacagccaggggccatgggtgtggattccaggacctcctgttccccacagaaggcccaggaggcaaacaaggccagaccgtcggcctgggagcctgctgcgggcaactcgcctgccagggcttccgttccagctgcacccaaccctgcagccaccagcgccacgtccgtccacgtgaggagcccagccaggccctctgagagccgcctggcccccactcccacggaggggaaagtccgccctcgtgtgaccaatagctccccgatgggctggtcgtcagctgccccgtgcacagcagcggctgcctcccatcccgccgtgcccccgagtgccccagaccctcgcccggccacaccccagggtgggggagccccccgagtggcagctcctcaaaccacactcagttcaagctccacatctgcagccacggtggaccccccagcctggaccccgtccgcctccaggacccagcaggcccggaataagtttttccaaacatcagcagtgccccccggcaccagcctttctggcagaggtcccaccccgtcacttgttctatccaaggacagcagcaaggagcaggcgcggaacttcctcaagcaggccctctcagcgctggaagaggctggcgctccggcgcctggcaggccctccccagccactgccgctgttcccagttctcagcccaaaactgaagcaccacaagcaagtcccttagccaagccgttacagtcctcgtctccccgggtgcttggcctcccttcgaggatggaaccgccagccccgctgagcacgagcagtacctctcaggcatccgcgttgcccccggcaggcaggaggaacttggcggaatcctcaggggtcggcagggtgggtgctggctccaggccgaagccagaggccccgatggcaaagggtaaaagcaccaccttaacgcaggacatgagcaccagcctccaggaaggccaggaggacgggccggcaggatggagagcgaatctgaagcccgtggacaggagaagcccagctgagaggactctgaagcccaaggaaccacgggccctggcagagccgagggcgggggaggcccccaggaaggtctcaggcagctttgctgggagtgtccacatcaccctgacccccgtgaggcctgacaggaccccacgcccagccagcccaggacccagcctcccaggtccccctccccaccccgccgcaggagactggccgtccctgccagcctcgacgtttgtgacaactggcttcggccggagccccctggccaggaagcccgagtgcagagctggaaggaggaggagaagaaacctcaccttcagggcaaaccagggagacccttgtccccggccaatgtccctgctctgcctggcgagacggtgacctccccagtcaggctgcaccccgactacctctccccggaggagatacagaggcagctgcaggacatcgagaggcggctggacgccctggagctccgcggcgtggagctggagaagcgactgcgggcggccgagggagatgacgctgaggatagcctcatggtggactggttctggctcattcacgagaagcagcttctgctgagacaggagtcagagctgatgtacaagtccaaggcccagcgtctggaggagcagcagctggacatcgagggcgagctgcgccggctcatggccaagcccgaggctctgaagtcactgcaggagcggcggcgggagcaggagctgctggagcagtacgtgagcaccgtgaacgaccgcagtgacatcgtggactcgctggacgaggaccggctccgggaacaagaggaggatcagatgctgcgggacatgattgagaagctgggcctccagaggaagaagtccaagttccgcttgtccaagatctggtcaccaaaaagcaaaagcagcccctcccagtagtagccagtagggccgtgggctcggcccggacctggcatccggacttggactcggggccatgggcttggcccggacccggaacccggacttgtactcggggccgtgggctcggcccggacccggcattcggacttggactcgggaagggcctcctgtccctacaaggggcatgtggacagcagggacctgcgctaccgtctgtggtctcaataaagaaaccgaccacatgg

SEQ ID NO: 153720 - DNA, 8039 bp, Homo sapiens
  Payload ID: 10227
  Gene Symbol: MCPH1
  Gene Name: microcephalin 1
  ENST ID: ENST00000344683
  CDS Start-End: 77-2584
gcatgcccagtgcccgcgcgcgccgccaggctcgcaagcaccgcgtaggccagctggccggatcccgccgtctgtcatggcggcccccatcctgaaagatgtagtggcctatgttgaagtgtggtcatccaatggaacagaaaattattcaaagacatttacaacacagcttgtggatatgggggcaaaggtttcaaaaacttttaacaaacaagtaactcacgttatcttcaaagatggctaccagagcacttgggacaaagctcagaagagaggcgtaaagctcgtttcggtgctctgggtggaaaaatgcaggacagctggagcacacattgatgaatcattgttccctgcagctaatatgaatgaacacttatcaagcctaattaaaaaaaaacgtaaatgtatgcagcccaaagattttaattttaaaacaccagaaaatgataagagatttcagaagaaatttgagaaaatggctaaagagctacaaaggcaaaaaacaaatctagatgatgatgtacctattctcttatttgaatctaatggttcattaatatatactcccacaattgaaattaatagtaggcaccacagcgcaatggagaagagattacaagagatgaaggagaaaagggaaaatctttcccccacctcttcccaaatgattcagcagtctcatgataatccaagtaactctctgtgtgaagcacctttgaacatttcacgtgatactttgtgttcagatgaatactttgctggtggcttacactcatcttttgatgatctttgtggaaactcaggatgtggaaatcaggaaaggaagttggaaggatccattaatgacattaaaagtgatgtgtgtatttcttcacttgtattgaaagcaaataatattcattcatcaccatctttcactcacctcgataaatcaagtcctcagaaatttctgagtaatctttcaaaggaagaaataaacttgcaaagaaatattgcaggtaaagtagtcacccctgaccaaaagcaggctgcaggtatgtctcaggagacgtttgaagagaagtatcgtttgtctcctaccttatcttcaacaaaaggccaccttttgatacattcaagacccaggagttcctcagtaaagagaaaaagagtatcacatggctcccattcacctccgaaggaaaaatgcaagagaaagaggagcaccaggagatctatcatgccgaggctgcagctgtgcaggtcggaagacaggctgcagcacgtggcgggacctgccctggaggctcttagctgtggggagtcttcatatgatgactatttttcacctgataatcttaaggaaaggtattcagagaatcttcctcctgaatctcagctgccatcaagccctgctcagttgagctgcagaagtctttctaagaaggagagaacaagcatatttgaaatgtctgatttttcctgcgttggcaaaaaaaccagaacagttgacattaccaatttcacagcaaaaaccatctccagtcctcggaaaactggaaatggtgaaggccgtgcaacttcgagttgcgtgacttctgcccctgaagaagccctaaggtgttgtagacaggctgggaaagaagacgcatgcccagagggaaatggcttttcttacaccattgaggaccctgctcttccaaaaggacatgatgatgatttaactcctttggaaggaagccttgaagaaatgaaagaagcggttggtctgaaaagcacacagaacaaaggtaccacttccaaaatatcaaactcctctgaaggcgaagcccagagtgaacatgagccatgttttatagttgactgtaacatggagacgtctacagaagagaaggaaaacttacccggaggatacagtggaagtgttaaaaatagaccaacaaggcatgatgttttagatgactcatgtgacggctttaaggacctcatcaaacctcatgaggaattgaagaaaagtgggagaggcaaaaagccaacaagaacattagtcatgacaagcatgccatctgaaaagcagaatgtcgtcatccaggttgtggataaattgaaaggcttttcaattgcaccagacgtctgtgagaccacgactcacgtgctttccgggaagccacttcgcaccctgaatgtgctgctgggaattgcgcgtggctgctgggttctctcttatgattgggtgctatggtctttagaattgggtcactggatttctgaggagccgttcgaactgtctcaccacttccctgcagctcccctgtgccgaagcgagtgccacttgtctgcagggccgtaccgcggaaccctctttgccgaccagccagcgatgtttgtctcgcctgccagcagccccccagtggccaagctctgtgaactagtccacctgtgcggaggccgggtcagccaagtcccccgccaggccagcatcgtcatcgggccctacagcggaaagaagaaagccacagtcaagtatctgtctgagaaatgggtcttagattccatcacccagcacaaggtctgtgcccctgaaaactacctattgtcacaatgacagtgacctcactggcctgtggtgactgcacacagctcgcaaaactgtctttggatgttcaaatgagaaacaaaactgtgaagagaaggaactggcgtatacaagatgacttctgatatcatgtttgccatgtgttgtggttcttaagaactcataggtgactttctgatgactgaatgtctgtttcagagacgcttcgggcctttttatttttattttattttttattttttgagacggagtcctgccctgtttcccaggctggagtgcaatggcacaatctcggctcactgcaacctccacctcccaggttcaagcgattctgctgcctcagcctcctgagtagctgggattacagatgtgtgccaccatgcctggctaatttttgtagttttagtagagacagggtttcgccatgttggccaggctggtctcaaacgcctgagctcaggtgatctgtcaggcctcttctatagaattccagtctttgtgtcttagtcatgatcataattgaaaggtcacagaacctttgtcattagagcacagtactgccaaataaagaatggaaattcaatgacattgttttattactgagaacaactagagaactctgcaagtttcttggcttagactcgatctttattaatacattatctattaggtaggaaagacatttgtcagctattaaggtgacttttatctagcggagattcctctcttaaagtaatgaaaggagataggtatggggggtgttatacaggataattggtgacatctgagtgtcttacttctgcaagcctgctttatggtgagcaaagcatcaccagcaagtgatcacaatgtccactggccgctttttgcctgccgtcctcgagatgaaattggcagttggggctgattcacagaaacaccgatttgtggctgagcacggtggctcacacctgtcatcccagccctttgggaggctgaggtggacagatcacttgaggtcaggagttcgagaccagcctgaccaacgcagcaaaacccatctctactaaaaatacaaaaatcagctgggtgtggtggcacacacctgtggtcccagctcctcaggagtctgaggcagaagaatcgcttgaacccaagaggcagaggttgcagtgagccaaggttgcagtgaatcaagattgctccactgcactccagcctgggcaacagagtaactctccttctcaaataaataaataaataaataagaaacactgatgtgtctgtcaccttctaaagaaatgaaatgctaggaagtcctagccagagtgatcaggcaagaataagccataaaaggcatccaaataggaaaagaagtcaaactgtctctcttcactgccgatatgattctatacctagaaaaccctaaagactctgccaaaaggctcctggaaccgataaatgacttaagtaaagtttcaggatagtaaatccatgtacaaaaatcagcatttccaaacacagtaacattcaagctgagcaccaaatcaagaacgcaatcccatttccaatagccacggaatgaaatacctaggaacacgtataaccaaggaggcaaaggatctctacaaggagaaccataaacgagatgctgagtcccagcgaggtcggaggtgccactgagccctcatcgtggtgccgttcccgctctgggttatttatctgttgctcatctcagctgttgttcctacctcaaatttcaagtccctcaacaaatataacagaaccacttctagaatgaacctttgagaagggaggtagcagtgcattgtataggaattggcattctatagaaaaccacagaaactggaaataatgaagggttgtctcttggttttaaaataatgtatacacctaaatcatccccttatgatactcatcctctaacagcaattgaacttcaatacaatgagtcattcctgagttcactcgcttcacattacatatgtttctctataaccacaagcatcctggcttggtagtgctcccacagcaccaaaaatccctgaggaggctgacaaacattgtgctgactcatgctggagacaagccacagagaacttccatcccccaccacatcagccacggagccagcccagcctctgcccacccaggcctcagtccccagtgttaagttctgatccctgatgctggcctgccagtggccagtcaagattctctttctgaaagctagtattttatgaggactgactgttgctagacattacactaagcacattatatgttgtacttcattttaccctttcaacaatcctattagtagcttactgtgggtctgcaaagccttactcaaaacatatagggctagaggttctcaggattctgaattttaaaaaaaatttgtaaaggcttatggctctcaccactgttattcaacgttgcattaaagtttctacccagagaaggcaataaaaggaaattaaagctatacagattggaagtgaagaaataaaagtctttattctcaagaatacaagacactatgtatagaaattgtaaggaatgcaaaaaaaaaaaaaaaaaaaagccctacaagaacttataacaagtttagcaagattgcaatatacaatcttgcaatcttcctaaagattatatacaaacctaacagaattgtatttatatatactgtcaataagcaattcaaaatgaaattaagaccacgattccatttaaaattgcatctaaaaataaacaaaataggaatagacttggcaacagttgtaacatctgtatactgaaacctgtaaaacattgctgaaagaagttaaagacttctttaaatagagacatatacaaagttcatagattagaagatgcaatattgttaagatgatagtcctcaaattgacgtatagattcaatgcaatccattaaaatctcagatggctttttatagaatttgaaaagctgatgctaaatcttttatgaaaatgcaaagaacctctagtagacaaaacaatttttttaagagcaaagttggaggatttatagaacctgattccaaaactgtcagtaaaactacaataattacaaagtatcagccaggtgccgtggctcacatctgtaataccagctctctgggaggctgaggcgggtggatcacttgaagtcgggagtttaagaccagcctggccaacttggtgaaaccttgtctctactagaaatacaaaaaattagccaggcatgatggcacacacctgtaatctcagttactcaggaggctgaagcagaatagcttgaacccaagagagtccagctcaaaaacaacaacaagaacaaaagtatcacattggcataagaatagacatgtaaatcaaataacaaaatagagaattcaggtataaatcttcatatttatggctgattgactttgaacaaaggtgacgaggcaagtcagtatagcagcatattcttttcaacaaatggtgctggcagaagaaaaaaaaagtacttggatccttacctcacaccatgcacaaaaattagctcaacgtggactatatcagggtttctcaacatcagcagtgttggcgtttgctggggtggataattctttcctgtggagagctgtcctgtgcactgtagaatgtttagctgcatcctggcctctgcctattagatgccagtggcatccctcccctgacacacacctagttttgacaatctctgtctccagatattcccaaatgtgccctggagagcaaaactgtttccagttgagaaccattgacctaatgtaaaaaataaaatgtacagaagaaagcatagcaggaaatcattctgacctcaggttaggcaaagctttcttagatatgacactaaaggcataattcattaaaaaaataagttgggctttgtcaaaattttaagttttgctcttctgaagaaaccattaaaaaaaaatgaaaagacaagccacagactatgaaaaaatacttgcaaatcatatatctgataaaggacttgtacccagaccatgtaaagaactcataactcattaataaaaggataaagaaaaagctgaagacaattcatgcaagaagatatacaaatattaagcacattaaaatgctcaatattattagtcactagggaaatacaaattaaaggcccaatgaaatacctattacacacccattagaatgactgtaaacaacaagactgataattccaacatctgaccaagatatggagaaactagaactctcctacattgctggcatgagtgcaaaatgatacagccactttgaaacaccatttggcagttgcttaaaaaattgaacattcaactaccatatgacccagcaatttcactctcaggtatataaccaaaatacatgaaaacatggatctgcacaaggtcttgtatacaaatgttcatagcaacattattcataataaccaaaaattagcccatcaactgaaaagtagataaacaaaatgtatatccacaccatggaacgctactcagcaaacttctaaaaagcaacaaactactaaacacgtgcaacaacatgaatgagcctcagaaacataagtgaaagaggtcagacacaaaagactacaaattgtaagattccatttagataccatttctacaaaccgcaaaactgtagaggcacgaaacagattcatggtctgctgcagctggggatgggagtgggaacagagagcaaacattttgggatgatggaaacattctaaaactggattgtgattttggttacacaactgtatacatttactaaaatcaatgaacagaacacttttaatgggtaagccttaaggcatgtgaattatacaccaataaagctattttttttaaaaaaaagagagagagagaacgagagctacatggcagccccagggcaatagctctcagatctcccttagagaaagaactttctcttccacagcaatgagtgcaggtagctaacactgaccaacctgcatctggtagttcatttaaggtcggccttggctttcaagttaaggccatggtctttctctgcagtccccagccaatacgtgggcacagaaaggcacagggcatggctgattcagcccaacatgaggctccacaccctagaactccctgtggagttggccgatactgcctgtgacctgcaatgtggtctaagctgtcagacctccacagtggccagaaggttttccatacctgagcctgcttctacccacttttatttttcccaggagtcacgcttagtcatctcttgctctttgaactccatgtctgtatcagctacccagaggacccatcagacagaaagtaatatgcagataacagcccaggggaatctgggcagcactgtgaaaccaacatttcttcagtgaaacctagaacaaaagtggaataaataaaaactaactgtctcatttc

SEQ ID NO: 153721 - DNA, 2049 bp, Homo sapiens
  Payload ID: 10227
  Gene Symbol: MCPH1
  Gene Name: microcephalin 1
  Uniprot ID: Q8NEM0
  ENST ID: ENST00000522905
  CDS Start-End: 26-1714
agctggccggatcccgccgtctgtcatggcggcccccatcctgaaagatgtagtggcctatgttgaagtgtggtcatccaatggaacagaaaattattcaaagacatttacaacacagcttgtggatatgggggcaaaggtttcaaaaacttttaacaaacaagtaactcacgttatcttcaaagatggctaccagagcacttgggacaaagctcagaagagaggcgtaaagctcgtttcggtgctctgggtggaaaaatgcaggacagctggagcacacattgatgaatcattgttccctgcagctaatatgaatgaacacttatcaagcctaattaaaaaaaaacgtaaatgtatgcagcccaaagattttaattttaaaacaccagaaaatgataagagatttcagaagaaatttgagaaaatggctaaagagctacaaaggcaaaaaacaaatctagcttcccaaatgattcagcagtctcatgataatccaagtaactctctgtgtgaagcacctttgaacatttcacgtgatactttgtgttcagatgaatactttgctggtggcttacactcatcttttgatgatctttgtggaaactcaggatgtggaaatcaggaaaggaagttggaaggatccattaatgacattaaaagtgatgtgtgtatttcttcacttgtattgaaagcaaataatattcattcatcaccatctttcactcacctcgataaatcaagtcctcagaaatttctgagtaatctttcaaaggaagaaataaacttgcaaagaaatattgcaggtaaagtagtcacccctgaccaaaagcaggctgcaggtatgtctcaggagacgtttgaagagaagtatcgtttgtctcctaccttatcttcaacaaaaggccaccttttgatacattcaagacccaggagttcctcagtaaagagaaaaagagtatcacatggctcccattcacctccgaaggaaaaatgcaagagaaagaggagcaccaggagatctatcatgccgaggctgcagctgtgcaggtcggaagacaggctgcagcacgtggcgggacctgccctggaggctcttagctgtggggagtcttcatatgatgactatttttcacctgataatcttaaggaaaggtattcagagaatcttcctcctgaatctcagctgccatcaagccctgctcagttgagctgcagaagtctttctaagaaggagagaacaagcatatttgaaatgtctgatttttcctgcgttggcaaaaaaaccagaacagttgacattaccaatttcacagcaaaaaccatctccagtcctcggaaaactggaaatggtgaaggccgtgcaacttcgagttgcgtgacttctgcccctgaagaagccctaaggtgttgtagacaggctgggaaagaagacgcatgcccagagggaaatggcttttcttacaccattgaggaccctgctcttccaaaaggacatgatgatgatttaactcctttggaaggaagccttgaagaaatgaaagaagcggttggtctgaaaagcacacagaacaaaggtaccacttccaaaatatcaaactcctctgaaggcgaagcccagagtgaacatgagccatgttttatagttgactgtaacatggagacgtctacagaagagaaggaaaacttacccggaggatacagtggaagtatgtgaatctccttttccaagtcaccttcgctaaataaacatgtaacagtgcatccatattttaaatttatcacaactttttcataacttatttccccatttactcctctttttacttaaagaatgtgcatttgatcattccaatgataaactctttaggaatagatgacttgctgtcttgtggaacttctagacttattggttaagtctgttaggaatctatttctccaagacttttccttcttataggtcaaaaggataagtagtccatagtatgaataactgaggggagtgaagtctttttccttattccattggagtcttggcgctgcagcgtgtgt

SEQ ID NO: 153722 - DNA, 2917 bp, Homo sapiens
  Payload ID: 10227
  Gene Symbol: MCPH1
  Gene Name: microcephalin 1
  Uniprot ID: Q8NEM0
  ENST ID: ENST00000519480
  CDS Start-End: 73-1905
gcccagtgcccgcgcgcgccgccaggctcgcaagcaccgcgtaggccagctggccggatcccgccgtctgtcatggcggcccccatcctgaaagatgtagtggcctatgttgaagtgtggtcatccaatggaacagaaaattattcaaagacatttacaacacagcttgtggatatgggggcaaaggtttcaaaaacttttaacaaacaagtaactcacgttatcttcaaagatggctaccagagcacttgggacaaagctcagaagagaggcgtaaagctcgtttcggtgctctgggtggaaaaatgcaggacagctggagcacacattgatgaatcattgttccctgcagctaatatgaatgaacacttatcaagcctaattaaaaaaaaacgtaaatgtatgcagcccaaagattttaattttaaaacaccagaaaatgataagagatttcagaagaaatttgagaaaatggctaaagagctacaaaggcaaaaaacaaatctagatgatgatgtacctattctcttatttgaatctaatggttcattaatatatactcccacaattgaaattaatagtaggcaccacagcgcaatggagaagagattacaagagatgaaggagaaaagggaaaatctttcccccacctcttcccaaatgattcagcagtctcatgataatccaagtaactctctgtgtgaagcacctttgaacatttcacgtgatactttgtgttcagatgaatactttgctggtggcttacactcatcttttgatgatctttgtggaaactcaggatgtggaaatcaggaaaggaagttggaaggatccattaatgacattaaaagtgatgtgtgtatttcttcacttgtattgaaagcaaataatattcattcatcaccatctttcactcacctcgataaatcaagtcctcagaaatttctgagtaatctttcaaaggaagaaataaacttgcaaagaaatattgcaggtaaagtagtcacccctgaccaaaagcaggctgcaggtatgtctcaggagacgtttgaagagaagtatcgtttgtctcctaccttatcttcaacaaaaggccaccttttgatacattcaagacccaggagttcctcagtaaagagaaaaagagtatcacatggctcccattcacctccgaaggaaaaatgcaagagaaagaggagcaccaggagatctatcatgccgaggctgcagctgtgcaggtcggaagacaggctgcagcacgtggcgggacctgccctggaggctcttagctgtggggagtcttcatatgatgactatttttcacctgataatcttaaggaaaggtattcagagaatcttcctcctgaatctcagctgccatcaagccctgctcagttgagctgcagaagtctttctaagaaggagagaacaagcatatttgaaatgtctgatttttcctgcgttggcaaaaaaaccagaacagttgacattaccaatttcacagcaaaaaccatctccagtcctcggaaaactggaaatggtgaaggccgtgcaacttcgagttgcgtgacttctgcccctgaagaagccctaaggtgttgtagacaggctgggaaagaagacgcatgcccagagggaaatggcttttcttacaccattgaggaccctgctcttccaaaaggacatgatgatgatttaactcctttggaaggaagccttgaagaaatgaaagaagcggttggtctgaaaagcacacagaacaaaggtaccacttccaaaatatcaaactcctctgaaggcgaagcccagagtgaacatgagccatgttttatagttgactgtaacatggagacgtctacagaagagaaggaaaacttacccggaggatacagtggaagtatgtgaatctccttttccaagtcaccttcgctaaataaacatgtaacagtgcatccatattttaaatttatcacaactttttcataacttatttccccatttactcctctttttacttaaagaatgtgcatttgatcattccaatgataaactctttaggaatagatgacttgctgtcttgtggaacttctagacttattggttaagtctgttaggaatctatttctccaagacttttccttcttataggtcaaaaggataagtagtccatagtatgaataactgaggggagtgaagtctttttccttattccattggagtcttggcgctgcagcgtgtgtaaagatgtatacgatagagagttttttaaaacctaggttcttaatagtgaggctatttaaagaaagaaattaaggtagattaagccatcgattgtatcatagagaaagtgtgaaaaactacttttagaaatctgttgtcaatattgatttttgaagaaactttggtcagtgttaactatgaagaaacatttaaacatttttgatcatttgtaacaagccttgtttaacttgtacttattttgcttgaagcatcacttgaaaaggtttactcctattcataatttaattgtaattataataaaccatatcattttattaaaagtcaaaacaataaaaaattttgcacttcacagttataagcacaaataggttccagcaaccaaaattgaagaaatcttgaactttgaccgtctttacctaaagattaggttaaaatttgagtgagaacgcattctctctgcatgatttctctgctctacaaatgttttaactgcctctttgaaggtggagaagtcatggtagcgtttgaaatcatcacagacatgttacataccttttccttgagtatacgctccccaaaattgtttcacaaaaagaatgaaaataattttatgtttttggcctgctatttatatcttggctttctgaacatatattaaatttgacaagaaactgta

SEQ ID NO: 153723 - DNA, 2845 bp, Homo sapiens
  Payload ID: 10228
  Gene Symbol: MFAP5
  Gene Name: microfibrillar associated protein 5
  Uniprot ID: Q13361
  ENST ID: ENST00000359478
  CDS Start-End: 189-710
tctacgcctagcctggctttcttgctctccctcatctcattgtttcagcggaggccaaatctgaagtcctttccagggagtggctctgttcatcttattcgccagccaaagtaggaacagcgtaagaggagagagacacattcagcagccaaaggactcggtggaaagagcagaacaccatagacaatatgtcgctcttgggacccaaggtgctgctgtttcttgctgcattcatcatcacctctgactggatacccctgggggtcaatagtcaacgaggagacgatgtgactcaagcgactccagaaacattcacagaagatcctaatctggtgaatgatcccgctacagatgaaacagttttggctgttttggctgatattgcaccttccacagatgacttggcctccctcagtgaaaaaaataccactgcagagtgctgggatgagaaatttacctgcacaaggctctactctgtgcatcggccggttaaacaatgcattcatcagttatgcttcaccagtttacgacgtatgtacatcgtcaacaaggagatctgctctcgtcttgtctgtaaggaacacgaagctatgaaagatgagctttgccgtcagatggctggtctgccccctaggagactccgtcgctccaattacttccgacttcctccctgtgaaaatgtggatttgcagagacccaatggtctgtgatcattgaaaaagaggaaagaagaaaaaatgtatgggtgagaggaaggaggatctccttcttctccaaccattgacagctaacccttagacagtatttcttaaaccaatccttttgcaatgtccagcttttacccctactctctactttttcacccaaactgataacatttatctcattttctagcacttaaaatacaaagtctatattattgcataattttgctgcttctcaatatcatagacacagtgaatagatgatgactatatggcttatatacaaacattctatgtacaatttcaagggagactaaactttaggctaataatctttactattgaatctgtctgatatagatcttagggttgaagaagctatctttgtctatttgggctaaccatagaatttcatttattttcctcacaatattttcctagaccaactccccatcattcacgtgttcctctttactcttactttaactattttgctggcttgcccgaaaatttgcctggcaagtcttccttataagacacatcatggtaagttttgtagtcctgtaagattctgcaacacagtcaagaattatacaatcctactagcaatatataaggacccaaaatgtcttctgctaagctcagaggctggggctaaagcatgaggactatgccagctatagaacttggactcataattcgctatccaatttttcatgcagttgtctagtcgggaagtaaggttggaaactaagtctcatttactgattcgtttatgggtagtaccgggatgaacccaccaccacaaagcaaattagacaacttaatgtgaaatcataccattggttgacgtttccttgagttgctacttcgttcatcttcacaacttaacaagtgcacggtcgaattattgtgcaagtggcttttggatatcctgattggggcctaagaagggcattcagacttgaattttaataggcagacagaaagtttgcctaatagttaatacgaaagagtgaaagaaacacaatattcagacaacccacattcttatcctggctctagcagtaaccacgtagccttggataagccattttccttcattaggtcctggtttaatttcctcatctttaaaatgagaaggttaaatttatcttagtactgctgggcgcagtggctcatgcctgtaatctgagcactttgggaagctgaggcgggtggatcacttgaggtcagaaatttgagacgagcctggccaacatggtgaaaccccatctctactaaaaatacaaaaattagctgggcgtggtggcacgtgcctgtaatcccagctactcgggaggctgaggcaggagaatcaattgaacctgggaggcagaggttgcagtgagccgagatggcgccattgcactccagcctgggtgacaaaagcaaaagtccatcttaagaaatatatatatatattatatatattcttagttctaagatttcctttaattctatgattctctggatttaaatgcattattcatatttcttgaagcttagatacagtctaattcatagcaaccatatctgctttatcctaggtgagggtagcagtccacaatggaatagaagaaaatcccattataacaaatgacaaattatatatcatgaatccttctgtctgactaactcaataactttctataaaagccaatggaattcaaataggagctaggagacaacaagttatatatgacagtggaggttgtattccttttatattgctgagaaaactagttaaatgatcagattcttgctgttaagaaacaatttcgtttaatgggatctgtacaactgattttaaaaaaatgctacaaaaagccccaaagcatataatctctactccttacagtctctagaattaaatgtactcatttagacaacatattaaatgcatattttagccactttagagaaacctcataggcacagagtttccaagattaattttaagaatatcttcacgaacttgaccctcctactccacattgcaacatttccatcagacagcatttcaattccagtattatgtatattgcaaattaaacattttaaaatatttttttccaatttatttctcaaaataaaatgtc

SEQ ID NO: 153724 - DNA, 1195 bp, Homo sapiens
  Payload ID: 10228
  Gene Symbol: MFAP5
  Gene Name: microfibrillar associated protein 5
  Uniprot ID: Q13361
  ENST ID: ENST00000396549
  CDS Start-End: 203-694
attgtaacacacattctacgcctagcctggctttcttgctctccctcatctcattgtttcagcggaggccaaatctgaagtcctttccagggagtggctctgttcatcttattcgccagccaaagtaggaacagcgtaagaggagagagacacattcagcagccaaaggactcggtggaaagagcagaacaccatagacaatatgtcgctcttgggacccaaggtgctgctgtttcttgctgcattcatcatcacctctgactggatacccctgggggtcaatagtcaacgaggagacgatgtgactcaagcgactccagaaacattcacagaagatcctaatctggtgaatgatcccgctacagatgaaacagttttggctgttttggctgatattgcaccttccacagatgacttggagtgctgggatgagaaatttacctgcacaaggctctactctgtgcatcggccggttaaacaatgcattcatcagttatgcttcaccagtttacgacgtatgtacatcgtcaacaaggagatctgctctcgtcttgtctgtaaggaacacgaagctatgaaagatgagctttgccgtcagatggctggtctgccccctaggagactccgtcgctccaattacttccgacttcctccctgtgaaaatgtggatttgcagagacccaatggtctgtgatcattgaaaaagaggaaagaagaaaaaatgtatgggtgagaggaaggaggatctccttcttctccaaccattgacagctaacccttagacagtatttcttaaaccaatccttttgcaatgtccagcttttacccctactctctactttttcacccaaactgataacatttatctcattttctagcacttaaaatacaaagtctatattattgcataattttgctgcttctcaatatcatagacacagtgaatagatgatgactatatggcttatatacaaacattctatgtacaatttcaagggagactaaactttaggctaataatctttactattgaatctgtctgatatagatcttagggttgaagaagctatctttgtctatttgggctaaccatagaatttcatttattttcctcacaatattttcctagaccaactccccatcattcacgtgttcctctttactcttactttaactattttgctggcttgcccga

SEQ ID NO: 153725 - DNA, 2308 bp, Homo sapiens
  Payload ID: 10228
  Gene Symbol: MFAP5
  Gene Name: microfibrillar associated protein 5
  ENST ID: ENST00000433590
  CDS Start-End: 261-707
atttggaatgagggtgtgagcaactgcaaattcccatctcccttctcattccagcctcattgtaacacacattctacgcctagcctggctttcttgctctccctcatctcattgtttcagcggaggccaaatctgaagtcctttccagggagtggctctgttcatcttattcgccagccaaagtaggaacagcgtaagaggagagagacacattcagcagccaaaggactcggtggaaagagcagaacaccatagacaatatgtcgctcttgggacccaaggtgctgctgtttcttgctgcattcatcatcacctctgactggatacccctgggggtcaatagtcaacgaggagacgatgtgactcaagcgactccagaaacattcacagaagatcctaatctggtgaatgatcccgctacagatgaaacagagtgctgggatgagaaatttacctgcacaaggctctactctgtgcatcggccggttaaacaatgcattcatcagttatgcttcaccagtttacgacgtatgtacatcgtcaacaaggagatctgctctcgtcttgtctgtaaggaacacgaagctatgaaagatgagctttgccgtcagatggctggtctgccccctaggagactccgtcgctccaattacttccgacttcctccctgtgaaaatgtggatttgcagagacccaatggtctgtgatcattgaaaaagaggaaagaagaaaaaatgtatgggtgagaggaaggaggatctccttcttctccaaccattgacagctaacccttagacagtatttcttaaaccaatccttttgcaatgtccagcttttacccctactctctactttttcacccaaactgataacatttatctcattttctagcacttaaaatacaaagtctatattattgcataattttgctgcttctcaatatcatagacacagtgaatagatgatgactatatggcttatatacaaacattctatgtacaatttcaagggagactaaactttaggctaataatctttactattgaatctgtctgatatagatcttagggttgaagaagctatctttgtctatttgggctaaccatagaatttcatttattttcctcacaatattttcctagaccaactccccatcattcacgtgttcctctttactcttactttaactattttgctggcttgcccgaaaatttgcctggcaagtcttccttataagacacatcatggtaagttttgtagtcctgtaagattctgcaacacagtcaagaattatacaatcctactagcaatatataaggacccaaaatgtcttctgctaagctcagaggctggggctaaagcatgaggactatgccagctatagaacttggactcataattcgctatccaatttttcatgcagttgtctagtcgggaagtaaggttggaaactaagtctcatttactgattcgtttatgggtagtaccgggatgaacccaccaccacaaagcaaattagacaacttaatgtgaaatcataccattggttgacgtttccttgagttgctacttcgttcatcttcacaacttaacaagtgcacggtcgaattattgtgcaagtggcttttggatatcctgattggggcctaagaagggcattcagacttgaattttaataggcagacagaaagtttgcctaatagttaatacgaaagagtgaaagaaacacaatattcagacaacccacattcttatcctggctctagcagtaaccacgtagccttggataagccattttccttcattaggtcctggtttaatttcctcatctttaaaatgagaaggttaaatttatcttagtactgctgggcgcagtggctcatgcctgtaatctgagcactttgggaagctgaggcgggtggatcacttgaggtcagaaatttgagacgagcctggccaacatggtgaaaccccatctctactaaaaatacaaaaattagctgggcgtggtggcacgtgcctgtaatcccagctactcgggaggctgaggcaggagaatcaattgaacctgggaggcagaggttgcagtgagccgagatggcgccattgcactccagcctgggtgacaaaagcaaaagtccatcttaagaaatatatatatatattatatatattcttagttctaagatttcctttaattctatgattctctggatttaaatgcattattcatatttcttgaagcttagatacagtctaattcatagcaaccatatctgctttatcctaggtgagggtagcagtccac

SEQ ID NO: 153726 - DNA, 566 bp, Homo sapiens
  Payload ID: 10228
  Gene Symbol: MFAP5
  Gene Name: microfibrillar associated protein 5
  ENST ID: ENST00000535336
  CDS Start-End: 102-431
gttcatcttattcgccagccaaagtaggaacagcgtaagaggagagagacacattcagcagccaaaggactcggtggaaagagcagaacaccatagacaatatgtcgctcttgggacccaaggtgctgctgtttcttgctgcattcatcatcacctctgactggatacccctgggggtcaatagtcaacgaggagacgatgtgactcaagcgactccagaaacattcacagaagatcctaatctggtgaatgatcccgctacagatgaaacagttttggctgttttggctgatattgcaccttccacagatgacttggatgagctttgccgtcagatggctggtctgccccctaggagactccgtcgctccaattacttccgacttcctccctgtgaaaatgtggatttgcagagacccaatggtctgtgatcattgaaaaagaggaaagaagaaaaaatgtatgggtgagaggaaggaggatctccttcttctccaaccattgacagctaacccttagacagtatttcttaaaccaatccttttgcaatgtccagcttttacccc

SEQ ID NO: 153727 - DNA, 620 bp, Homo sapiens
  Payload ID: 10228
  Gene Symbol: MFAP5
  Gene Name: microfibrillar associated protein 5
  ENST ID: ENST00000537009
  CDS Start-End: 79-495
gtaggaacagcgtaagaggagagagacacattcagcagccaaaggactcggtggaaagagcagaacaccatagacaatatgtcgctcttgggacccaaggtgctgctgtttcttgctgcattcatcatcacctctgactggatacccctgggggtcaatagtcaacgaggagacgatgtgactcaagcgactccagaaacattcacagaagatcctaatctggtgaatgatcccgctacagatgaaacagttttggctgttttggctgatattgcaccttccacagatgacttggcctccctcagtgaaaaaaataccactgcagagtgctgggatgagaaatttacctgcacaaggctctactctgtgcatcggccggttaaacaatgcattcatcagttatgcttcaccagtttacgacgtatgtacatcgtcaacaaggagatctgctctcgtcttgtctgtaaggaacacgaagctatgaaagatccatgattagaagaattggcagctggatatataaaggaaactaacatttactgctcacctgtgctagatgagctttgccgtcagatggctggtctgccccctaggagactccgtcgctccaattacttccg

SEQ ID NO: 153728 - DNA, 492 bp, Homo sapiens
  Payload ID: 10228
  Gene Symbol: MFAP5
  Gene Name: microfibrillar associated protein 5
  Uniprot ID: Q13361
  ENST ID: ENST00000540087
  CDS Start-End: 1-492
atgtcgctcttgggacccaaggtgctgctgtttcttgctgcattcatcatcacctctgactggatacccctgggggtcaatagtcaacgaggagacgatgtgactcaagcgactccagaaacattcacagaagatcctaatctggtgaatgatcccgctacagatgaaacagttttggctgttttggctgatattgcaccttccacagatgacttggagtgctgggatgagaaatttacctgcacaaggctctactctgtgcatcggccggttaaacaatgcattcatcagttatgcttcaccagtttacgacgtatgtacatcgtcaacaaggagatctgctctcgtcttgtctgtaaggaacacgaagctatgaaagatgagctttgccgtcagatggctggtctgccccctaggagactccgtcgctccaattacttccgacttcctccctgtgaaaatgtggatttgcagagacccaatggtctgtga

SEQ ID NO: 153729 - DNA, 585 bp, Homo sapiens
  Payload ID: 10228
  Gene Symbol: MFAP5
  Gene Name: microfibrillar associated protein 5
  ENST ID: ENST00000535411
  CDS Start-End: 1-491
ttcttgctgcattcatcatcacctctgactggatacccctgggggtcaatagtcaacgaggagacgatgtgactcaagcgactccagaaacattcacagaagatcctaatctggtgaatgatcccgctacagatgaaacagttttggctgttttggctgatattgcaccttccacagatgacttggcctccctcagtgaaaaaaataccactgcagagtgctgggatgagaaatttacctgcacaaggctctactctgtgcatcggccggttaaacaatgcattcatcagttatgcttcaccagtttacgacgtatgtacatcgtcaacaaggagatctgctctcgtcttgtctgtaaggaacacgaagctatgaaagatgagctttgccgtcagatggctggtctgccccctaggagactccgtcgctccaattacttccgacttcctccctgtgaaaatgtggatttgcagagacccaatggtctgtgatcattgaaaaagaggaaagaagaaaaaatgtgtggccaagatcccctctcgcaggcacatgactgcctcattcacaaatcttgtcaccaggcgg

SEQ ID NO: 153730 - DNA, 972 bp, Homo sapiens
  Payload ID: 10228
  Gene Symbol: MFAP5
  Gene Name: microfibrillar associated protein 5
  ENST ID: ENST00000543369
  CDS Start-End: 64-519
gaggagagagacacattcagcagccaaaggactcggtggaaagagcagaacaccatagacaatatgtcgctcttgggacccaaggtgctgctgtttcttgctgcattcatcatcacctctgacgatgtgactcaagcgactccagaaacattcacagaagatcctaatctggtgaatgatcccgctacagatgaaacagttttggctgttttggctgatattgcaccttccacagatgacttggagtgctgggatgagaaatttacctgcacaaggctctactctgtgcatcggccggttaaacaatgcattcatcagttatgcttcaccagtttacgacgtatgtacatcgtcaacaaggagatctgctctcgtcttgtctgtaaggaacacgaagctatgaaagatgagctttgccgtcagatggctggtctgccccctaggagactccgtcgctccaattacttccgacttcctccctgtgaaaatgtggatttgcagagacccaatggtctgtgatcattgaaaaagaggaaagaagaaaaaatgtatgggtgagaggaaggaggatctccttcttctccaaccattgacagctaacccttagacagtatttcttaaaccaatccttttgcaatgtccagcttttacccctactctctactttttcacccaaactgataacatttatctcattttctagcacttaaaatacaaagtctatattattgcataattttgctgcttctcaatatcatagacacagtgaatagatgatgactatatggcttatatacaaacattctatgtacaatttcaagggagactaaactttaggctaataatctttactattgaatctgtctgatatagatcttagggttgaagaagctatctttgtctatttgggctaaccatagaatttcatttattttcctcacaatattttcctagaccaactccccatcattc

SEQ ID NO: 153731 - DNA, 840 bp, Homo sapiens
  Payload ID: 10228
  Gene Symbol: MFAP5
  Gene Name: microfibrillar associated protein 5
  ENST ID: ENST00000544211
  CDS Start-End: 66-452
aagaggagagagacacattcagcagccaaaggactcggtggaaagagcagaacaccatagacaatatgtcgctcttgggacccaaggtgctgctgtttcttgctgcattcatcatcacctctgactggatacccctgggggtcaatagtcaacgaggagacgatgtgactcaagcgactccagaaacattcacagaagatcctaatctggtgaatgatcccgctacagatgaaacagttttggctgttttggctgatattgcaccttccacagatgacttggagtgctgggatgagaaatttacctgcacaaggctctactctgtgcatcggccggttaaacaatgcattcatcagttatgcttcaccagtttacgacgtatgtacatcgtcaacaaggagatctgctctcgtcttgtctgtaaggaacacgaagctatgaaagatccatgattagaagaattggcagctggatatataaaggaaactaacatttactgctcacctgtgctagatgagctttgccgtcagatggctggtctgccccctaggagactccgtcgctccaattacttccgacttcctccctgtgaaaatgtggatttgcagagacccaatggtctgtgatcattgaaaaagaggaaagaagaaaaaatgtatgggtgagaggaaggaggatctccttcttctccaaccattgacagctaacccttagacagtatttcttaaaccaatccttttgcaatgtccagcttttacccctactctctactttttcacccaaactgataacatttatctcattttctagcacttaaaatacaaagtctatattattgca

SEQ ID NO: 153732 - DNA, 388 bp, Homo sapiens
  Payload ID: 10228
  Gene Symbol: MFAP5
  Gene Name: microfibrillar associated protein 5
  ENST ID: ENST00000543467
  CDS Start-End: 1-240
tactctgtgcatcggccggttaaacaatgcattcatcagttatgcttcaccagtttacgacgtatgtacatcgtcaacaaggagatctgctctcgtcttgtctgtaaggaacacgaagctatgaaagatgagctttgccgtcagatggctggtctgccccctaggagactccgtcgctccaattacttccgacttcctccctgtgaaaatgtggatttgcagagacccaatggtctgtgatcattgaaaaagaggaaagaagaaaaaattttgcttgcacttgctgtccttccaccatgggatgactctcatcagatgatggcaccatgttcttggacttctcagcctccagaactgtgagaaataaatttcttttctttataaatta

SEQ ID NO: 153733 - DNA, 582 bp, Homo sapiens
  Payload ID: 10228
  Gene Symbol: MFAP5
  Gene Name: microfibrillar associated protein 5
  ENST ID: ENST00000544889
  CDS Start-End: 310-582
atttgattacctgaaaccctaaagagacagagggaatgtgtgtatgtctgtgtgtgtgtgaaagggctggagggggcaatggggaatgtcactgaacttagtcttgagcagacctcccaaataaccgtggaattctgatgaaggagacgccaagatgagcagatgatatgaaaaagtcacgcatatgagaaaggaagattccacatcaggggtgaaagaggccaaagggtagggccaagtacggaccatgtagaatgtaaaatttcctctgacttggtagcagagaataataaaagcaagaataatgatatgtcgctcttgggacccaaggtgctgctgtttcttgctgcattcatcatcacctctgactggatacccctgggggtcaatagtcaacgaggagacgatgtgactcaagcgactccagaaacattcacagaagatcctaatctggtgaatgatcccgctacagatgaaacagttttggctgttttggctgatattgcaccttccacagatgacttggcctccctcagtgaaaaaaataccactgcagagtgctgggatgagaaatttacctgc

SEQ ID NO: 153734 - DNA, 2155 bp, Homo sapiens
  Payload ID: 10229
  Gene Symbol: MFAP1
  Gene Name: microfibrillar-associated protein 1
  Uniprot ID: P55081
  ENST ID: ENST00000267812
  CDS Start-End: 234-1553
gcagaaaccgactcgacttcctagctgtgggcgcccaaacgtcgtccaccatcccacaatcctctcgtcacgtatttccggtttatctagctcagccgtaagtagtttctctatcagtcgcgcagctgtgttcgcggactcaggtggaaggaatttcttctcttcgttgacgttgctggtgttcactgtttggaattagtcaagtttcgggaatcaccgtcgctgccatcaacatgtcggtcccaagcgctctcatgaagcaaccgcccattcagtctacggctggggccgtcccagttcgcaatgagaaaggtgagatttcaatggaaaaagtgaaggtaaagcgttatgtgtccggaaaaaggccagactatgcccctatggagtcctcagatgaggaggatgaagaatttcagttcattaagaaagccaaagaacaagaagcagagcctgaggaacaggaggaggattcatccagtgacccccggctacggcgtttacagaaccgtattagtgaagatgtggaagagagattggctcgacatcgaaaaatagtggaacctgaagtggtaggagagagtgactcagaagtagaaggagatgcttggcgcatggaacgagaagacagcagtgaagaagaggaggaggaaattgatgatgaggaaatagagcggcggcgtggcatgatgcgtcagcgagcacaggagagaaaaaatgaagagatggaagtcatggaagtggaagatgagggtcgttctggagaggagtcagaatcagagtctgagtatgaagagtacacagacagtgaagatgagatggagcctcgccttaagccagtcttcattcgaaagaaggaccgagtgacagttcaagaacgtgaagccgaagcattgaaacagaaggagctggagcaggaagcaaaacgcatggctgaggaaaggcgcaagtacacactcaagattgtcgaagaggaaaccaaaaaagagctggaagagaacaagcgatccctggctgcattggatgcactcaatactgatgatgaaaatgatgaggaggaatatgaggcatggaaagttcgagagctaaaaagaatcaagagggacagagaagatcgagaagcgcttgagaaggagaaagcagaaattgaacgcatgcgaaacctgactgaggaagagaggagagctgaacttcgggcaaacggcaaagtcattaccaacaaagctgttaagggcaaatacaagttcttacagaagtattatcaccggggtgccttcttcatggatgaggatgaagaagtatacaagagagatttcagcgctcctaccctggaggatcatttcaataaaaccattcttcctaaagtcatgcaggtcaagaactttggacgctcaggtcgcaccaaatacactcaccttgtggatcaagataccacctcctttgactcagcttggggccaagagagtgcccagaacacaaagttcttcaaacaaaaggcagctggggtacgagatgtatttgagcggccatctgccaagaagcggaaaactacctagggtccaactgcttattcttccaactgtggaacacaaggggagtctcagcatctggtccttgatttggttttttcattgtttccttggcccctgtatccagatattggacttactgctatacttgtgatactgggtagcccagactttgaaggtgctttgtgaggtttggactcatgctgagaaacccacaggaaagcactgtccaggtaggattagaggcttcccacttaaaactatttctgagaaatcttaggttttatcactgctatggtttcccatatttacttgggactgttctgactttctttttccagcccttagcttgggttagaaaagtggacatgtaagtgaacaatgcattacttctaccttaggtttaggagtaatatacccggaaatctaagctcatggaaacatgttttccatttttgcttggagtccgtttttctagttgtacatactttttgatccatatatgtgtgcatgtcaagaaataaaagaatcacacaacaaggagatttttagcatgatactggaaataaaatgtccaagctgacaagtattaattgcctattaaagtaaaagataacaattgtcaggca

SEQ ID NO: 153735 - DNA, 970 bp, Homo sapiens
  Payload ID: 10230
  Gene Symbol: MFAP2
  Gene Name: microfibrillar-associated protein 2
  Uniprot ID: P55001
  ENST ID: ENST00000375534
  CDS Start-End: 4-552
gccatgagagctgcctacctcttcctgctattcctgcctggcttgctggctcagggccagtatgacctggacccgctgccgccgttccctgaccacgtccagtacacccactatagcgaccagatcgacaacccagactactatgattatcaagaggtgactcctcggccctccgaggaacagttccagttccagtcccagcagcaagtccaacaggaagtcatcccagccccaaccccagaaccaggaaatgcagagctggagcccacagagcctgggcctcttgactgccgtgaggaacagtacccgtgcacccgcctctactccatacacaggccttgcaaacagtgtctcaacgaggtctgcttctacagcctccgccgtgtgtacgtcattaacaaggagatctgtgttcgtacagtgtgtgcccatgaggagctcctccgagctgacctctgtcgggacaagttctccaaatgtggcgtgatggccagcagcggcctgtgccaatccgtggcggcctcctgtgccaggagctgtgggagctgctagggtggtgctggcatcctgagtcctggccctcctgggatctggggccctcgggccctgcctgacctggtgcttttttccccatccccatgttccttttattctgtaaaaagttagtggactgcagccctgggggttgcaggctgcggtgcctcaggcccctccttcagcctgtggccacctctggggcacaatgggggctccccactgcccagtctgcccctcgggttgggggagtatcccaggcctctctgtgggacctgggcccctgacgggccttctcagcccgttttgaggacagacagtcccccgaggtaggctacatccccccaccccagctggtctgcttggatttcctacagcccccgtgggcatggaccacctttattttatacaaaattaaaaacaagtttttacaaaa

SEQ ID NO: 153736 - DNA, 1260 bp, Homo sapiens
  Payload ID: 10230
  Gene Symbol: MFAP2
  Gene Name: microfibrillar-associated protein 2
  Uniprot ID: P55001
  ENST ID: ENST00000375535
  CDS Start-End: 291-842
gaggaagctttgcacagacgtgaggacggccccgggcgcctctaccccggggacacccccccccccaggagatggaaccccgagggcacggcgtggcggcccatgcgggcagctcgcgttaggacccagcggctccggggctggagggcgggcgccagccccgtcgggggcccggagggggactcggagcgggccaaggggcggctccggcgggcggactcggagcgggcggcggagtgacccggacagctgtcctctctgacaccaccccggcctgcctctttgttgccatgagagctgcctacctcttcctgctattcctgcctgcaggcttgctggctcagggccagtatgacctggacccgctgccgccgttccctgaccacgtccagtacacccactatagcgaccagatcgacaacccagactactatgattatcaagaggtgactcctcggccctccgaggaacagttccagttccagtcccagcagcaagtccaacaggaagtcatcccagccccaaccccagaaccaggaaatgcagagctggagcccacagagcctgggcctcttgactgccgtgaggaacagtacccgtgcacccgcctctactccatacacaggccttgcaaacagtgtctcaacgaggtctgcttctacagcctccgccgtgtgtacgtcattaacaaggagatctgtgttcgtacagtgtgtgcccatgaggagctcctccgagctgacctctgtcgggacaagttctccaaatgtggcgtgatggccagcagcggcctgtgccaatccgtggcggcctcctgtgccaggagctgtgggagctgctagggtggtgctggcatcctgagtcctggccctcctgggatctggggccctcgggccctgcctgacctggtgcttttttccccatccccatgttccttttattctgtaaaaagttagtggactgcagccctgggggttgcaggctgcggtgcctcaggcccctccttcagcctgtggccacctctggggcacaatgggggctccccactgcccagtctgcccctcgggttgggggagtatcccaggcctctctgtgggacctgggcccctgacgggccttctcagcccgttttgaggacagacagtcccccgaggtaggctacatccccccaccccagctggtctgcttggatttcctacagcccccgtgggcatggaccacctttattttatacaaaattaaaaacaagtttttacaaaa

SEQ ID NO: 153737 - DNA, 2891 bp, Homo sapiens
  Payload ID: 10231
  Gene Symbol: MFAP3
  Gene Name: microfibrillar-associated protein 3
  Uniprot ID: P55082
  ENST ID: ENST00000322602
  CDS Start-End: 483-1571
ggagctagacggcggtcgggtaggtgacggcttggttggggtcgctgcgaggggactactaggagcgccgaggcgtgagtcgtagcctgtggcttggggtcgggagtgcaggaggcgaaaatgtttgccattcttttgaaagtctggcctgggtgtgggagttcggtcatcgaacacttactgagagccagatacctgccaggcactgccctgggctccagggacacatcagtcaacgaacggaagggccctgctctcaagcagtgcgaaaagcagattataaacaagtcaacaaacgggattatctaaggtggtagttctctactcacatcttttaatcttgaagactagaaaatataactggatctaccacttgtttggaaaatttctctaccaagcaataaattacccgctgtgcttttgttgtagtgtagaagtttttgagttctccaaatctaaacaagattttgtcccattttcccatgaagctacattgttgcttattcactttagtggcaagtattattgtgccagctgcttttgttttggaagatgtggacttcgaccaaatggtttcactggaagcaaatcgtagttcttacaatgcatcctttccctcaagctttgaactctcagcaagttcccactcggatgatgatgtcatcatagccaaagagggaactagcgtttcaattgagtgtcttctcacagccagtcactatgaagatgtccattggcacaattcaaaaggacagcaactggatggcagaagcagaggtggaaagtggttggtttctgataacttcctaaacatcaccaatgtagcttttgatgaccgtgggctctatacctgtttcgtcacctctccaattcgtgcctcctactctgtcaccctacgtgttatcttcacctcgggagacatgagtgtctattacatgattgtttgcctgattgcctttacaatcacactcatcttgaatgtcacacggctgtgcatgatgagcagccatcttcgcaagactgagaaggctatcaatgagttctttagaactgaaggggctgagaaacttcagaaggcctttgagattgcaaaacgtatccccatcattacctcagccaaaactctggagctcgccaaagtcacacaatttaagaccatggagtttgctcgttatattgaagaactggcaagaagtgtccctcttccacctcttattctaaactgtcgagcctttgttgaggagatgtttgaggctgtgcgagtggacgaccctgatgacctgggtgaaagaattaaagagagacctgccttgaatgctcaaggtggcatctatgtcattaacccagagatgggacggagtaattcaccaggaggagattcagatgatggctctctgaatgaacaaggccaggaaatagcagttcaggtttctgtccaccttcagtcagaaaccaaaagtattgatacagagtctcaaggcagcagtcatttcagtccacctgatgatataggatctgcagaatctaactgtaactacaaagatggggcatatgaaaactgtcagctgtaacctacaatgctgtaacccagtacctacaaaatcagctcgctctcagaaaaggaacctgtttcttagaagaagtaacatttttgccaaaagatgactggggttttccgtttgttaatattaagcacatcagaacgtgaattgccaaagtcttcattagaaggcagcatttttcctctctgatacttttcagtcattttccttagagctttattaaattatgcatgctaagatttaaaggagccccagataaacatgatggggaaaagcactgaactaagagtcccatggtttctcttctggtcacagttcttccattggttggatctgatacttatcttgggacttcagtttttccgtcaataagatgagggattaggtgagatctgaagttgtttctagctctatagcttcttaacccatcacctttaaattaccagaatcttcactcatctctaagtaaacctttcccgggacttttactcgcttcttttggaaaggattaagctgagatctaaatttccacaccaatgtcataatgcacagaggtttttgaaaaacatctgagtgtttttcagatgttttgccatgtggagcatataatgatatgtgcaagattgaatcttttcaatgtagcacatgtctgtagggttatacagatgtcagagagctaactgctctgtaaactactttccatgagtaaattggtccttggtgggggtgtatcatatttttaacttactgagatatcattttagttcattgaggttggcagggattgcctaactgatcttccaaagtgagcagtttatttctaaggtataacgtctttgatgcttttagaataagaacagtgtcaaatcatctgtcttctggaaaatcatggattttcatatttctgttaacagaatttctcaggctttccctttttaaaagtattggactctacaaataggttctatatttgggatctcatcctaggagaaaacccaaaactggattcctcttaagacctctgtcaaccctcctgccctttgtggtcttaggtatggtgctataggttgcatgcgtctttatcttgtttgtttggttaatattttgttgttgaggtttttatttttgtttacttcagatacataattctgagctatggctgcttttgtagcctttccaagaagcactaacctgaaataagattagataattgtgagggtgtgttactatattaaaatacacacacaactgatctagacatcaagaggaagaaaaatgatggatgatgccacctgcttcaactgtatataataaacacttatgatgaca

SEQ ID NO: 153738 - DNA, 1186 bp, Homo sapiens
  Payload ID: 10231
  Gene Symbol: MFAP3
  Gene Name: microfibrillar-associated protein 3
  Uniprot ID: P55082
  ENST ID: ENST00000439768
  CDS Start-End: 197-847
aaacttccgagttaagccgccgctgaggccggaaggagctagacggcggtcgggtggaaagtggttggtttctgataacttcctaaacatcaccaatgtagcttttgatgaccgtgggctctatacctgtttcgtcacctctccaattcgtgcctcctactctgtcaccctacgtgttatcttcacctcgggagacatgagtgtctattacatgattgtttgcctgattgcctttacaatcacactcatcttgaatgtcacacggctgtgcatgatgagcagccatcttcgcaagactgagaaggctatcaatgagttctttagaactgaaggggctgagaaacttcagaaggcctttgagattgcaaaacgtatccccatcattacctcagccaaaactctggagctcgccaaagtcacacaatttaagaccatggagtttgctcgttatattgaagaactggcaagaagtgtccctcttccacctcttattctaaactgtcgagcctttgttgaggagatgtttgaggctgtgcgagtggacgaccctgatgacctgggtgaaagaattaaagagagacctgccttgaatgctcaaggtggcatctatgtcattaacccagagatgggacggagtaattcaccaggaggagattcagatgatggctctctgaatgaacaaggccaggaaatagcagttcaggtttctgtccaccttcagtcagaaaccaaaagtattgatacagagtctcaaggcagcagtcatttcagtccacctgatgatataggatctgcagaatctaactgtaactacaaagatggggcatatgaaaactgtcagctgtaacctacaatgctgtaacccagtacctacaaaatcagctcgctctcagaaaaggaacctgtttcttagaagaagtaacatttttgccaaaagatgactggggttttccgtttgttaatattaagcacatcagaacgtgaattgccaaagtcttcattagaaggcagcatttttcctctctgatacttttcagtcattttccttagagctttattaaattatgcatgctaagatttaaaggagccccagataaacatgatggggaaaagcactgaactaagagtcccatggtttctcttctggtcacagttcttccattggttggatctgatacttatcttg

SEQ ID NO: 153739 - DNA, 520 bp, Homo sapiens
  Payload ID: 10231
  Gene Symbol: MFAP3
  Gene Name: microfibrillar-associated protein 3
  ENST ID: ENST00000520899
  CDS Start-End: 471-520
agacggcggtcgggtaggtgacggcttggttggggtcgctgcgaggggactactaggagcgccgaggcgtgagtcgtagcctgtggcttggggtcgggagtgcaggaggcgaaaatgtttgccattcttttgaaagtctggcctgggtgtgggagttcggtcatcgaacacttactgagagccagatacctgccaggcactgccctgggctccagggacacatcagtcaacgaacggaagggccctgctctcaagcagtgcgaaaagcagattataaacaagtcaacaaacgggattatctaaggttctctactcacatcttttaatcttgaagactagaaaatataactggatctaccacttgtttggaaaatttctctaccaagcaataaattacccgctgtgcttttgttgtagtgtagaagtttttgagttctccaaatctaaacaagattttgtcccattttcccatgaagctacattgttgcttattcactttagtggcaagtattattgtgcc

SEQ ID NO: 153740 - DNA, 567 bp, Homo sapiens
  Payload ID: 10231
  Gene Symbol: MFAP3
  Gene Name: microfibrillar-associated protein 3
  ENST ID: ENST00000522177
  CDS Start-End: 240-567
gagctagacggcggtcgggtaggtgacggcttggttggggtcgctgcgaggggactactaggagcgccgaggcgttctctactcacatcttttaatcttgaagactagaaaatataactggatctaccacttgtttggaaaatttctctaccaagcaataaattacccgctgtgcttttgttgtagtgtagaagtttttgagttctccaaatctaaacaagattttgtcccattttcccatgaagctacattgttgcttattcactttagtggcaagtattattgtgccagctgcttttgttttggaagatgtggacttcgaccaaatggtttcactggaagcaaatcgtagttcttacaatgcatcctttccctcaagctttgaactctcagcaagttcccactcggatgatgatgtcatcatagccaaagagggaactagcgtttcaattgagtgtcttctcacagccagtcactatgaagatgtccattggcacaattcaaaaggacagcaactggatggcagaagcagaggtggaaagtggttggtttctgataacttcctaa

SEQ ID NO: 153741 - DNA, 643 bp, Homo sapiens
  Payload ID: 10231
  Gene Symbol: MFAP3
  Gene Name: microfibrillar-associated protein 3
  ENST ID: ENST00000522782
  CDS Start-End: 273-643
ctactgccccggaagtgctccttcagcgcagaggcgtgccggtgtgtccgagaaaacttccgagttaagccgccgctgaggccggaaggagctagacggcggtcgggttctctactcacatcttttaatcttgaagactagaaaatataactggatctaccacttgtttggaaaatttctctaccaagcaataaattacccgctgtgcttttgttgtagtgtagaagtttttgagttctccaaatctaaacaagattttgtcccattttcccatgaagctacattgttgcttattcactttagtggcaagtattattgtgccagctgcttttgttttggaagatgtggacttcgaccaaatggtttcactggaagcaaatcgtagttcttacaatgcatcctttccctcaagctttgaactctcagcaagttcccactcggatgatgatgtcatcatagccaaagagggaactagcgtttcaattgagtgtcttctcacagccagtcactatgaagatgtccattggcacaattcaaaaggacagcaactggatggcagaagcagaggtggaaagtggttggtttctgataacttcctaaacatcaccaatgtagcttttgatgaccgtgggctctatacctg

SEQ ID NO: 153742 - DNA, 6318 bp, Homo sapiens
  Payload ID: 10232
  Gene Symbol: MFAP3L
  Gene Name: microfibrillar-associated protein 3-like
  Uniprot ID: O75121
  ENST ID: ENST00000361618
  CDS Start-End: 309-1538
ccgcgctcccggcagccggcggcgcagctcgcaacgctgtgaggcgccggcggaggcggctcgcccgcagtaggcgctaccgggcgtccggcgcagagtgcggcgcagcggccgctgtcgggctggccatggcgaggggtgcacggcggccacctgagtggcgcggcggtgtcaggttcttgctcaagtaccaactctatggacccaggacaggtttgtcccatgacctgctgtgaacagtgtgttgtctgatagaagattcggttggcaaaccatctctctattgccttacagagcaagcaaagaagatggatcgattgaagagccatctgactgtgtgctttctaccttctgtgccctttttaatcctagtatccactctagccaccgctaagagtgtgactaacagcactttaaatggcactaacgtggtcttgggctctgtgcccgtaatcattgccagaactgaccatatcatagtcaaggaagggaacagtgccttgattaactgtagtgtttatggcatccctgacccacagttcaagtggtataattccattggcaagctgctgaaagaagaagaggatgagaaggagagaggaggaggaaaatggcaaatgcacgacagcggcctcctgaacatcaccaaggtatccttctcagaccgaggtaaatacacgtgtgtggcttctaacatctacggcaccgtgaacaacacggtgaccttgcgcgtcatcttcacttctggagacatgggtgtctactacatggtcgtgtgcctggtggccttcaccatcgtcatggtcctcaatatcacccgcctgtgcatgatgagcagccatctaaagaagactgagaaggccatcaatgagttctttaggaccgaaggtgcagagaagctgcagaaggcatttgagatcgccaagcgcatccccatcatcacctccgccaaaactctagagcttgccaaagtcacccagttcaaaaccatggagttcgcccgctacatcgaagagcttgccaggagcgtgcctctgccgcctctcattatgaactgcaggactatcatggaggagattatggaggtggttgggctggaggagcaggggcagaattttgtgaggcatactccagagggccaggaggccgcagacagggatgaggtctacacaatccccaactctctgaagcggagcgactcccctgccgctgactcggacgcctcatcgctgcacgagcaacctcagcaaattgccatcaaggtgtcagttcacccgcagtccaaaaaagagcatgcagatgaccaagagggtggacagtttgaagtcaaagatgtagaggagacagaactgtcggcggaacattcccccgaaactgcagaaccttctaccgatgtcacgtccaccgagctaacatctgaagagccaacacctgttgaggtaccagataaggtactgccgccagcttacctggaagccacagagccagcagtgacacatgacaaaaacacctgcattatttacgaaagccatgtctaataccaaccccgaaaagctatgcatatcaagaaaatcaggggctgctccttgtaatacagatgtagtacgcacttgccgctaagccttaccaggagactctcatcccttaggtaggagtgatgccactttaaaaggagaaacacctgcctgcagtgaatgggactggaatttccccagtagagaagggtgcgagaaacatcagggtgcagaattgataccagacagaaggtgtctatgtgataatgagtttcagaggctgatctctgccaaataccttaattggtgatgccttcttggcaaagagtacaccactgtaagatattctgagttcaagaaccctgtccagtgccccctgcattgcttttccttttaaaaagtataggtctgctacaatagcaaatgcacgtacgtgggttttttgcagtttcttctcagttttaattttgcttttcctttataatggggtcattgttattaatactaattgttctttctggtttagtcctcattgccacttttgtccttatgtttccctagaacacgtacctcagagactttggtatcagtcaccagtaccagggctgatatctacaagtcacattacatttgtcatgttccaaagtagttacgaggcttgttatttttttttcattccccaggcctatttccatagatagctttttttgtttgtttccaacgaagctgctgttaaacgaaactgagaaaaactttgccccggaatagcactttaatagtcaaaaatgtgtttacctgtctgattgagtgagccttttggtgagctcagctgagatgtagagggagattgtaaaaggttaaatatacccacaccacccatgaaagtcactgtttaagttacatcatcctccaaataaagactgattctttacctggaaaatatattgcttccaaagacatcagattcagtggattcctgtaggttatagaatattggcttccaaacaggcttgcagggaccatatgctgttggatgacatataaccaggtccacttttatgaactgcatagctgacttggttgtccttaaagaggaaagcgaaaggttagggtaatagcaaagggaactgtgccatcagattttatgccaaaactgttgaataattatgcagtcctgcaagaaagtggttatatgtgaggtgcgtgatgttatggaaagaagacaaaattagtcatccaaaggcttaatacccactgtgccaataaccagctgcctggctttggacaagtctggacctcaggtcccttatctgtagaaggggcagatgacatgagctctgagcactgttgaaatggtatcactgtcacacagaaccaaaccaatattcacatccttgctccttttcacaatgactttaaagatttttgctttcatctcttggtccacctaacattttcatgcttcattacttaaataagaatgttggttttgagaaatagcattttaaacaaattgtggatcttctccttccaaaaaaaccattaggaccacatctgcaattaagatttaatattggtgagaatgagtggttttatttaattttcccttaaaagcaaaggagacagtaatcttaataaattcataggggccgtggccacatcaggtaatggggttatgatgtccaagattgcatggatcacattggtgatgagagcagacccagatgtttagtcctcactctgtcaccatctgaggaggtgaccttggacaactcccttcctctctctgggatttaatctttttcatctgtaaaatatgcaggtagtactcgagggtctacaggatcccttctagttgaaacatttatagttcacagaaagtttgcagtcttccaggataaccaacccccgttgcatgagacaagcaaaaaatgggtccatgaaattggatacttttgccatccaaactttacaacaaacattatctggctctgtaattgagagcagtgggcttggttttaaacctagccttgattagtttgtttatagataactgttgtggaaggtgatagaactagtcatggagtttgatgagacatctcttgaaaaggactgaactgttgacttctggttagaagtgctttgggcagtcacataaagaaatgagcagtgagaaatcaggagaaattatgactcctgttgggctttctggactagcattgtatgtttttgggttgcagaaaagttttaacaccacctcttagaatataaaaattttccagttgtcatggaggtccacagattcattaccatgggtttatatgcccaaagcaacaacagaggacttaagttcattttgtgatactgtatggatgttaccccatcctattcagttgtcattccacccaaacccatgtgtaggtttccacatggaaaggagaaggcatccattccacctagacattgaatagtgataataagctaaaagtgggcagattttcagtggagcaagagcagaaatatgcggccaaagaatgtttcctgattggttttgctgctttagactgcagtggggagagcttatgtagattttcaaaactttctccctctttaaggcatcataatgctctcggttttgataacaactgacataaagggaggttgacttaaaatgggaatttctccttccaaaaatgctacactcttcctatccatcctacagcttctttatgaaatgagaggccctcctgctagaatatgaaatgcagaagacctcatgactttcagctgatttttcaaagataaagtgaactgttcagcttcatagaaattcatgcgagtgtgactgaacgtgtgtgcatacacactcgtgcacattggactcatttgggcagttttaaaagcttcacactaaatccaaagcctcgtcctttgggtcgtatgtagtcgtttgtaaaatcaatttctggcttctgagtcatcctggtcatatctctagcaatgtttttcttgaaattctgaaaatgattcacatatgtgtgtacatttaattcacttagatgatctgtaaacttggatggtatttattctaaatggggaaaacaattttatatggaaaaatctatgtaatttataatggttttgttttatatattatattttcatatctctagggcacatctatcctcatctttttgtataccatacttagcaaaaagaaatactaatacttgactaaaatctctaggaaccaaacgtgatacatgtgatatatagcttctagaaatcgctctaaaaatctctgaatgtctcatccatcccaagcattattgtgctgtgtcattatgtccagaatgatttgtcttggatgcttatgagcatttgtttttcacaactaaggttgaaagacctgacatctcacacaatggggttctggaattcccctttcctcctttatctgtttttattgtttgtttcatttttaattgcaccagtctatgttgtcgaaactttgttttgaagggcaaatgtgagataacaagaaagcaatgtgatggaaagactggatgaatttacctatggctatgtaaattattttaatggactgataagatgtttcaagtctcatgcttggatctttatttattggtgatctaggatctgctcagctctttagcacatgaagaaaatcaggtacaaaggacatttgcatgtttggaacagcatgctctaagccccgtgcagccaacacaaattaacttgactgtagaaacaccaattccagctgctggaagaaatggtttagaaaggcaaaccagataccttttattctgccctaggaaatacagtgttgatcagtgctaaaactcttcagtggcagtcactgtggttcttttaactggggatttcctttcagtgtttcatttggtaccaaaacagaacatttaccttacatttcagatactctgttttctcagcattgttcagatactttcctttaccgctcttcacgtacccttttggcattgagtaattctataaatgtttctatccttggtttttaaaccaagttattcatactcttaaaatatctaccaaatctcattgtattttcacatattttgagcatcaagatactggtcattttaaaaaatccttcagtaaatagcacagtttattttcctaatgacatttttagggtttcttcattgatcaaccaggtttgggttacacaaatcaattgtgggggaaaaatcaaataaaacaattgcttattatattttccaaaggactgagcatttatcttttattcacgaagatatcatatgaggatgataatgatctttaacagattttttagagatagaatttataaagaggctgatactaagaatactacaatcaaaattgaagctagagaatgtaaaaatagaaagtaaatagttctaagaatattctggcataaattatttttatttagccaataaaatagcctccaaatgtatatctcagacaccatagagctgctaacaatgagaatcaaggaagatgcttgcacttagatttcgtttgttgtatttcagtagttctggatgtcctttgttaaaattggaaaatggaaaaatgtctcgacagaaatgtcaatctggtgattctgtgaactgtaaaatgttcacttttaaaaataaagttgtaaacaagttactcatataagttggtattacagtagcaaaaacagaaaaccatgtgatccatcctgtattttgattgatgctttaataaagggtttgcacagctgtgtgga

SEQ ID NO: 153743 - DNA, 1505 bp, Homo sapiens
  Payload ID: 10232
  Gene Symbol: MFAP3L
  Gene Name: microfibrillar-associated protein 3-like
  Uniprot ID: O75121
  ENST ID: ENST00000393702
  CDS Start-End: 619-927
gaggagaagaagccactaacattgcaggatcgtgtagcgaaacttctgtaggtacttaataattttagagtactctactttttaattaaaaaatcaacttatggttcattagaaaaaacgtggaaattacaaataatatttttaaagaaaatgaaaaaaaaattcctggaaccccaccactcagaaagtcaccagggaacggcccgctgggtttttttccagactcttccatctgtggactttgctttaagagacgtttaagacttacagcgcagtcgcccgggaaggcctgagaagctttcggaagcaaggtggtttgctcgtgattgcatttgattgcaaggagacaggagcccaagctgtgaccagtgacgcagactggaagtcccgtttactgggagagaagaggttaaggaacacccaggtgaacaattaggtcctccacaatgaagacaggtaatgtggaggaaagagagcttgtcatggttcttgctcaagtaccaactctatggacccaggacaggtttgtcccatgacctgctgtgaacagtgtgttgtctgatagaagattcggttggcaaaccatctctctattgccttacagagcaagcaaagaagatggatcgattgaagagccatctgactgtgtgctttctaccttctgtgccctttttaatcctagtatccactctagccaccgctaagagtgtgactaacagcactttaaatggcactaacgtggtcttgggctctgtgcccgtaatcattgccagaactgaccatatcatagtcaaggaagggaacagtgccttgattaactgtagtgtttatggcatccctgacccacagttcaagtggtataattccattggcaagctgctgaaagaagaagaggatgagaaggagagaggaggaggtaggctttaaagttgtatcaaatgtcataataaaatataaacaggagctttggagccagcacccgtgatgttagttcttctcatgcaaatgatttaaagatctcatcttgtcttgtttttctaaggcaggagagaatatatatccttaaggattcaaagaagcaattaattcatttttttccctcattgacacagaagacaaaggacaaacacagaagtctttttaaaggcttcttggaattttgtaatataatacatccaatacattatagagacaaatgtaaaatggattttcctaaataatatattcaatttttaagggagttttgttttctttcatggagatggctggaataaacaatatagccattgtttatcattaaatgtccatttaattcattggccgtggatttaaagaccacacttctgaaagaaacctcagtgcaagtctcagccactggctgggattcctggagacctggctgcagtttctaggctgaggcagggagggagggaggatgcaataacaaggaaggatgtgggacaacaggagactgcttggtttttaataaatgcatttctgaccaa

SEQ ID NO: 153744 - DNA, 5827 bp, Homo sapiens
  Payload ID: 10232
  Gene Symbol: MFAP3L
  Gene Name: microfibrillar-associated protein 3-like
  Uniprot ID: O75121
  ENST ID: ENST00000393704
  CDS Start-End: 126-1046
ttagcaggtctttctgcagggctgagctatcgctagggaacccacggtgactgaatcaaagggaagaaagacccaagacctggatctcccttttacatggaccctaaagcaaaggaaaatggcaaatgcacgacagcggcctcctgaacatcaccaaggtatccttctcagaccgaggtaaatacacgtgtgtggcttctaacatctacggcaccgtgaacaacacggtgaccttgcgcgtcatcttcacttctggagacatgggtgtctactacatggtcgtgtgcctggtggccttcaccatcgtcatggtcctcaatatcacccgcctgtgcatgatgagcagccatctaaagaagactgagaaggccatcaatgagttctttaggaccgaaggtgcagagaagctgcagaaggcatttgagatcgccaagcgcatccccatcatcacctccgccaaaactctagagcttgccaaagtcacccagttcaaaaccatggagttcgcccgctacatcgaagagcttgccaggagcgtgcctctgccgcctctcattatgaactgcaggactatcatggaggagattatggaggtggttgggctggaggagcaggggcagaattttgtgaggcatactccagagggccaggaggccgcagacagggatgaggtctacacaatccccaactctctgaagcggagcgactcccctgccgctgactcggacgcctcatcgctgcacgagcaacctcagcaaattgccatcaaggtgtcagttcacccgcagtccaaaaaagagcatgcagatgaccaagagggtggacagtttgaagtcaaagatgtagaggagacagaactgtcggcggaacattcccccgaaactgcagaaccttctaccgatgtcacgtccaccgagctaacatctgaagagccaacacctgttgaggtaccagataaggtactgccgccagcttacctggaagccacagagccagcagtgacacatgacaaaaacacctgcattatttacgaaagccatgtctaataccaaccccgaaaagctatgcatatcaagaaaatcaggggctgctccttgtaatacagatgtagtacgcacttgccgctaagccttaccaggagactctcatcccttaggtaggagtgatgccactttaaaaggagaaacacctgcctgcagtgaatgggactggaatttccccagtagagaagggtgcgagaaacatcagggtgcagaattgataccagacagaaggtgtctatgtgataatgagtttcagaggctgatctctgccaaataccttaattggtgatgccttcttggcaaagagtacaccactgtaagatattctgagttcaagaaccctgtccagtgccccctgcattgcttttccttttaaaaagtataggtctgctacaatagcaaatgcacgtacgtgggttttttgcagtttcttctcagttttaattttgcttttcctttataatggggtcattgttattaatactaattgttctttctggtttagtcctcattgccacttttgtccttatgtttccctagaacacgtacctcagagactttggtatcagtcaccagtaccagggctgatatctacaagtcacattacatttgtcatgttccaaagtagttacgaggcttgttatttttttttcattccccaggcctatttccatagatagctttttttgtttgtttccaacgaagctgctgttaaacgaaactgagaaaaactttgccccggaatagcactttaatagtcaaaaatgtgtttacctgtctgattgagtgagccttttggtgagctcagctgagatgtagagggagattgtaaaaggttaaatatacccacaccacccatgaaagtcactgtttaagttacatcatcctccaaataaagactgattctttacctggaaaatatattgcttccaaagacatcagattcagtggattcctgtaggttatagaatattggcttccaaacaggcttgcagggaccatatgctgttggatgacatataaccaggtccacttttatgaactgcatagctgacttggttgtccttaaagaggaaagcgaaaggttagggtaatagcaaagggaactgtgccatcagattttatgccaaaactgttgaataattatgcagtcctgcaagaaagtggttatatgtgaggtgcgtgatgttatggaaagaagacaaaattagtcatccaaaggcttaatacccactgtgccaataaccagctgcctggctttggacaagtctggacctcaggtcccttatctgtagaaggggcagatgacatgagctctgagcactgttgaaatggtatcactgtcacacagaaccaaaccaatattcacatccttgctccttttcacaatgactttaaagatttttgctttcatctcttggtccacctaacattttcatgcttcattacttaaataagaatgttggttttgagaaatagcattttaaacaaattgtggatcttctccttccaaaaaaaccattaggaccacatctgcaattaagatttaatattggtgagaatgagtggttttatttaattttcccttaaaagcaaaggagacagtaatcttaataaattcataggggccgtggccacatcaggtaatggggttatgatgtccaagattgcatggatcacattggtgatgagagcagacccagatgtttagtcctcactctgtcaccatctgaggaggtgaccttggacaactcccttcctctctctgggatttaatctttttcatctgtaaaatatgcaggtagtactcgagggtctacaggatcccttctagttgaaacatttatagttcacagaaagtttgcagtcttccaggataaccaacccccgttgcatgagacaagcaaaaaatgggtccatgaaattggatacttttgccatccaaactttacaacaaacattatctggctctgtaattgagagcagtgggcttggttttaaacctagccttgattagtttgtttatagataactgttgtggaaggtgatagaactagtcatggagtttgatgagacatctcttgaaaaggactgaactgttgacttctggttagaagtgctttgggcagtcacataaagaaatgagcagtgagaaatcaggagaaattatgactcctgttgggctttctggactagcattgtatgtttttgggttgcagaaaagttttaacaccacctcttagaatataaaaattttccagttgtcatggaggtccacagattcattaccatgggtttatatgcccaaagcaacaacagaggacttaagttcattttgtgatactgtatggatgttaccccatcctattcagttgtcattccacccaaacccatgtgtaggtttccacatggaaaggagaaggcatccattccacctagacattgaatagtgataataagctaaaagtgggcagattttcagtggagcaagagcagaaatatgcggccaaagaatgtttcctgattggttttgctgctttagactgcagtggggagagcttatgtagattttcaaaactttctccctctttaaggcatcataatgctctcggttttgataacaactgacataaagggaggttgacttaaaatgggaatttctccttccaaaaatgctacactcttcctatccatcctacagcttctttatgaaatgagaggccctcctgctagaatatgaaatgcagaagacctcatgactttcagctgatttttcaaagataaagtgaactgttcagcttcatagaaattcatgcgagtgtgactgaacgtgtgtgcatacacactcgtgcacattggactcatttgggcagttttaaaagcttcacactaaatccaaagcctcgtcctttgggtcgtatgtagtcgtttgtaaaatcaatttctggcttctgagtcatcctggtcatatctctagcaatgtttttcttgaaattctgaaaatgattcacatatgtgtgtacatttaattcacttagatgatctgtaaacttggatggtatttattctaaatggggaaaacaattttatatggaaaaatctatgtaatttataatggttttgttttatatattatattttcatatctctagggcacatctatcctcatctttttgtataccatacttagcaaaaagaaatactaatacttgactaaaatctctaggaaccaaacgtgatacatgtgatatatagcttctagaaatcgctctaaaaatctctgaatgtctcatccatcccaagcattattgtgctgtgtcattatgtccagaatgatttgtcttggatgcttatgagcatttgtttttcacaactaaggttgaaagacctgacatctcacacaatggggttctggaattcccctttcctcctttatctgtttttattgtttgtttcatttttaattgcaccagtctatgttgtcgaaactttgttttgaagggcaaatgtgagataacaagaaagcaatgtgatggaaagactggatgaatttacctatggctatgtaaattattttaatggactgataagatgtttcaagtctcatgcttggatctttatttattggtgatctaggatctgctcagctctttagcacatgaagaaaatcaggtacaaaggacatttgcatgtttggaacagcatgctctaagccccgtgcagccaacacaaattaacttgactgtagaaacaccaattccagctgctggaagaaatggtttagaaaggcaaaccagataccttttattctgccctaggaaatacagtgttgatcagtgctaaaactcttcagtggcagtcactgtggttcttttaactggggatttcctttcagtgtttcatttggtaccaaaacagaacatttaccttacatttcagatactctgttttctcagcattgttcagatactttcctttaccgctcttcacgtacccttttggcattgagtaattctataaatgtttctatccttggtttttaaaccaagttattcatactcttaaaatatctaccaaatctcattgtattttcacatattttgagcatcaagatactggtcattttaaaaaatccttcagtaaatagcacagtttattttcctaatgacatttttagggtttcttcattgatcaaccaggtttgggttacacaaatcaattgtgggggaaaaatcaaataaaacaattgcttattatattttccaaaggactgagcatttatcttttattcacgaagatatcatatgaggatgataatgatctttaacagattttttagagatagaatttataaagaggctgatactaagaatactacaatcaaaattgaagctagagaatgtaaaaatagaaagtaaatagttctaagaatattctggcataaattatttttatttagccaataaaatagcctccaaatgtatatctcagacaccatagagctgctaacaatgagaatcaaggaagatgcttgcacttagatttcgtttgttgtatttcagtagttctggatgtcctttgttaaaattggaaaatggaaaaatgtctcgacagaaatgtcaatctggtgattctgtgaactgtaaaatgttcacttttaaaaataaagttgtaaacaagttactcatataagttggtattacagtagcaaaaacagaaaaccatgtgatccatcctgtattttgattgatgctttaataaagggtttgcacagctgtgtggaa

SEQ ID NO: 153745 - DNA, 548 bp, Homo sapiens
  Payload ID: 10232
  Gene Symbol: MFAP3L
  Gene Name: microfibrillar-associated protein 3-like
  Uniprot ID: O75121
  ENST ID: ENST00000506110
  CDS Start-End: 204-512
agcctagaaaattacagtcgacttcatgagcttcatttggatttctcatcatgcaatagcaaagtcacagttattcctactgagatcacaatgatgctgccagagcctcccctgagcttgagagccctcctcttctaagcagcatttggaggttcttgctcaagtaccaactctatggacccaggacagagcaagcaaagaagatggatcgattgaagagccatctgactgtgtgctttctaccttctgtgccctttttaatcctagtatccactctagccaccgctaagagtgtgactaacagcactttaaatggcactaacgtggtcttgggctctgtgcccgtaatcattgccagaactgaccatatcatagtcaaggaagggaacagtgccttgattaactgtagtgtttatggcatccctgacccacagttcaagtggtataattccattggcaagctgctgaaagaagaagaggatgagaaggagagaggaggaggtaggctttaaagttgtatcaaatgtcataataaaatataaacagga

SEQ ID NO: 153746 - DNA, 564 bp, Homo sapiens
  Payload ID: 10232
  Gene Symbol: MFAP3L
  Gene Name: microfibrillar-associated protein 3-like
  ENST ID: ENST00000512698
  CDS Start-End: 95-564
gcagagtgcggcgcagcggccgctgtcgggctggccatggcgaggggtgcacggcggccacctgagtggcgcggcggtgtcaggaaaatggcaaatgcacgacagcggcctcctgaacatcaccaaggtatccttctcagaccgaggtaaatacacgtgtgtggcttctaacatctacggcaccgtgaacaacacggtgaccttgcgcgtcatcttcacttctggagacatgggtgtctactacatggtcgtgtgcctggtggccttcaccatcgtcatggtcctcaatatcacccgcctgtgcatgatgagcagccatctaaagaagactgagaaggccatcaatgagttctttaggaccgaaggtgcagagaagctgcagaaggcatttgagatcgccaagcgcatccccatcatcacctccgccaaaactctagagcttgccaaagtcacccagttcaaaaccatggagttcgcccgctacatcgaagagcttgccaggagcgtgcctctgccgcctctcattatgaactgcaggactatcatggaggagattatggaggt

SEQ ID NO: 153747 - DNA, 725 bp, Homo sapiens
  Payload ID: 10232
  Gene Symbol: MFAP3L
  Gene Name: microfibrillar-associated protein 3-like
  ENST ID: ENST00000510306
  CDS Start-End: 507-725
ccgtaatgtctggtgatgttccccagcctgtgggaggcagatgagattgaaaccagggtgtacatgagtgacctggagcccgtaagtaacagtaacacagagcagagagcgctagatgaggtggagctcagaggagcatgggaagttgaatgagacagtaaggagcattctggaagctataatgggtagttaggagaatgccagagtgattctgatgcagtccttccaaatgccggcagagcccaagctgtgaccagtgacgcagactggaagtcccgtttactgggagagaagaggttaaggaacacccaggtgaacaattaggtcctccacaatgaagacaggtaatgtggaggaaagagagcttgtcatggttcttgctcaagtaccaactctatggacccaggacaggtttgtcccatgacctgctgtgaacagtgtgttgtctgatagaagattcggttggcaaaccatctctctattgccttacagagcaagcaaagaagatggatcgattgaagagccatctgactgtgtgctttctaccttctgtgccctttttaatcctagtatccactctagccaccgctaagagtgtgactaacagcactttaaatggcactaacgtggtcttgggctctgtgcccgtaatcattgccagaactgaccatatcatagtcaaggaagggaacagtgccttgattaactgtagtgtttatggcatc

SEQ ID NO: 153748 - DNA, 550 bp, Homo sapiens
  Payload ID: 10232
  Gene Symbol: MFAP3L
  Gene Name: microfibrillar-associated protein 3-like
  ENST ID: ENST00000502832
  CDS Start-End: 360-550
atcgctagggaacccacggtgactgaatcaaagggaagaaagacccaagacctggatctcccttttacatggaccctaaagcaaaggtcctgtaggtgaaaaatgttgaagagcctctcactcagactgagtgaatatgagaagaactagatggaaaaggcatcctcactaccgatagcaaggtcagacagtgttaggatttgtgccggaacatgtgtgtgtacatggcatgcacatgcacaaaaaggcgttcaaaaatcatcggtgagtcactcaaggagcacactgccattcactttgtgattagcctggaaaggagcaatttcatgtctcgtttctgctgaaaaggaaaatggcaaatgcacgacagcggcctcctgaacatcaccaaggtatccttctcagaccgaggtaaatacacgtgtgtggcttctaacatctacggcaccgtgaacaacacggtgaccttgcgcgtcatcttcacttctggagacatgggtgtctactacatggtcgtgtgcctggtggccttcaccatcgtcatggtcct

SEQ ID NO: 153749 - DNA, 551 bp, Homo sapiens
  Payload ID: 10232
  Gene Symbol: MFAP3L
  Gene Name: microfibrillar-associated protein 3-like
  ENST ID: ENST00000507601
  CDS Start-End: 418-551
gctgtcgggctggccatggcgaggggtgcacggcggccacctgagtggcgcggcggtgtcaggttcttgctcaagtaccaactctatggacccaggacaggtttgtcccatgacctgctgtgaacagtgtgttgtctgatagaagattcggttggcaaaccatctctctattgccttacagagcaagcaaagaagatggatcgattgaagagccatctgactgtgtgctttctaccttctgtgccctttttaatcctaatgatgattgtttccagaggaatctagtaatggactgaaaacgaaagagacgttttggtatccttgtcttccattggaaacaggaaattgctggcagagagagctgtgatgatctcatttaactagatggttacagctcatgctataggaaaatggcaaatgcacgacagcggcctcctgaacatcaccaaggtatccttctcagaccgaggtaaatacacgtgtgtggcttctaacatctacggcaccgtgaacaacacggtgaccttgcgcgtcatcttcacttctggaga

SEQ ID NO: 153750 - DNA, 667 bp, Homo sapiens
  Payload ID: 10232
  Gene Symbol: MFAP3L
  Gene Name: microfibrillar-associated protein 3-like
  ENST ID: ENST00000504999
  CDS Start-End: 374-667
gtaggcgctaccgggcgtccggcgcagagtgcggcgcagcggccgctgtcgggctggccatggcgaggggtgcacggcggccacctgagtggcgcggcggtgtcagagcccaagctgtgaccagtgacgcagactggaagtcccgtttactgggagagaagaggttaaggaacacccaggtgaacaattaggtcctccacaatgaagacaggtaatgtggaggaaagagagcttgtcatggttcttgctcaagtaccaactctatggacccaggacaggtttgtcccatgacctgctgtgaacagtgtgttgtctgatagaagattcggttggcaaaccatctctctattgccttacagagcaagcaaagaagatggatcgattgaagagccatctgactgtgtgctttctaccttctgtgccctttttaatcctagtatccactctagccaccgctaagagtgtgactaacagcactttaaatggcactaacgtggtcttgggctctgtgcccgtaatcattgccagaactgaccatatcatagtcaaggaagggaacagtgccttgattaactgtagtgtttatggcatccctgacccacagttcaagtggtataattccattggcaagctgctgaaagaagaagaggatgagaaggagagagga

SEQ ID NO: 153751 - DNA, 481 bp, Homo sapiens
  Payload ID: 10232
  Gene Symbol: MFAP3L
  Gene Name: microfibrillar-associated protein 3-like
  ENST ID: ENST00000506764
  CDS Start-End: 212-481
aggctcctgtaggtgggaagctccgcgctcccggcagccggcggcgcagctcgcaacgctgtgaggcgccggcggaggcggctcgcccgcagtaggcgctaccgggcgtccggcgcagagtgcggcgcagcggccgctgtcgggctggccatggcgaggggtgcacggcggccacctgagtggcgcggcggtgtcagagcaagcaaagaagatggatcgattgaagagccatctgactgtgtgctttctaccttctgtgccctttttaatcctagtatccactctagccaccgctaagagtgtgactaacagcactttaaatggcactaacgtggtcttgggctctgtgcccgtaatcattgccagaactgaccatatcatagtcaaggaagggaacagtgccttgattaactgtagtgtttatggcatccctgacccacagttcaagtggtataattccattggcaagctgctgaaagaa

SEQ ID NO: 153752 - DNA, 1873 bp, Homo sapiens
  Payload ID: 10233
  Gene Symbol: MFAP4
  Gene Name: microfibrillar-associated protein 4
  Uniprot ID: P55083
  ENST ID: ENST00000299610
  CDS Start-End: 86-853
cggctggcgggggcccagcgcataactctgggcggttgcagtctggggccgcagacacccagccactctgagcagaactgacagcatgaaggcactcctggccctgccgctgctgctgcttctctccacgcccccgtgtgccccccaggtctccgggatccgaggagatgctctggagaggttttgccttcagcaacccctggactgtgacgacatctatgcccagggctaccagtcagacggcgtgtacctcatctacccctcgggccccagtgtgcctgtgcccgtcttctgtgacatgaccaccgagggcgggaagtggacggttttccagaagagattcaatggctcagtaagtttcttccgcggctggaatgactacaagctgggcttcggccgtgctgatggagagtactggctggggctgcagaacatgcacctcctgacactgaagcagaagtatgagctgcgagtggacttggaggactttgagaacaacacggcctatgccaagtacgctgacttctccatctccccgaacgcggtcagcgcagaggaggatggctacaccctctttgtggcaggctttgaggatggcggggcaggtgactccctgtcctaccacagtggccagaagttctctaccttcgaccgggaccaggacctctttgtgcagaactgcgcagctctctcctcaggagccttctggttccgcagctgccactttgccaacctcaatggcttctacctaggtggctcccacctctcttatgccaatggcatcaactgggcccagtggaagggcttctactactccctcaaacgcactgagatgaaaatccgccgggcctgaagggctggccccctcaggcacctttcctcccctggacacccatggtctccatgagtgctccctctgctgcccctgatgcatgcttctgctgattcccgagcaccaactccttacaagggggccttgtggctctcagccatgccacatccctgtcacacacccagggcatccattcctaagccagacccggctcccctacacctgaagttacactgccagcagttccccaggcctcttccgagaggcacatggttctagcctggacctggctgggctccatgagaatgagttgcctccaacctgtcccaacagctgacagccaggagccactctcccagctgcaggcctttgtggtccatcttgtcctgcttcctcactgtggacccctgtctgggccaccctagtgtgctaagctgagcagtgcagtgtgaacagggcccatggtgtattctaggccacagcccagcactcctctgggctgctctcaaaccatgtcccatcttcagcatccctcccaccaacttactcccctgtggtgagtaccgtggaaccccagcccacctcactatcatactcagcttcccctgatggcccatcccagcccctgaagctctatgccaagaacacagctaccgcacaccaccctgaaacagccacagccaaggtaggcatgcatatgaggtcttccccataccctctgggtgttgagaggtttagccacatgagggagcagaggacaatctctgcagggctgggagtgggtagggactgaaggtctcaataaaccttcagaacctgaatgaactggcttcatacacacaaacatatttgtttatcccccaaatgtaggcacctggctcctccttgctcccctgctgatggtgtcctaccccgaactccaaaaattacacctggagtcaggtgcagaagggaaccttgtatttcacaggcctcattttgatggcaaaaagacagtgtaataataacataataataataaaaatataatactgaaaagga

SEQ ID NO: 153753 - DNA, 1932 bp, Homo sapiens
  Payload ID: 10233
  Gene Symbol: MFAP4
  Gene Name: microfibrillar-associated protein 4
  Uniprot ID: P55083
  ENST ID: ENST00000395592
  CDS Start-End: 73-912
gcagacacccagccactctgagcagaactgacagcatgaaggtacggggcccagggtcgggggactcatagcatgggggaactgagcccactccagaggcccctggccacagagggcactatgaaggcacaaggagttctcttgaaactcgcactcctggccctgccgctgctgctgcttctctccacgcccccgtgtgccccccaggtctccgggatccgaggagatgctctggagaggttttgccttcagcaacccctggactgtgacgacatctatgcccagggctaccagtcagacggcgtgtacctcatctacccctcgggccccagtgtgcctgtgcccgtcttctgtgacatgaccaccgagggcgggaagtggacggttttccagaagagattcaatggctcagtaagtttcttccgcggctggaatgactacaagctgggcttcggccgtgctgatggagagtactggctggggctgcagaacatgcacctcctgacactgaagcagaagtatgagctgcgagtggacttggaggactttgagaacaacacggcctatgccaagtacgctgacttctccatctccccgaacgcggtcagcgcagaggaggatggctacaccctctttgtggcaggctttgaggatggcggggcaggtgactccctgtcctaccacagtggccagaagttctctaccttcgaccgggaccaggacctctttgtgcagaactgcgcagctctctcctcaggagccttctggttccgcagctgccactttgccaacctcaatggcttctacctaggtggctcccacctctcttatgccaatggcatcaactgggcccagtggaagggcttctactactccctcaaacgcactgagatgaaaatccgccgggcctgaagggctggccccctcaggcacctttcctcccctggacacccatggtctccatgagtgctccctctgctgcccctgatgcatgcttctgctgattcccgagcaccaactccttacaagggggccttgtggctctcagccatgccacatccctgtcacacacccagggcatccattcctaagccagacccggctcccctacacctgaagttacactgccagcagttccccaggcctcttccgagaggcacatggttctagcctggacctggctgggctccatgagaatgagttgcctccaacctgtcccaacagctgacagccaggagccactctcccagctgcaggcctttgtggtccatcttgtcctgcttcctcactgtggacccctgtctgggccaccctagtgtgctaagctgagcagtgcagtgtgaacagggcccatggtgtattctaggccacagcccagcactcctctgggctgctctcaaaccatgtcccatcttcagcatccctcccaccaacttactcccctgtggtgagtaccgtggaaccccagcccacctcactatcatactcagcttcccctgatggcccatcccagcccctgaagctctatgccaagaacacagctaccgcacaccaccctgaaacagccacagccaaggtaggcatgcatatgaggtcttccccataccctctgggtgttgagaggtttagccacatgagggagcagaggacaatctctgcagggctgggagtgggtagggactgaaggtctcaataaaccttcagaacctgaatgaactggcttcatacacacaaacatatttgtttatcccccaaatgtaggcacctggctcctccttgctcccctgctgatggtgtcctaccccgaactccaaaaattacacctggagtcaggtgcagaagggaaccttgtatttcacaggcctcattttgatggcaaaaagacagtgtaataataacataataataataaaaatataatactgaaaagga

SEQ ID NO: 153754 - DNA, 1876 bp, Homo sapiens
  Payload ID: 10233
  Gene Symbol: MFAP4
  Gene Name: microfibrillar-associated protein 4
  ENST ID: ENST00000497081
  CDS Start-End: 14-856
agtatgtgcatgcatggtgggggcaaatgcaaagagaacaggggatctctggagctgggaaggggctgtgctgaccctgtctgcccatcgccaggcactcctggccctgccgctgctgctgcttctctccacgcccccgtgtgccccccaggtctccgggatccgaggagatgctctggagaggttttgccttcagcaacccctggactgtgacgacatctatgcccagggctaccagtcagacggcgtgtacctcatctacccctcgggccccagtgtgcctgtgcccgtcttctgtgacatgaccaccgagggcgggaagtggacggttttccagaagagattcaatggctcagtaagtttcttccgcggctggaatgactacaagctgggcttcggccgtgctgatggagagtactggctggggctgcagaacatgcacctcctgacactgaagcagaagtatgagctgcgagtggacttggaggactttgagaacaacacggcctatgccaagtacgctgacttctccatctccccgaacgcggtcagcgcagaggaggatggctacaccctctttgtggcaggctttgaggatggcggggcaggtgactccctgtcctaccacagtggccagaagttctctaccttcgaccgggaccaggacctctttgtgcagaactgcgcagctctctcctcaggagccttctggttccgcagctgccactttgccaacctcaatggcttctacctaggtggctcccacctctcttatgccaatggcatcaactgggcccagtggaagggcttctactactccctcaaacgcactgagatgaaaatccgccgggcctgaagggctggccccctcaggcacctttcctcccctggacacccatggtctccatgagtgctccctctgctgcccctgatgcatgcttctgctgattcccgagcaccaactccttacaagggggccttgtggctctcagccatgccacatccctgtcacacacccagggcatccattcctaagccagacccggctcccctacacctgaagttacactgccagcagttccccaggcctcttccgagaggcacatggttctagcctggacctggctgggctccatgagaatgagttgcctccaacctgtcccaacagctgacagccaggagccactctcccagctgcaggcctttgtggtccatcttgtcctgcttcctcactgtggacccctgtctgggccaccctagtgtgctaagctgagcagtgcagtgtgaacagggcccatggtgtattctaggccacagcccagcactcctctgggctgctctcaaaccatgtcccatcttcagcatccctcccaccaacttactcccctgtggtgagtaccgtggaaccccagcccacctcactatcatactcagcttcccctgatggcccatcccagcccctgaagctctatgccaagaacacagctaccgcacaccaccctgaaacagccacagccaaggtaggcatgcatatgaggtcttccccataccctctgggtgttgagaggtttagccacatgagggagcagaggacaatctctgcagggctgggagtgggtagggactgaaggtctcaataaaccttcagaacctgaatgaactggcttcatacacacaaacatatttgtttatcccccaaatgtaggcacctggctcctccttgctcccctgctgatggtgtcctaccccgaactccaaaaattacacctggagtcaggtgcagaagggaaccttgtatttcacaggcctcattttgatggcaaaaagacagtgtaataataacataataataataaaaatataatactgaaaagga

SEQ ID NO: 153755 - DNA, 4814 bp, Homo sapiens
  Payload ID: 10234
  Gene Symbol: MITF
  Gene Name: microphthalmia-associated transcription factor
  Uniprot ID: O75030
  ENST ID: ENST00000352241
  CDS Start-End: 164-1726
gtaaactccccgcgctggggcgggcggccgcgagccggcgagcgggcagagctcggcactgcgccggggcgcacggctcgggggacccaggcccagctaccttccctccgcccccgggctctgttctcactttccagcagtggaaggacgggaagcgggagccatgcagtccgaatcggggatcgtgccggatttcgaagtcggggaggagtttcatgaagagcccaaaacctattacgaactcaaaagtcaaccgctgaagagcagcagttccgccgagcatcctggggcctccaagcctccgataagctcctccagtatgacatcacgcatcttgctacgccagcaactcatgcgtgagcagatgcaggagcaggagcgcagggagcagcagcagaagctgcaggcggcccagttcatgcaacagagagtgcccgtgagtcagacaccagccataaacgtcagtgtgcccaccacccttccctctgccacgcaggtgccgatggaagtccttaaggtgcagacccacctcgaaaaccccaccaagtaccacatacagcaagcccaacggcagcaggtaaagcagtacctttctaccactttagcaaataaacatgccaaccaagtcctgagcttgccatgtccaaaccagcctggcgatcatgtcatgccaccggtgccggggagcagcgcacccaacagccccatggctatgcttacgcttaactccaactgtgaaaaagagggattttataagtttgaagagcaaaacagggcagagagcgagtgcccaggcatgaacacacattcacgagcgtcctgtatgcagatggatgatgtaatcgatgacatcattagcctagaatcaagttataatgaggaaatcttgggcttgatggatcctgctttgcaaatggcaaatacgttgcctgtctcgggaaacttgattgatctttatggaaaccaaggtctgcccccaccaggcctcaccatcagcaactcctgtccagccaaccttcccaacataaaaagggagctcacagagtctgaagcaagagcactggccaaagagaggcagaaaaaggacaatcacaacctgattgaacgaagaagaagatttaacataaatgaccgcattaaagaactaggtactttgattcccaagtcaaatgatccagacatgcgctggaacaagggaaccatcttaaaagcatccgtggactatatccgaaagttgcaacgagaacagcaacgcgcaaaagaacttgaaaaccgacagaagaaactggagcacgccaaccggcatttgttgctcagaatacaggaacttgaaatgcaggctcgagctcatggactttcccttattccatccacgggtctctgctctccagatttggtgaatcggatcatcaagcaagaacccgttcttgagaactgcagccaagacctccttcagcatcatgcagacctaacctgtacaacaactctcgatctcacggatggcaccatcaccttcaacaacaacctcggaactgggactgaggccaaccaagcctatagtgtccccacaaaaatgggatccaaactggaagacatcctgatggacgacaccctttctcccgtcggtgtcactgatccactcctttcctcagtgtcccccggagcttccaaaacaagcagccggaggagcagtatgagcatggaagagacggagcacacttgttagcgaatcctccctgcactgcattcgcacaaactgcttcctttcttgattcgtagatttaataacttacctgaaggggttttcttgataattttcctttaatatgaaattttttttcatgctttatcaatagcccaggatatattttatttttagaattttgtgaaacagacttgtatattctattttacaactacaaatgcctccaaagtattgtacaaataagtgtgcagtatctgtgaactgaattcaccacagactttagctttctgagcaagaggattttgcgtcagagaaatgtctgtccatttttattcaggggaaacttgatttgagatttttatgcctgtgacttccttggaaatcaaatgtaaagtttaattgaaagaatgtaaagcaaccaaaaagaaaaaaaaaaagaaagaaagaggaaaagaaatccatactaacccttttccattttataaatgtattgattcattggtactgccttaaagatacagtacccctctagctttgtttagtctttatactgcaaactatttaaagaaatatgtattctgtaaaagaaaaaaaaaatgcggccttttcatgaggatcgtctggttagaaaacataactgataccaaccgaaactgaagggagttagaccaaggctctgaaatataaagtctaatcttgctctcttttattctgtgctgttacagttttcttcatcaatgagtgtgatccagtttttcataagatattttattttgaaatggaaattaatgtcctctcaaagtaaaatattgaggagcactgaaagtatgttttactttttttttattttatttttgcttttgataagaaaaccgaactgggcatatttctaattggctttactatttttatttttaaattatgttttactgttcatttgatttgtacagattctttattatcattgttcttttcaatatatttgtattaatttgtaagaatatgcatcttaaaatggcaagttttccatatttttacaactcactggtggttttccgcattctttgtacacccatgaaagaaaacttttatgcaaggtcttgcatttaaaagacagctttgcgaatattttgtaaattacagtctcactcagaactgtttttggacacatttaaggtgtagtattaataggttaaaaccaggctttctagaaagaataaacttacatatttatttttaggacatgaaaatagcaatattcttggagattgataaccatagcattaatacgcccattatggtcatttaaattggggtttatttcagcaaacttgttgaatttatttttaagaaagaaatactgtattgggaagttactgttacttgataacaatgttttaacaagaagcaatgttataaagttagtttcagtgcattatctacttgtgtagtcctatgcaataacagtagtgttacatgtatcaagcctagatgttttatacagatgccatatagtgttatgagccaggctgttgaatggaatttctcagtagcagcctacaactgaatagcaagtggcataaagcatatccattcagaatgaagtgccttaaatatagcagtagtcttttttggactagcactgactgaactgtaatgtaggggaaagtttcatgatggtatctatagtcaagacgaacatgtagcatggtgcctatgtagacaatataagagcttccaattttccttcagatatttttaatattaaatatattttagtgacagagtgccaacttctttcatcaggaaaccttattcaggagggtttttaaaaagtgtttaaatgtcaaatgtgaattggtgatgggtgatggagggttcagagaggagtgatcgtcagatgtgtgaatggacggtttaggtgaaaataatcaactgcatagttcccatgcacgctgggcaatgagaatccttggaaacattggtgatgctatcagttttatagctttatttcttaagggggtagggaaaattagttcccattctttcaacccccttaactgtatagctcttttcctagaatagtgacgcaaatctgcatgaacagctaattgtaccatagtgttcattgatacaatcatagcattgtctatttttctcttcatatttatatgggggggagggcgctggatgcaaaagttgaagatcgtgatgctatgatgttagttttccttagctgattttgagggtttttaaaaataaagcaaggttgactaacctacggccacgggaacaggaccatggttaagcaaccatatagaaagctttgttgaaagaaagtatggcatcttgtaccactgccctgactgtcacaactcctaaccttgccattgcctgcctccccctccccttctccttaagagacaatttctgcaggtggcaggtgagcaagcccaggagaatgctgcaatcttgggggtggttttatttatttcttttttgccaaatagagtgtggattcatttcaggggctagctaagccaagaggcagtggtttgggcttgttgtttgtaacaagaaaatgatccacaccactcccccgattcccgggtgcagaattgtaactcggggttgggcctctatatggagtgaccaaaatgccaaaattgtccatctgcctctgagtagggcaatggaaataccaaaccttctgactttgccaaaaagcatacaagcaacctggtcatacataggatgacaaaattctttctggttgtttttaaacaataaagcaataagaacaaatacaatacataggaagttaaaagcacaaaggaatgaacttattaatatttttgaaaaatgcactgggaaaaagttgatgtcaataacagtataaaacagccctatttcttgataaaaaatgacaaatgactgtctcttgcggatgcttggtactgtaatgttaataatagtcacctgctgttggatgcagcaataatttctgtatggtccatagcactgtatattatggatcgatattaatgtatccaatgaaataatcgacttgttcttgatagcctcattaaagcatttggtttttcacata

SEQ ID NO: 153756 - DNA, 1798 bp, Homo sapiens
  Payload ID: 10234
  Gene Symbol: MITF
  Gene Name: microphthalmia-associated transcription factor
  Uniprot ID: O75030
  ENST ID: ENST00000314557
  CDS Start-End: 137-1378
tttccggtggtgtctcgggataccttgtttatagtaccttctctttgccagtccatcttcaaattggaattatagaaagtagagggagggatagtctaccgtctctcactggattggtgccacctaaaacattgttatgctggaaatgctagaatataatcactatcaggtgcagacccacctcgaaaaccccaccaagtaccacatacagcaagcccaacggcagcaggtaaagcagtacctttctaccactttagcaaataaacatgccaaccaagtcctgagcttgccatgtccaaaccagcctggcgatcatgtcatgccaccggtgccggggagcagcgcacccaacagccccatggctatgcttacgcttaactccaactgtgaaaaagagggattttataagtttgaagagcaaaacagggcagagagcgagtgcccaggcatgaacacacattcacgagcgtcctgtatgcagatggatgatgtaatcgatgacatcattagcctagaatcaagttataatgaggaaatcttgggcttgatggatcctgctttgcaaatggcaaatacgttgcctgtctcgggaaacttgattgatctttatggaaaccaaggtctgcccccaccaggcctcaccatcagcaactcctgtccagccaaccttcccaacataaaaagggagctcacagagtctgaagcaagagcactggccaaagagaggcagaaaaaggacaatcacaacctgattgaacgaagaagaagatttaacataaatgaccgcattaaagaactaggtactttgattcccaagtcaaatgatccagacatgcgctggaacaagggaaccatcttaaaagcatccgtggactatatccgaaagttgcaacgagaacagcaacgcgcaaaagaacttgaaaaccgacagaagaaactggagcacgccaaccggcatttgttgctcagaatacaggaacttgaaatgcaggctcgagctcatggactttcccttattccatccacgggtctctgctctccagatttggtgaatcggatcatcaagcaagaacccgttcttgagaactgcagccaagacctccttcagcatcatgcagacctaacctgtacaacaactctcgatctcacggatggcaccatcaccttcaacaacaacctcggaactgggactgaggccaaccaagcctatagtgtccccacaaaaatgggatccaaactggaagacatcctgatggacgacaccctttctcccgtcggtgtcactgatccactcctttcctcagtgtcccccggagcttccaaaacaagcagccggaggagcagtatgagcatggaagagacggagcacacttgttagcgaatcctccctgcactgcattcgcacaaactgcttcctttcttgattcgtagatttaataacttacctgaaggggttttcttgataattttcctttaatatgaaattttttttcatgctttatcaatagcccaggatatattttatttttagaattttgtgaaacagacttgtatattctattttacaactacaaatgcctccaaagtattgtacaaataagtgtgcagtatctgtgaactgaattcaccacagactttagctttctgagcaagaggattttgcgtcagagaaatgtctgtccatttttattcaggggaaacttgatttgagatttttatgcctgtgacttccttggaaatcaaatgtaaagtttaattgaaagaatgtaaagcaaccaaaaagaaaaaaaaaaagaaa

SEQ ID NO: 153757 - DNA, 1993 bp, Homo sapiens
  Payload ID: 10234
  Gene Symbol: MITF
  Gene Name: microphthalmia-associated transcription factor
  Uniprot ID: O75030
  ENST ID: ENST00000314589
  CDS Start-End: 80-1594
agtgacacagccagtgccagaactaactttgactttcactcttcgccaagggcttgcagaacaccttaaaggaaaaaagatggaggcgcttagagttcagatgttcatgccatgctcctttgaaagcttgtatctcagttccgccgagcatcctggggcctccaagcctccgataagctcctccagtatgacatcacgcatcttgctacgccagcaactcatgcgtgagcagatgcaggagcaggagcgcagggagcagcagcagaagctgcaggcggcccagttcatgcaacagagagtgcccgtgagtcagacaccagccataaacgtcagtgtgcccaccacccttccctctgccacgcaggtgccgatggaagtccttaaggtgcagacccacctcgaaaaccccaccaagtaccacatacagcaagcccaacggcagcaggtaaagcagtacctttctaccactttagcaaataaacatgccaaccaagtcctgagcttgccatgtccaaaccagcctggcgatcatgtcatgccaccggtgccggggagcagcgcacccaacagccccatggctatgcttacgcttaactccaactgtgaaaaagagggattttataagtttgaagagcaaaacagggcagagagcgagtgcccaggcatgaacacacattcacgagcgtcctgtatgcagatggatgatgtaatcgatgacatcattagcctagaatcaagttataatgaggaaatcttgggcttgatggatcctgctttgcaaatggcaaatacgttgcctgtctcgggaaacttgattgatctttatggaaaccaaggtctgcccccaccaggcctcaccatcagcaactcctgtccagccaaccttcccaacataaaaagggagctcacagagtctgaagcaagagcactggccaaagagaggcagaaaaaggacaatcacaacctgattgaacgaagaagaagatttaacataaatgaccgcattaaagaactaggtactttgattcccaagtcaaatgatccagacatgcgctggaacaagggaaccatcttaaaagcatccgtggactatatccgaaagttgcaacgagaacagcaacgcgcaaaagaacttgaaaaccgacagaagaaactggagcacgccaaccggcatttgttgctcagaatacaggaacttgaaatgcaggctcgagctcatggactttcccttattccatccacgggtctctgctctccagatttggtgaatcggatcatcaagcaagaacccgttcttgagaactgcagccaagacctccttcagcatcatgcagacctaacctgtacaacaactctcgatctcacggatggcaccatcaccttcaacaacaacctcggaactgggactgaggccaaccaagcctatagtgtccccacaaaaatgggatccaaactggaagacatcctgatggacgacaccctttctcccgtcggtgtcactgatccactcctttcctcagtgtcccccggagcttccaaaacaagcagccggaggagcagtatgagcatggaagagacggagcacacttgttagcgaatcctccctgcactgcattcgcacaaactgcttcctttcttgattcgtagatttaataacttacctgaaggggttttcttgataattttcctttaatatgaaattttttttcatgctttatcaatagcccaggatatattttatttttagaattttgtgaaacagacttgtatattctattttacaactacaaatgcctccaaagtattgtacaaataagtgtgcagtatctgtgaactgaattcaccacagactttagctttctgagcaagaggattttgcgtcagagaaatgtctgtccatttttattcaggggaaacttgatttgagatttttatgcctgtgacttccttggaaatcaaatgtaaagtttaattgaaagaatgtaaagcaacc

SEQ ID NO: 153758 - DNA, 4680 bp, Homo sapiens
  Payload ID: 10234
  Gene Symbol: MITF
  Gene Name: microphthalmia-associated transcription factor
  Uniprot ID: O75030
  ENST ID: ENST00000328528
  CDS Start-End: 32-1591
cagacctattccgctccatctctgaagtcaaatgggacaccttgaaaatacttcagtggttttcccacgagctattttctctctctgtgaaaaggaaaccaggaaattgactctgtgcctgttttcaagaagcagttccgccgagcatcctggggcctccaagcctccgataagctcctccagtatgacatcacgcatcttgctacgccagcaactcatgcgtgagcagatgcaggagcaggagcgcagggagcagcagcagaagctgcaggcggcccagttcatgcaacagagagtgcccgtgagtcagacaccagccataaacgtcagtgtgcccaccacccttccctctgccacgcaggtgccgatggaagtccttaaggtgcagacccacctcgaaaaccccaccaagtaccacatacagcaagcccaacggcagcaggtaaagcagtacctttctaccactttagcaaataaacatgccaaccaagtcctgagcttgccatgtccaaaccagcctggcgatcatgtcatgccaccggtgccggggagcagcgcacccaacagccccatggctatgcttacgcttaactccaactgtgaaaaagagggattttataagtttgaagagcaaaacagggcagagagcgagtgcccaggcatgaacacacattcacgagcgtcctgtatgcagatggatgatgtaatcgatgacatcattagcctagaatcaagttataatgaggaaatcttgggcttgatggatcctgctttgcaaatggcaaatacgttgcctgtctcgggaaacttgattgatctttatggaaaccaaggtctgcccccaccaggcctcaccatcagcaactcctgtccagccaaccttcccaacataaaaagggagctcacagagtctgaagcaagagcactggccaaagagaggcagaaaaaggacaatcacaacctgattgaacgaagaagaagatttaacataaatgaccgcattaaagaactaggtactttgattcccaagtcaaatgatccagacatgcgctggaacaagggaaccatcttaaaagcatccgtggactatatccgaaagttgcaacgagaacagcaacgcgcaaaagaacttgaaaaccgacagaagaaactggagcacgccaaccggcatttgttgctcagaatacaggaacttgaaatgcaggctcgagctcatggactttcccttattccatccacgggtctctgctctccagatttggtgaatcggatcatcaagcaagaacccgttcttgagaactgcagccaagacctccttcagcatcatgcagacctaacctgtacaacaactctcgatctcacggatggcaccatcaccttcaacaacaacctcggaactgggactgaggccaaccaagcctatagtgtccccacaaaaatgggatccaaactggaagacatcctgatggacgacaccctttctcccgtcggtgtcactgatccactcctttcctcagtgtcccccggagcttccaaaacaagcagccggaggagcagtatgagcatggaagagacggagcacacttgttagcgaatcctccctgcactgcattcgcacaaactgcttcctttcttgattcgtagatttaataacttacctgaaggggttttcttgataattttcctttaatatgaaattttttttcatgctttatcaatagcccaggatatattttatttttagaattttgtgaaacagacttgtatattctattttacaactacaaatgcctccaaagtattgtacaaataagtgtgcagtatctgtgaactgaattcaccacagactttagctttctgagcaagaggattttgcgtcagagaaatgtctgtccatttttattcaggggaaacttgatttgagatttttatgcctgtgacttccttggaaatcaaatgtaaagtttaattgaaagaatgtaaagcaaccaaaaagaaaaaaaaaaagaaagaaagaggaaaagaaatccatactaacccttttccattttataaatgtattgattcattggtactgccttaaagatacagtacccctctagctttgtttagtctttatactgcaaactatttaaagaaatatgtattctgtaaaagaaaaaaaaaatgcggccttttcatgaggatcgtctggttagaaaacataactgataccaaccgaaactgaagggagttagaccaaggctctgaaatataaagtctaatcttgctctcttttattctgtgctgttacagttttcttcatcaatgagtgtgatccagtttttcataagatattttattttgaaatggaaattaatgtcctctcaaagtaaaatattgaggagcactgaaagtatgttttactttttttttattttatttttgcttttgataagaaaaccgaactgggcatatttctaattggctttactatttttatttttaaattatgttttactgttcatttgatttgtacagattctttattatcattgttcttttcaatatatttgtattaatttgtaagaatatgcatcttaaaatggcaagttttccatatttttacaactcactggtggttttccgcattctttgtacacccatgaaagaaaacttttatgcaaggtcttgcatttaaaagacagctttgcgaatattttgtaaattacagtctcactcagaactgtttttggacacatttaaggtgtagtattaataggttaaaaccaggctttctagaaagaataaacttacatatttatttttaggacatgaaaatagcaatattcttggagattgataaccatagcattaatacgcccattatggtcatttaaattggggtttatttcagcaaacttgttgaatttatttttaagaaagaaatactgtattgggaagttactgttacttgataacaatgttttaacaagaagcaatgttataaagttagtttcagtgcattatctacttgtgtagtcctatgcaataacagtagtgttacatgtatcaagcctagatgttttatacagatgccatatagtgttatgagccaggctgttgaatggaatttctcagtagcagcctacaactgaatagcaagtggcataaagcatatccattcagaatgaagtgccttaaatatagcagtagtcttttttggactagcactgactgaactgtaatgtaggggaaagtttcatgatggtatctatagtcaagacgaacatgtagcatggtgcctatgtagacaatataagagcttccaattttccttcagatatttttaatattaaatatattttagtgacagagtgccaacttctttcatcaggaaaccttattcaggagggtttttaaaaagtgtttaaatgtcaaatgtgaattggtgatgggtgatggagggttcagagaggagtgatcgtcagatgtgtgaatggacggtttaggtgaaaataatcaactgcatagttcccatgcacgctgggcaatgagaatccttggaaacattggtgatgctatcagttttatagctttatttcttaagggggtagggaaaattagttcccattctttcaacccccttaactgtatagctcttttcctagaatagtgacgcaaatctgcatgaacagctaattgtaccatagtgttcattgatacaatcatagcattgtctatttttctcttcatatttatatgggggggagggcgctggatgcaaaagttgaagatcgtgatgctatgatgttagttttccttagctgattttgagggtttttaaaaataaagcaaggttgactaacctacggccacgggaacaggaccatggttaagcaaccatatagaaagctttgttgaaagaaagtatggcatcttgtaccactgccctgactgtcacaactcctaaccttgccattgcctgcctccccctccccttctccttaagagacaatttctgcaggtggcaggtgagcaagcccaggagaatgctgcaatcttgggggtggttttatttatttcttttttgccaaatagagtgtggattcatttcaggggctagctaagccaagaggcagtggtttgggcttgttgtttgtaacaagaaaatgatccacaccactcccccgattcccgggtgcagaattgtaactcggggttgggcctctatatggagtgaccaaaatgccaaaattgtccatctgcctctgagtagggcaatggaaataccaaaccttctgactttgccaaaaagcatacaagcaacctggtcatacataggatgacaaaattctttctggttgtttttaaacaataaagcaataagaacaaatacaatacataggaagttaaaagcacaaaggaatgaacttattaatatttttgaaaaatgcactgggaaaaagttgatgtcaataacagtataaaacagccctatttcttgataaaaaatgacaaatgactgtctcttgcggatgcttggtactgtaatgttaataatagtcacctgctgttggatgcagcaataatttctgtatggtccatagcactgtatattatggatcgatattaatgtatccaatgaaataatcgacttgttcttgatagcctcattaaagcatttggtttttcacatag

SEQ ID NO: 153759 - DNA, 1956 bp, Homo sapiens
  Payload ID: 10234
  Gene Symbol: MITF
  Gene Name: microphthalmia-associated transcription factor
  Uniprot ID: O75030
  ENST ID: ENST00000394351
  CDS Start-End: 121-1380
gggataccttgtttatagtaccttctctttgccagtccatcttcaaattggaattatagaaagtagagggagggatagtctaccgtctctcactggattggtgccacctaaaacattgttatgctggaaatgctagaatataatcactatcaggtgcagacccacctcgaaaaccccaccaagtaccacatacagcaagcccaacggcagcaggtaaagcagtacctttctaccactttagcaaataaacatgccaaccaagtcctgagcttgccatgtccaaaccagcctggcgatcatgtcatgccaccggtgccggggagcagcgcacccaacagccccatggctatgcttacgcttaactccaactgtgaaaaagagggattttataagtttgaagagcaaaacagggcagagagcgagtgcccaggcatgaacacacattcacgagcgtcctgtatgcagatggatgatgtaatcgatgacatcattagcctagaatcaagttataatgaggaaatcttgggcttgatggatcctgctttgcaaatggcaaatacgttgcctgtctcgggaaacttgattgatctttatggaaaccaaggtctgcccccaccaggcctcaccatcagcaactcctgtccagccaaccttcccaacataaaaagggagctcacagcgtgtatttttcccacagagtctgaagcaagagcactggccaaagagaggcagaaaaaggacaatcacaacctgattgaacgaagaagaagatttaacataaatgaccgcattaaagaactaggtactttgattcccaagtcaaatgatccagacatgcgctggaacaagggaaccatcttaaaagcatccgtggactatatccgaaagttgcaacgagaacagcaacgcgcaaaagaacttgaaaaccgacagaagaaactggagcacgccaaccggcatttgttgctcagaatacaggaacttgaaatgcaggctcgagctcatggactttcccttattccatccacgggtctctgctctccagatttggtgaatcggatcatcaagcaagaacccgttcttgagaactgcagccaagacctccttcagcatcatgcagacctaacctgtacaacaactctcgatctcacggatggcaccatcaccttcaacaacaacctcggaactgggactgaggccaaccaagcctatagtgtccccacaaaaatgggatccaaactggaagacatcctgatggacgacaccctttctcccgtcggtgtcactgatccactcctttcctcagtgtcccccggagcttccaaaacaagcagccggaggagcagtatgagcatggaagagacggagcacacttgttagcgaatcctccctgcactgcattcgcacaaactgcttcctttcttgattcgtagatttaataacttacctgaaggggttttcttgataattttcctttaatatgaaattttttttcatgctttatcaatagcccaggatatattttatttttagaattttgtgaaacagacttgtatattctattttacaactacaaatgcctccaaagtattgtacaaataagtgtgcagtatctgtgaactgaattcaccacagactttagctttctgagcaagaggattttgcgtcagagaaatgtctgtccatttttattcaggggaaacttgatttgagatttttatgcctgtgacttccttggaaatcaaatgtaaagtttaattgaaagaatgtaaagcaaccaaaaagaaaaaaaaaaagaaagaaagaggaaaagaaatccatactaacccttttccattttataaatgtattgattcattggtactgccttaaagatacagtacccctctagctttgtttagtctttatactgcaaactatttaaagaaatatgtattctgtaaaagaaaaaaaaaa

SEQ ID NO: 153760 - DNA, 382 bp, Homo sapiens
  Payload ID: 10234
  Gene Symbol: MITF
  Gene Name: microphthalmia-associated transcription factor
  ENST ID: ENST00000457080
  CDS Start-End: 32-382
cagacctattccgctccatctctgaagtcaaatgggacaccttgaaaatacttcagtggttttcccacgagctattttctctctctgtgaaaaggaaaccaggaaattgactctgtgcctgttttcaagaagcagttccgccgagcatcctggggcctccaagcctccgataagctcctccagtatgacatcacgcatcttgctacgccagcaactcatgcgtgagcagatgcaggagcaggagcgcagggagcagcagcagaagctgcaggcggcccagttcatgcaacagagagtgcccgtgagtcagacaccagccataaacgtcagtgtgcccaccacccttccctctgccacgcaggtgccgatggaagtccttaag

SEQ ID NO: 153761 - DNA, 2489 bp, Homo sapiens
  Payload ID: 10234
  Gene Symbol: MITF
  Gene Name: microphthalmia-associated transcription factor
  Uniprot ID: O75030
  ENST ID: ENST00000448226
  CDS Start-End: 128-1708
ggcgagcgggcagagctcggcactgcgccggggcgcacggctcgggggacccaggcccagctaccttccctccgcccccgggctctgttctcactttccagcagtggaaggacgggaagcgggagccatgcagtccgaatcggggatcgtgccggatttcgaagtcggggaggagtttcatgaagagcccaaaacctattacgaactcaaaagtcaaccgctgaagagcagcagttccgccgagcatcctggggcctccaagcctccgataagctcctccagtatgacatcacgcatcttgctacgccagcaactcatgcgtgagcagatgcaggagcaggagcgcagggagcagcagcagaagctgcaggcggcccagttcatgcaacagagagtgcccgtgagtcagacaccagccataaacgtcagtgtgcccaccacccttccctctgccacgcaggtgccgatggaagtccttaaggtgcagacccacctcgaaaaccccaccaagtaccacatacagcaagcccaacggcagcaggtaaagcagtacctttctaccactttagcaaataaacatgccaaccaagtcctgagcttgccatgtccaaaccagcctggcgatcatgtcatgccaccggtgccggggagcagcgcacccaacagccccatggctatgcttacgcttaactccaactgtgaaaaagagggattttataagtttgaagagcaaaacagggcagagagcgagtgcccaggcatgaacacacattcacgagcgtcctgtatgcagatggatgatgtaatcgatgacatcattagcctagaatcaagttataatgaggaaatcttgggcttgatggatcctgctttgcaaatggcaaatacgttgcctgtctcgggaaacttgattgatctttatggaaaccaaggtctgcccccaccaggcctcaccatcagcaactcctgtccagccaaccttcccaacataaaaagggagctcacagcgtgtatttttcccacagagtctgaagcaagagcactggccaaagagaggcagaaaaaggacaatcacaacctgattgaacgaagaagaagatttaacataaatgaccgcattaaagaactaggtactttgattcccaagtcaaatgatccagacatgcgctggaacaagggaaccatcttaaaagcatccgtggactatatccgaaagttgcaacgagaacagcaacgcgcaaaagaacttgaaaaccgacagaagaaactggagcacgccaaccggcatttgttgctcagaatacaggaacttgaaatgcaggctcgagctcatggactttcccttattccatccacgggtctctgctctccagatttggtgaatcggatcatcaagcaagaacccgttcttgagaactgcagccaagacctccttcagcatcatgcagacctaacctgtacaacaactctcgatctcacggatggcaccatcaccttcaacaacaacctcggaactgggactgaggccaaccaagcctatagtgtccccacaaaaatgggatccaaactggaagacatcctgatggacgacaccctttctcccgtcggtgtcactgatccactcctttcctcagtgtcccccggagcttccaaaacaagcagccggaggagcagtatgagcatggaagagacggagcacacttgttagcgaatcctccctgcactgcattcgcacaaactgcttcctttcttgattcgtagatttaataacttacctgaaggggttttcttgataattttcctttaatatgaaattttttttcatgctttatcaatagcccaggatatattttatttttagaattttgtgaaacagacttgtatattctattttacaactacaaatgcctccaaagtattgtacaaataagtgtgcagtatctgtgaactgaattcaccacagactttagctttctgagcaagaggattttgcgtcagagaaatgtctgtccatttttattcaggggaaacttgatttgagatttttatgcctgtgacttccttggaaatcaaatgtaaagtttaattgaaagaatgtaaagcaaccaaaaagaaaaaaaaaaagaaagaaagaggaaaagaaatccatactaacccttttccattttataaatgtattgattcattggtactgccttaaagatacagtacccctctagctttgtttagtctttatactgcaaactatttaaagaaatatgtattctgtaaaagaaaaaaaaaatgcggccttttcatgaggatcgtctggttagaaaacataactgataccaaccgaaactgaagggagttagaccaaggctctgaaatataaagtctaatcttgctctcttttattctgtgctgttacagttttcttcatcaatgagtgtgatccagtttttcataagatattttattttgaaatggaaattaatgtcctctcaaag

SEQ ID NO: 153762 - DNA, 1116 bp, Homo sapiens
  Payload ID: 10234
  Gene Symbol: MITF
  Gene Name: microphthalmia-associated transcription factor
  ENST ID: ENST00000451708
  CDS Start-End: 33-1116
aagggcttgcagaacaccttaaaggaaaaaagatggaggcgcttagagttcagatgttcatgccatgctcctttgaaagcttgtatctcagttccgccgagcatcctggggcctccaagcctccgataagctcctccagtatgacatcacgcatcttgctacgccagcaactcatgcgtgagcagatgcaggagcaggagcgcagggagcagcagcagaagctgcaggcggcccagttcatgcaacagagagtgcccgtgagtcagacaccagccataaacgtcagtgtgcccaccacccttccctctgccacgcaggtgccgatggaagtccttaaggtgcagacccacctcgaaaaccccaccaagtaccacatacagcaagcccaacggcagcaggtaaagcagtacctttctaccactttagcaaataaacatgccaaccaagtcctgagcttgccatgtccaaaccagcctggcgatcatgtcatgccaccggtgccggggagcagcgcacccaacagccccatggctatgcttacgcttaactccaactgtgaaaaagagggattttataagtttgaagagcaaaacagggcagagagcgagtgcccaggcatgaacacacattcacgagcgtcctgtatgcagatggatgatgtaatcgatgacatcattagcctagaatcaagttataatgaggaaatcttgggcttgatggatcctgctttgcaaatggcaaatacgttgcctgtctcgggaaacttgattgatctttatggaaaccaaggtctgcccccaccaggcctcaccatcagcaactcctgtccagccaaccttcccaacataaaaagggagctcacagcgtgtatttttcccacagagtctgaagcaagagcactggccaaagagaggcagaaaaaggacaatcacaacctgattgaacgaagaagaagatttaacataaatgaccgcattaaagaactaggtactttgattcccaagtcaaatgatccagacatgcgctggaacaagggaaccatcttaaaagcatccgtggactatatccgaaagttgcaacgagaacagcaacgcgcaaaagaacttgaaaaccgac

SEQ ID NO: 153763 - DNA, 542 bp, Homo sapiens
  Payload ID: 10234
  Gene Symbol: MITF
  Gene Name: microphthalmia-associated transcription factor
  ENST ID: ENST00000429090
  CDS Start-End: 331-542
gttgaataaagaatgacctagatggctgaagtgtttctggtgtgctagaagggatttattccaaatcttccttattactaaattctcagtggacctctctgggtttcgagcaagtgcggaaaattccatttggtgttcgccggctgatgtgcaagtaaaagcagggaatgtatgatggaaaatgtcataccctttatgatgacttttgatctgtgaagaatataattattctgtgtttaaaactacagaagggaaatgtttattcactctttttgaagcagttccgccgagcatcctggggcctccaagcctccgataagctcctccagtatgacatcacgcatcttgctacgccagcaactcatgcgtgagcagatgcaggagcaggagcgcagggagcagcagcagaagctgcaggcggcccagttcatgcaacagagagtgcccgtgagtcagacaccagccataaacgtcagtgtgcccaccacccttccctctgccacgcaggtgccgatggaagtccttaaggtgcagacccacct

SEQ ID NO: 153764 - DNA, 589 bp, Homo sapiens
  Payload ID: 10234
  Gene Symbol: MITF
  Gene Name: microphthalmia-associated transcription factor
  ENST ID: ENST00000433517
  CDS Start-End: 119-589
atctccctacagcagaagattgaatcctcatctctccatgagtctgagcatctaaagatgttagagcagttccgccgagcatcctggggcctccaagcctccgataagctcctccagtatgacatcacgcatcttgctacgccagcaactcatgcgtgagcagatgcaggagcaggagcgcagggagcagcagcagaagctgcaggcggcccagttcatgcaacagagagtgcccgtgagtcagacaccagccataaacgtcagtgtgcccaccacccttccctctgccacgcaggtgccgatggaagtccttaaggtgcagacccacctcgaaaaccccaccaagtaccacatacagcaagcccaacggcagcagggattttataagtttgaagagcaaaacagggcagagagcgagtgcccaggcatgaacacacattcacgagcgtcctgtatgcagatggatgatgtaatcgatgacatcattagcctagaatcaagttataatgaggaaatcttgggcttgatggatcctgctttgcaaatggcaaatacgttgcctgtctcgggaaacttgattgatctttat

SEQ ID NO: 153765 - DNA, 1995 bp, Homo sapiens
  Payload ID: 10234
  Gene Symbol: MITF
  Gene Name: microphthalmia-associated transcription factor
  Uniprot ID: O75030
  ENST ID: ENST00000472437
  CDS Start-End: 190-1596
aatttagccttcctagtgttgagagaaggtgcacgtaagcgtgtggcagaacgtctgcaatcgcatctttgtaataatctcctttctgagacggttcagtggactcaatgttccgccaaagggccaaggcagccctgcagttccgccgagcatcctggggcctccaagcctccgataagctcctccagtatgacatcacgcatcttgctacgccagcaactcatgcgtgagcagatgcaggagcaggagcgcagggagcagcagcagaagctgcaggcggcccagttcatgcaacagagagtgcccgtgagtcagacaccagccataaacgtcagtgtgcccaccacccttccctctgccacgcaggtgccgatggaagtccttaaggtgcagacccacctcgaaaaccccaccaagtaccacatacagcaagcccaacggcagcaggtaaagcagtacctttctaccactttagcaaataaacatgccaaccaagtcctgagcttgccatgtccaaaccagcctggcgatcatgtcatgccaccggtgccggggagcagcgcacccaacagccccatggctatgcttacgcttaactccaactgtgaaaaagagggattttataagtttgaagagcaaaacagggcagagagcgagtgcccaggcatgaacacacattcacgagcgtcctgtatgcagatggatgatgtaatcgatgacatcattagcctagaatcaagttataatgaggaaatcttgggcttgatggatcctgctttgcaaatggcaaatacgttgcctgtctcgggaaacttgattgatctttatggaaaccaaggtctgcccccaccaggcctcaccatcagcaactcctgtccagccaaccttcccaacataaaaagggagctcacagagtctgaagcaagagcactggccaaagagaggcagaaaaaggacaatcacaacctgattgaacgaagaagaagatttaacataaatgaccgcattaaagaactaggtactttgattcccaagtcaaatgatccagacatgcgctggaacaagggaaccatcttaaaagcatccgtggactatatccgaaagttgcaacgagaacagcaacgcgcaaaagaacttgaaaaccgacagaagaaactggagcacgccaaccggcatttgttgctcagaatacaggaacttgaaatgcaggctcgagctcatggactttcccttattccatccacgggtctctgctctccagatttggtgaatcggatcatcaagcaagaacccgttcttgagaactgcagccaagacctccttcagcatcatgcagacctaacctgtacaacaactctcgatctcacggatggcaccatcaccttcaacaacaacctcggaactgggactgaggccaaccaagcctatagtgtccccacaaaaatgggatccaaactggaagacatcctgatggacgacaccctttctcccgtcggtgtcactgatccactcctttcctcagtgtcccccggagcttccaaaacaagcagccggaggagcagtatgagcatggaagagacggagcacacttgttagcgaatcctccctgcactgcattcgcacaaactgcttcctttcttgattcgtagatttaataacttacctgaaggggttttcttgataattttcctttaatatgaaattttttttcatgctttatcaatagcccaggatatattttatttttagaattttgtgaaacagacttgtatattctattttacaactacaaatgcctccaaagtattgtacaaataagtgtgcagtatctgtgaactgaattcaccacagactttagctttctgagcaagaggattttgcgtcagagaaatgtctgtccatttttattcaggggaaacttgatttgagatttttatgcctgtgacttccttggaaatcaaatgtaaagtttaattgaaagaatgtaaagcaacc

SEQ ID NO: 153766 - DNA, 1642 bp, Homo sapiens
  Payload ID: 10234
  Gene Symbol: MITF
  Gene Name: microphthalmia-associated transcription factor
  ENST ID: ENST00000478490
  CDS Start-End: 96-413
tctttgccagtccatcttcaaattggaattatagaaagtagagggagggatagtctaccgtctctcactggattggtgccacctaaaacattgttatgctggaaatgctagaatataatcactatcaggtgcagacccacctcgaaaaccccaccaagtaccacatacagcaagcccaacggcagcaggtaaagcagtacctttctaccactttagcaaataaacatgccaaccaagtcctgagcttgccatgtccaaaccagcctggcgatcatgtcatgccaccggtgccggggagcagcgcacccaacagccccatggctatgcttacgcttaactccaactgtgaaaaagagggattttataagtttgaagagcaaaacagggcagagagcgagtgcccagatggatgatgtaatcgatgacatcattagcctagaatcaagttataatgaggaaatcttgggcttgatggatcctgctttgcaaatggcaaatacgttgcctgtctcgggaaacttgattgatctttatggaaaccaaggtctgcccccaccaggcctcaccatcagcaactcctgtccagccaaccttcccaacataaaaagggagctcacagcgtgtatttttcccacagagtctgaagcaagagcactggccaaagagaggcagaaaaaggacaatcacaacctgattgaacgaagaagaagatttaacataaatgaccgcattaaagaactaggtactttgattcccaagtcaaatgatccagacatgcgctggaacaagggaaccatcttaaaagcatccgtggactatatccgaaagttgcaacgagaacagcaacgcgcaaaagaacttgaaaaccgacagaagaaactggagcacgccaaccggcatttgttgctcagaatacaggaacttgaaatgcaggctcgagctcatggactttcccttattccatccacgggtctctgctctccagatttggtgaatcggatcatcaagcaagaacccgttcttgagaactgcagccaagacctccttcagcatcatgcagacctaacctgtacaacaactctcgatctcacggatggcaccatcaccttcaacaacaacctcggaactgggactgaggccaaccaagcctatagtgtccccacaaaaatgggatccaaactggaagacatcctgatggacgacaccctttctcccgtcggtgtcactgatccactcctttcctcagtgtcccccggagcttccaaaacaagcagccggaggagcagtatgagcatggaagagacggagcacacttgttagcgaatcctccctgcactgcattcgcacaaactgcttcctttcttgattcgtagatttaataacttacctgaaggggttttcttgataattttcctttaatatgaaattttttttcatgctttatcaatagcccaggatatattttatttttagaattttgtgaaacagacttgtatattctattttacaactacaaatgcctccaaagtattgtacaaataagtgtgcagtatctgtgaactgaattcaccacagactttagctttctgagcaagaggattttgcgtcagagaaatgtctgtccatttttattcaggggaaa

SEQ ID NO: 153767 - DNA, 1074 bp, Homo sapiens
  Payload ID: 10234
  Gene Symbol: MITF
  Gene Name: microphthalmia-associated transcription factor
  Uniprot ID: O75030
  ENST ID: ENST00000531774
  CDS Start-End: 1-1074
atgctggaaatgctagaatataatcactatcaggtgcagacccacctcgaaaaccccaccaagtaccacatacagcaagcccaacggcagcagggattttataagtttgaagagcaaaacagggcagagagcgagtgcccaggcatgaacacacattcacgagcgtcctgtatgcagatggatgatgtaatcgatgacatcattagcctagaatcaagttataatgaggaaatcttgggcttgatggatcctgctttgcaaatggcaaatacgttgcctgtctcgggaaacttgattgatctttatggaaaccaaggtctgcccccaccaggcctcaccatcagcaactcctgtccagccaaccttcccaacataaaaagggagctcacagagtctgaagcaagagcactggccaaagagaggcagaaaaaggacaatcacaacctgattgaacgaagaagaagatttaacataaatgaccgcattaaagaactaggtactttgattcccaagtcaaatgatccagacatgcgctggaacaagggaaccatcttaaaagcatccgtggactatatccgaaagttgcaacgagaacagcaacgcgcaaaagaacttgaaaaccgacagaagaaactggagcacgccaaccggcatttgttgctcagaatacaggaacttgaaatgcaggctcgagctcatggactttcccttattccatccacgggtctctgctctccagatttggtgaatcggatcatcaagcaagaacccgttcttgagaactgcagccaagacctccttcagcatcatgcagacctaacctgtacaacaactctcgatctcacggatggcaccatcaccttcaacaacaacctcggaactgggactgaggccaaccaagcctatagtgtccccacaaaaatgggatccaaactggaagacatcctgatggacgacaccctttctcccgtcggtgtcactgatccactcctttcctcagtgtcccccggagcttccaaaacaagcagccggaggagcagtatgagcatggaagagacggagcacacttgttag

SEQ ID NO: 153768 - DNA, 1069 bp, Homo sapiens
  Payload ID: 10234
  Gene Symbol: MITF
  Gene Name: microphthalmia-associated transcription factor
  ENST ID: ENST00000394348
  CDS Start-End: 95-370
ctttgccagtccatcttcaaattggaattatagaaagtagagggagggatagtctaccgtctctcactggattggtgccacctaaaacattgttatgctggaaatgctagaatataatcactatcaggtgcagacccacctcgaaaaccccaccaagtaccacatacagcaagcccaacggcagcaggtaaagcagtacctttctaccactttagcaaataaacatgccaaccaagtcctgagcttgccatgtccaaaccagcctggcgatcatgtcatgccaccggtgccggggagcagcgcacccaacagccccatggctatgcttacgcttaactccaactgtgaaaaagagtttatgaagcagtgagaatgcagagagaggagaaggggaggtggaaaaggaaaagcaaaaatagaagaggtgtgggacatgctgtttagaagttccgcttgttgtgaatgtctggaatattatttttatttctccctgagttgggggaagaaagaatggaatatgcatggatggatttgaatcatatagcacatgagactttaacggaaacgcaaaggtttaattgctggatacattctgtttcataataaaattgccactgcccgttaaatctgctttggtgaaggctggattggaaacaagactcaaactaccttcaagctaattggtgcatcaaaatttgcagcatacaaatacctgagagctgtgatttaatgctcattatttccaaattatgagatgatgagcttcatctcaatgggatttaccgtactatggactatgaagtgtttatgcaaattcggaggcaacttttctagagttggattgattttaatttctagagggactaaaatctttgcccctatgcccaaaccaactgctttatttttctctacccaaatttgtcatctagcaagatgatttgacacaagttcttccttcattatttcatcttttggtcagattccactttgtttgaaagcttagttcatcttgttgctgtgccatcagctttgtgtgaacaggtcattaaaaagtcatttgcaaatccaa

SEQ ID NO: 153769 - DNA, 386 bp, Homo sapiens
  Payload ID: 10235
  Gene Symbol: MSMB
  Gene Name: microseminoprotein, beta-
  Uniprot ID: P08118
  ENST ID: ENST00000581478
  CDS Start-End: 33-266
gtacctgtctataaggagtcctgcttatcacaatgaatgttctcctgggcagcgttgtgatctttgccaccttcgtgactttatgcaatgcatcatgctatttcatacctaatgagggagttccaggagattcaaccaggatgtttctacacctgtgggttatgacaaagacaactgccaaagaatcttcaagaaggaggactgcaagtatatcgtggtggagaagaaggacccaaaaaagacctgttctgtcagtgaatggataatctaatgtgcttctagtaggcacagggctcccaggccaggcctcattctcctctggcctctaatagtcaatgattgtgtagccatgcctatcagtaaaaagatttttgagcaaacacttg

SEQ ID NO: 153770 - DNA, 488 bp, Homo sapiens
  Payload ID: 10235
  Gene Symbol: MSMB
  Gene Name: microseminoprotein, beta-
  Uniprot ID: P08118
  ENST ID: ENST00000582163
  CDS Start-End: 33-377
gtacctgtctataaggagtcctgcttatcacaatgaatgttctcctgggcagcgttgtgatctttgccaccttcgtgactttatgcaatgcatcatgctatttcatacctaatgagggagttccaggagattcaaccaggaaatgcatggatctcaaaggaaacaaacacccaataaactcggagtggcagactgacaactgtgagacatgcacttgctacgaaacagaaatttcatgttgcacccttgtttctacacctgtgggttatgacaaagacaactgccaaagaatcttcaagaaggaggactgcaagtatatcgtggtggagaagaaggacccaaaaaagacctgttctgtcagtgaatggataatctaatgtgcttctagtaggcacagggctcccaggccaggcctcattctcctctggcctctaatagtcaatgattgtgtagccatgcctatcagtaaaaagatttttgagcaaaca

SEQ ID NO: 153771 - DNA, 670 bp, Homo sapiens
  Payload ID: 10236
  Gene Symbol: MSMP
  Gene Name: microseminoprotein, prostate associated
  Uniprot ID: Q1L6U9
  ENST ID: ENST00000436428
  CDS Start-End: 141-560
gggagatagtgtgagacaggagcccaggggagaaagacagaaactaagactcaaggagcaacgcaaagcaaagtcaaggagtcaagaccagagtagctgagcagaggccaagaagggtctgagagggctgtgcagcagcaatggccctaaggatgctctgggctggacaggccaaggggatcctaggaggctgggggatcatctgcttggtgatgtctctactcctccagcacccaggagtctacagcaagtgctacttccaagctcaagccccctgtcactatgaggggaaatattttaccctgggtgagtcttggctccgcaaggactgtttccattgcacctgtctgcatcctgttggcgtgggctgctgtgacacgtcccagcatcccatcgacttcccggctgggtgtgaggtacgtcaggaggcaggaacctgccagttctccttggtgcaaaaatctgaccctcggctgccctgcaaagggggagggcctgacccagaatggggctcagccaacacccctgttcctggggctcctgctccccactccagctaaactcaactgatcatccatctgctgactgctcactgctgctgccacttccagggaaaccactagcagctgccaatgtattctgaacaaataaattaatgctatagctgaaa

SEQ ID NO: 153772 - DNA, 901 bp, Homo sapiens
  Payload ID: 10237
  Gene Symbol: MGST1
  Gene Name: microsomal glutathione S-transferase 1
  Uniprot ID: P10620
  ENST ID: ENST00000010404
  CDS Start-End: 66-533
tcgtgacaaagcaaattgtctggtatcatgaatttggaacaccattccagaccaaaattgaaaaaatggttgacctcacccaggtaatggatgatgaagtattcatggcttttgcatcctatgcaacaattattctttcaaaaatgatgcttatgagtactgcaactgcattctatagattgacaagaaaggtttttgccaatccagaagactgtgtagcatttggcaaaggagaaaatgccaagaagtatcttcgaacagatgacagagtagaacgtgtacgcagagcccacctgaatgaccttgaaaatattattccatttcttggaattggcctcctgtattccttgagtggtcccgacccctctacagccatcctgcacttcagactatttgtcggagcacggatctaccacaccattgcatatttgacaccccttccccagccaaatagagctttgagtttttttgttggatatggagttactctttccatggcttacaggttgctgaaaagtaaattgtacctgtaaagaaaatcatacaactcagcatccagttggctttttaagaattctgtacttccaatttataatgaatactttcttagattttaggtaggaggggagcagaggaattatgaactggggtaaacccattttgaatattagcattgccaatatcctgtattcttgttttacatttggattagaaatttaacatagtaattcttaagtcttttgtctgatttttaaagtactttcttataaatttggatcatgttatgatttgtaacattcacacaacacctcacttttgaatctataaaagaattgcacgtatgagaaacctatatttcaatactgctgaaacagacatgaaataaagaatttaaagaatg

SEQ ID NO: 153773 - DNA, 909 bp, Homo sapiens
  Payload ID: 10237
  Gene Symbol: MGST1
  Gene Name: microsomal glutathione S-transferase 1
  Uniprot ID: P10620
  ENST ID: ENST00000396207
  CDS Start-End: 74-541
gaattcaagtcctaaagcctacagttttgaatactactgaaatgacaagttattccagaccaaaattgaaaaaatggttgacctcacccaggtaatggatgatgaagtattcatggcttttgcatcctatgcaacaattattctttcaaaaatgatgcttatgagtactgcaactgcattctatagattgacaagaaaggtttttgccaatccagaagactgtgtagcatttggcaaaggagaaaatgccaagaagtatcttcgaacagatgacagagtagaacgtgtacgcagagcccacctgaatgaccttgaaaatattattccatttcttggaattggcctcctgtattccttgagtggtcccgacccctctacagccatcctgcacttcagactatttgtcggagcacggatctaccacaccattgcatatttgacaccccttccccagccaaatagagctttgagtttttttgttggatatggagttactctttccatggcttacaggttgctgaaaagtaaattgtacctgtaaagaaaatcatacaactcagcatccagttggctttttaagaattctgtacttccaatttataatgaatactttcttagattttaggtaggaggggagcagaggaattatgaactggggtaaacccattttgaatattagcattgccaatatcctgtattcttgttttacatttggattagaaatttaacatagtaattcttaagtcttttgtctgatttttaaagtactttcttataaatttggatcatgttatgatttgtaacattcacacaacacctcacttttgaatctataaaagaattgcacgtatgagaaacctatatttcaatactgctgaaacagacatgaaataaagaatttaaagaatg

SEQ ID NO: 153774 - DNA, 979 bp, Homo sapiens
  Payload ID: 10237
  Gene Symbol: MGST1
  Gene Name: microsomal glutathione S-transferase 1
  Uniprot ID: P10620
  ENST ID: ENST00000396209
  CDS Start-End: 144-611
ggcagatggaagacttgggggggtctctgccagctggaagtgcttggctccacttagcagctaaacttagcttttcaatcgatcgcttttgaaagggaattgtatttctgtccccgtgcggattccagaccaaaattgaaaaaatggttgacctcacccaggtaatggatgatgaagtattcatggcttttgcatcctatgcaacaattattctttcaaaaatgatgcttatgagtactgcaactgcattctatagattgacaagaaaggtttttgccaatccagaagactgtgtagcatttggcaaaggagaaaatgccaagaagtatcttcgaacagatgacagagtagaacgtgtacgcagagcccacctgaatgaccttgaaaatattattccatttcttggaattggcctcctgtattccttgagtggtcccgacccctctacagccatcctgcacttcagactatttgtcggagcacggatctaccacaccattgcatatttgacaccccttccccagccaaatagagctttgagtttttttgttggatatggagttactctttccatggcttacaggttgctgaaaagtaaattgtacctgtaaagaaaatcatacaactcagcatccagttggctttttaagaattctgtacttccaatttataatgaatactttcttagattttaggtaggaggggagcagaggaattatgaactggggtaaacccattttgaatattagcattgccaatatcctgtattcttgttttacatttggattagaaatttaacatagtaattcttaagtcttttgtctgatttttaaagtactttcttataaatttggatcatgttatgatttgtaacattcacacaacacctcacttttgaatctataaaagaattgcacgtatgagaaacctatatttcaatactgctgaaacagacatgaaataaagaatttaaagaatg

SEQ ID NO: 153775 - DNA, 914 bp, Homo sapiens
  Payload ID: 10237
  Gene Symbol: MGST1
  Gene Name: microsomal glutathione S-transferase 1
  Uniprot ID: P10620
  ENST ID: ENST00000396210
  CDS Start-End: 85-552
cctgcattgcgcgcgacccggcggcgggacaggcttgctgcttcctcctcctcggcctcaccattccagaccaaaattgaaaaaatggttgacctcacccaggtaatggatgatgaagtattcatggcttttgcatcctatgcaacaattattctttcaaaaatgatgcttatgagtactgcaactgcattctatagattgacaagaaaggtttttgccaatccagaagactgtgtagcatttggcaaaggagaaaatgccaagaagtatcttcgaacagatgacagagtagaacgtgtacgcagagcccacctgaatgaccttgaaaatattattccatttcttggaattggcctcctgtattccttgagtggtcccgacccctctacagccatcctgcacttcagactatttgtcggagcacggatctaccacaccattgcatatttgacaccccttccccagccaaatagagctttgagtttttttgttggatatggagttactctttccatggcttacaggttgctgaaaagtaaattgtacctgtaaagaaaatcatacaactcagcatccagttggctttttaagaattctgtacttccaatttataatgaatactttcttagattttaggtaggaggggagcagaggaattatgaactggggtaaacccattttgaatattagcattgccaatatcctgtattcttgttttacatttggattagaaatttaacatagtaattcttaagtcttttgtctgatttttaaagtactttcttataaatttggatcatgttatgatttgtaacattcacacaacacctcacttttgaatctataaaagaattgcacgtatgagaaacctatatttcaatactgctgaaacagacatgaaataaagaatttaa

SEQ ID NO: 153776 - DNA, 546 bp, Homo sapiens
  Payload ID: 10237
  Gene Symbol: MGST1
  Gene Name: microsomal glutathione S-transferase 1
  ENST ID: ENST00000540056
  CDS Start-End: 144-284
ggcagatggaagacttgggggggtctctgccagctggaagtgcttggctccacttagcagctaaacttagcttttcaatcgatcgcttttgaaagggaattgtatttctgtccccgtgcggattccagaccaaaattgaaaaaatggttgacctcacccaggtaatggatgatgaagtattcatggcttttgcatcctatgcaacaattattctttcaaaaatgatgcttatgagtactgcaactgcattctatagattgacaagaaagagcccacctgaatgaccttgaaaatattattccatttcttggaattggcctcctgtattccttgagtggtcccgacccctctacagccatcctgcacttcagactatttgtcggagcacggatctaccacaccattgcatatttgacaccccttccccagccaaatagagctttgagtttttttgttggatatggagttactctttccatggcttacaggttgctgaaaagtaaattgtacctgtaaagaaaatcatacaactcagcatccagttgg

SEQ ID NO: 153777 - DNA, 1331 bp, Homo sapiens
  Payload ID: 10237
  Gene Symbol: MGST1
  Gene Name: microsomal glutathione S-transferase 1
  Uniprot ID: P10620
  ENST ID: ENST00000535309
  CDS Start-End: 40-303
tcctcctcggcctcaccattccagaccaaaattgaaaaaatggttgacctcacccaggtaatggatgatgaagtattcatggcttttgcatcctatgcaacaattattctttcaaaaatgatgcttatgagtactgcaactgcattctatagattgacaagaaaggtttttgccaatccagaagactgtgtagcatttggcaaaggagaaaatgccaagaagtatcttcgaacagatgacagagtagaacgtgtacgcagaatcaaacaaaccctgagcatttatcttgcctcttctatataaagtttaactcggcataaccaattgctgatgaagaagaaatgtttccttgtagaagcaaaccagtgaataattgaagaaaaaatttatcttttcaacatctaatgagttaatggattcaagcaaagattatccacggctgttaacaacacaaaaagacaatcggaaattagctattactgcgggaagtacccaataccatctatgaaactgtgtggacaaaaacactgacaaaaatctccacgaatctctaattttgaatacaaatttaaagaaaatgcaaaggattaaaatagaccatgatgaagtcagaaaaattcagacagagaaaaatgctccaggaccagaaacccatttcttccgcaaaagcttccaggtagagattgactgaccgagagaacagagacatagagagaacctagagattaaaagaaacttgagcgatttgtcagcattcagttgcaacgtatggatgtgatttgaattctaatttaaaaaccaaagtagaaagtggtaaacaattggggaaatgtgaacaatgatagaatatttaatattaatgaaatatgttaaatattttcagatatgataatggcattgagtatgtaaaaaagagcctgtttttaaagaaatacctctgaaatacagatgatataatatcatctgtatattagatgatattatatatatcagtatcatcagaataaagtaaggttagcatgaattgttaattgttgacactgtgcaataggtacgtggataattactatactgttctcattccttttatttatgtttgaaatgttctaaaattaaaagttaaagcatagagtgtaaagttgagcaaattcctccaagacctaaatatagcttatcaaaacttacattaattagatgctgactgttgagctaatacttttttttaatgatgtgtgcttcagtttattgcacttttcaaatactccagttttttgtgtgcgtgtgttttttaaattttattattattaaagttttagggtacatgtgcacaa

SEQ ID NO: 153778 - DNA, 202 bp, Homo sapiens
  Payload ID: 10237
  Gene Symbol: MGST1
  Gene Name: microsomal glutathione S-transferase 1
  ENST ID: ENST00000538885
  CDS Start-End: 77-202
gtacctgtgaaggggaagatgttaccctggagagatggttcattgactcatcagattccagaccaaaattgaaaaaatggttgacctcacccaggtaatggatgatgaagtattcatggcttttgcatcctatgcaacaattattctttcaaaaatgatgcttatgagtactgcaactgcattctatagattgacaagaaag

SEQ ID NO: 153779 - DNA, 298 bp, Homo sapiens
  Payload ID: 10237
  Gene Symbol: MGST1
  Gene Name: microsomal glutathione S-transferase 1
  ENST ID: ENST00000536371
  CDS Start-End: 66-298
tcgtgacaaagcaaattgtctggtatcatgaatttggaacaccattccagaccaaaattgaaaaaatggttgacctcacccaggtaatggatgatgaagtattcatggcttttgcatcctatgcaacaattattctttcaaaaatgatgcttatgagtactgcaactgcattctatagattgacaagaaaggtttttgccaatccagaagactgtgtagcatttggcaaaggagaaaatgccaagaagtatcttcgaacagatgacagagtagaacgtgtacgcagagcccacctgaa

SEQ ID NO: 153780 - DNA, 406 bp, Homo sapiens
  Payload ID: 10237
  Gene Symbol: MGST1
  Gene Name: microsomal glutathione S-transferase 1
  ENST ID: ENST00000543076
  CDS Start-End: 89-406
agtccctgcattgcgcgcgacccggcggcgggacaggcttgctgcttcctcctcctcggcctcaccattccagaccaaaattgaaaaaatggttgacctcacccaggtttttgccaatccagaagactgtgtagcatttggcaaaggagaaaatgccaagaagtatcttcgaacagatgacagagtagaacgtgtacgcagagcccacctgaatgaccttgaaaatattattccatttcttggaattggcctcctgtattccttgagtggtcccgacccctctacagccatcctgcacttcagactatttgtcggagcacggatctaccacaccattgcatatttgacaccccttccccagccaaatagagctttgagtttttttgttggatatggagttactctt

SEQ ID NO: 153781 - DNA, 365 bp, Homo sapiens
  Payload ID: 10237
  Gene Symbol: MGST1
  Gene Name: microsomal glutathione S-transferase 1
  ENST ID: ENST00000540126
  CDS Start-End: 125-365
ggggtctctgccagctggaagtgcttggctccacttagcagctaaacttagcttttcaatcgatcgcttttgaaagggaattgtatttctgtccccgtgcggattccagaccaaaattgaaaaaatggttgacctcacccaggtaatggatgatgaagtattcatggcttttgcatcctatgcaacaattattctttcaaaaatgatgcttatgagtactgcaactgcattctatagattgacaagaaaggtttttgccaatccagaagactgtgtagcatttggcaaaggagaaaatgccaagaagtatcttcgaacagatgacagagtagaacgtgtacgcagagcccacctgaatgaccttg

SEQ ID NO: 153782 - DNA, 801 bp, Homo sapiens
  Payload ID: 10238
  Gene Symbol: MGST2
  Gene Name: microsomal glutathione S-transferase 2
  Uniprot ID: Q99735
  ENST ID: ENST00000265498
  CDS Start-End: 253-696
gctggccgtgggagaggcttaaaacaaacgccggaagcaactcccagccccataaagatctgtgaccggcagccccagacctgcctgccttcctgacttctgttccagagcaaaggtcattcagccgcttgaatcagccttttccccccacccggtccccaactttgtttacccgataaggaaggtcagcattcaaagtcaagaagcgccatttatcttcccgtgcgctctacaaatagttccgtgagaaagatggccgggaactcgatcctgctggctgctgtctctattctctcggcctgtcagcaaagttattttgctttgcaagttggaaaggcaagattaaaatacaaagttacgcccccagcagtcactgggtcaccagagtttgagagagtatttcgggcacaacaaaactgtgtggagttttatcctatattcataattacattgtggatggctgggtggtatttcaaccaagtttttgctacttgtctgggtctggtgtacatatatggccgtcacctatacttctggggatattcagaagctgctaaaaaacggatcaccggtttccgactgagtctggggattttggccttgttgaccctcctaggtgccctgggaattgcaaacagctttctggatgaatatctggacctcaatattgccaagaaactgaggcggcaattctaactttttctcttccctttaatacttgcagaagctgttcccaccatgaaggtaatatggtatcatttgttaaataaaaataaagtctttattctgtttttcttgaaa

SEQ ID NO: 153783 - DNA, 1780 bp, Homo sapiens
  Payload ID: 10238
  Gene Symbol: MGST2
  Gene Name: microsomal glutathione S-transferase 2
  Uniprot ID: Q99735
  ENST ID: ENST00000503816
  CDS Start-End: 5-448
aaagatggccgggaactcgatcctgctggctgctgtctctattctctcggcctgtcagcaaagttattttgctttgcaagttggaaaggcaagattaaaatacaaagttacgcccccagcagtcactgggtcaccagagtttgagagagtatttcgggcacaacaaaactgtgtggagttttatcctatattcataattacattgtggatggctgggtggtatttcaaccaagtttttgctacttgtctgggtctggtgtacatatatggccgtcacctatacttctggggatattcagaagctgctaaaaaacggatcaccggtttccgactgagtctggggattttggccttgttgaccctcctaggtgccctgggaattgcaaacagctttctggatgaatatctggacctcaatattgccaagaaactgaggcggcaattctaactttttctcttccctttaatacttgcagaagctgttcccaccatgaagttattggtttcttgaactctttggggcacaatttcaagaggaagaagtaaaaaaaggataccatttcaaggaattgcccagggacaagtgcgaagagaatattctttctcttggctgaggaaggttctcttgtgatcctgggaaatgctagaccgtgagcatcttgatggaggatgtgaactgccacttcctcacaggcagcaggcaggtgctgaataagtgcttgctgaatgaatgaatgaatcacgccaaggggcatgttacctgttccgccaaaatctgctgctgctgctgctgctgctgctgcctttgctcccgcaggaactgttgcttctgctgctctatcaactgggcccgctgatcaatgagcatctgcttcatgatggctgcttggggctggctgcccaggaagccggggcctgcgggactggctcctgagaccatgccacctgagcctgggggcacggaggactgcatggggcctgtggttcggggaagtccaactggatgctgctcctgggaagacaagagagagggagatgcagggattccccatagagactcactgctgtttgaagggaagcccctggaaaaagggaacggggcagaagtcccagcttatggactggagggtttttgagtggcacgcattgcatttccataaacgtagcttcaaacccgaccttacctgagtagaatgagagaggccacaagggacagtaagagagcatggctctgggaagtccaaggccaagtccagtctgtttcggatgggactgactattgcatatagactggattttcaactaacatcctgtgttcctccaaggaaagggaataagccctcaggctgagctcacctaaagtctggaacacgagacacatcctgacctcacctgttaatccttatttcttactgtctacttggccaaaatggacgtcttctttgcaagtaggagggacatttgcagaaaactgcaggaatttgttaatcaacagatctgatatttgatggaattctaacgagttgcaacatttgagagcttagatatatgtcagaaagaaaaatcctcctggccagagttgttgatggtgagaactgggaatgttttacaccgatcaaagctatgtaatctcctaatatttttaaaaatagaattgagtcggccgggcgcggtgtctcacgcctgtaatcccagtactttgggaggcccagtactttgggtggatcacgaggtcagttcgagaccagcttggccaagatggtgaaaccctgtctctact

SEQ ID NO: 153784 - DNA, 634 bp, Homo sapiens
  Payload ID: 10238
  Gene Symbol: MGST2
  Gene Name: microsomal glutathione S-transferase 2
  Uniprot ID: Q99735
  ENST ID: ENST00000506797
  CDS Start-End: 186-419
ggcagccccagacctgcctgccttcctgacttctgttccagagcaaaggtcattcagccgcttgaatcagccttttccccccacccggtccccaactttgtttacccgataaggaaggtcagcattcaaagtcaagaagcgccatttatcttcccgtgcgctctacaaatagttccgtgagaaagatggccgggaactcgatcctgctggctgctgtctctattctctcggcctgtcagcaaagttattttgctttgcaagttggaaaggcaagattaaaatacaaagttacgcccccagcagtcactgggtcaccagagtttgagagagtatttcgggcacatttttgctacttgtctgggtctggtgtacatatatggccgtcacctatacttctggggatattcagaagctgctaaaaaacggatcaccggtttccgactgagtctggggattttggccttgttgaccctcctaggtgccctgggaattgcaaacagctttctggatgaatatctggacctcaatattgccaagaaactgaggcggcaattctaactttttctcttccctttaatacttgcagaagctgttcccaccatgaaggtaatatggtatcatttgttaaataaaa

SEQ ID NO: 153785 - DNA, 1278 bp, Homo sapiens
  Payload ID: 10238
  Gene Symbol: MGST2
  Gene Name: microsomal glutathione S-transferase 2
  Uniprot ID: Q99735
  ENST ID: ENST00000616265
  CDS Start-End: 253-696
gctggccgtgggagaggcttaaaacaaacgccggaagcaactcccagccccataaagatctgtgaccggcagccccagacctgcctgccttcctgacttctgttccagagcaaaggtcattcagccgcttgaatcagccttttccccccacccggtccccaactttgtttacccgataaggaaggtcagcattcaaagtcaagaagcgccatttatcttcccgtgcgctctacaaatagttccgtgagaaagatggccgggaactcgatcctgctggctgctgtctctattctctcggcctgtcagcaaagttattttgctttgcaagttggaaaggcaagattaaaatacaaagttacgcccccagcagtcactgggtcaccagagtttgagagagtatttcgggcacaacaaaactgtgtggagttttatcctatattcataattacattgtggatggctgggtggtatttcaaccaagtttttgctacttgtctgggtctggtgtacatatatggccgtcacctatacttctggggatattcagaagctgctaaaaaacggatcaccggtttccgactgagtctggggattttggccttgttgaccctcctaggtgccctgggaattgcaaacagctttctggatgaatatctggacctcaatattgccaagaaactgaggcggcaattctaactttttctcttccctttaatacttgcagaagctgttcccaccatgaaggcttgaagccacagtgcatggccagaaccagccagacctttggagttcaagaactcgagaggtgggtgaaaactgccattgcctccacagactgtcttctccgtggaaagaagacctgagtcaccagggctgggaaacctgcaccactgagacgagcacagcctctgccggcatgcaagtggccgctgtcaggacacatggactgaaagtggtttgtcagctgctccattaggttttttttacccatatgtttgctacctttctttccttgatttaaaaatagggagggggagcagtctcagctgtcttcagctgctagggagatttttttccccctcctgagctactgtttcccccaacccgagcctttctctcttattgtacccaccctttctgatgaagtcatcaaagcaaagattgcataactgatgcataggcctatcttgtgttatactgggagacaggccaatgtttccattaatagacaagagcaccaccacgctgccaaatggagctctctgctgcaaccactac

SEQ ID NO: 153786 - DNA, 706 bp, Homo sapiens
  Payload ID: 10239
  Gene Symbol: MGST3
  Gene Name: microsomal glutathione S-transferase 3
  ENST ID: ENST00000367883
  CDS Start-End: 90-590
attccccgaagttgtggcttctgctgatactttccttgagagtcacgagtttacaagctacataatagcgtcgggggcaaggacaggagatgccctggaggggaaggcgcttccggctctgcagacgcaagatggctgtcctctctaaggaatatggttttgtgcttctaactggtgctgccagctttataatggtggcccacctagccatcaatgtttccaaggcccgcaagaagtacaaagtggagtatcctatcatgtacagcacggaccctgaaaatgggcacatcttcaactgcattcagcgagcccaccagaacacgttggaagtgtatcctcccttcttattttttctagctgttggaggtgtttaccacccgcgtatagcttctggcctgggcttggcctggattgttggacgagttctttatgcttatggctattacacgggagaacccagcaagcgtagtcgaggagccctggggtccatcgccctcctgggcttggtgggcacaactgtgtgctctgctttccagcatcttggttgggttaaaagtggcttgggcagtggacccaaatgctgccattaaagaattataggggtttaaaaactctcattcattttaaatgacttacctttatttccagttacattttttttctaaatataataaaaacttacctggcatcagcctcatacctaaaa

SEQ ID NO: 153787 - DNA, 716 bp, Homo sapiens
  Payload ID: 10239
  Gene Symbol: MGST3
  Gene Name: microsomal glutathione S-transferase 3
  Uniprot ID: O14880
  ENST ID: ENST00000367884
  CDS Start-End: 142-600
gcagttttgttctgctccagctgttcgaaggtgatccaggacagatcttccatcctcctaacatatagttagcttccactctccaaatattccaccagcaacattgatgaatattgaagactatggactgtgagacgcaagatggctgtcctctctaaggaatatggttttgtgcttctaactggtgctgccagctttataatggtggcccacctagccatcaatgtttccaaggcccgcaagaagtacaaagtggagtatcctatcatgtacagcacggaccctgaaaatgggcacatcttcaactgcattcagcgagcccaccagaacacgttggaagtgtatcctcccttcttattttttctagctgttggaggtgtttaccacccgcgtatagcttctggcctgggcttggcctggattgttggacgagttctttatgcttatggctattacacgggagaacccagcaagcgtagtcgaggagccctggggtccatcgccctcctgggcttggtgggcacaactgtgtgctctgctttccagcatcttggttgggttaaaagtggcttgggcagtggacccaaatgctgccattaaagaattataggggtttaaaaactctcattcattttaaatgacttacctttatttccagttacattttttttctaaatataataaaaacttacctggcatcagcctcatacctaaaa

SEQ ID NO: 153788 - DNA, 680 bp, Homo sapiens
  Payload ID: 10239
  Gene Symbol: MGST3
  Gene Name: microsomal glutathione S-transferase 3
  ENST ID: ENST00000367885
  CDS Start-End: 64-564
cccacaccgcgctgcgcagttttgttctgctccagctgttcgaaggtgatccagggacaggagatgccctggaggggaaggcgcttccggctctgcagacgcaagatggctgtcctctctaaggaatatggttttgtgcttctaactggtgctgccagctttataatggtggcccacctagccatcaatgtttccaaggcccgcaagaagtacaaagtggagtatcctatcatgtacagcacggaccctgaaaatgggcacatcttcaactgcattcagcgagcccaccagaacacgttggaagtgtatcctcccttcttattttttctagctgttggaggtgtttaccacccgcgtatagcttctggcctgggcttggcctggattgttggacgagttctttatgcttatggctattacacgggagaacccagcaagcgtagtcgaggagccctggggtccatcgccctcctgggcttggtgggcacaactgtgtgctctgctttccagcatcttggttgggttaaaagtggcttgggcagtggacccaaatgctgccattaaagaattataggggtttaaaaactctcattcattttaaatgacttacctttatttccagttacattttttttctaaatataataaaaacttacctggcatcagcctcatacctaaaa

SEQ ID NO: 153789 - DNA, 778 bp, Homo sapiens
  Payload ID: 10239
  Gene Symbol: MGST3
  Gene Name: microsomal glutathione S-transferase 3
  ENST ID: ENST00000367888
  CDS Start-End: 89-478
agccccgccccaggcgagggcgccgcacccacaccgcgctgcgcagttttgttctgctccagctgttcgaaggtgatccagacgcaagatggctgtcctctctaaggaatatggttttgtgcttctaactggtgctgccagctttataatggtggcccacctagccatcaatgtttccaaggcccgcaagaagtacaaagtggagtatcctatcatgtacagcacggaccctgaaaatgggcacatcttcaactgcattcagcgagcccaccagaacacgttggaagtgtatcctcccttcttattttttctagctgttggaggtgtttaccacccgcgtatagcttctggcctgggcttggcctggattgttggacgagttctttatgcttatggctattacacgggagaggtgtccaatcgtttggcttccctgggccacactggaagaagaagaattgtcttgggccacacataaaatacactaacattaacgacagtcgatgagctaaaagaaaaaaatattgccaaaaaaaaaaaaaacccacgttttaagaaagtttacaaatttgtgtttggctgcattcaaagctgtcctgggctgcatatggactgtgggctgcggattggacaagcttgctttagagggactatcagaaacttatcttctcccaggcagctcctactgcttaaggtgcataggatccccttggacacagggtaacgctattggctttgtccagtatcacatatgtgtcctctgtgcaaagaaatacca

SEQ ID NO: 153790 - DNA, 1015 bp, Homo sapiens
  Payload ID: 10239
  Gene Symbol: MGST3
  Gene Name: microsomal glutathione S-transferase 3
  Uniprot ID: O14880
  ENST ID: ENST00000367889
  CDS Start-End: 441-899
atgcccgtgcttcgcccttacagcagagcgcctaaaaccgctacggtggctctgctggggacaaattattcacgtcccactgttctgcaaacccaatccgggaggtatgacctggctgggacagtttaggaagatggccacgaaggcacctgggggagtagatatatgtttttgagaatgagaggagtaaatcgctggacgaccatgagcaggaagaaaattaggcctccacctcccaaccagtggccctgagttggcaacttagacagcgcgcgccagcgccaggagccccgccttgggggcgtggccgcgcgctggtcggctggggcggggcctgcttctggcctcatctagccccgccccaggcgagggcgccgcacccacaccgcgctgcgcagttttgttctgctccagctgttcgaaggtgatccagacgcaagatggctgtcctctctaaggaatatggttttgtgcttctaactggtgctgccagctttataatggtggcccacctagccatcaatgtttccaaggcccgcaagaagtacaaagtggagtatcctatcatgtacagcacggaccctgaaaatgggcacatcttcaactgcattcagcgagcccaccagaacacgttggaagtgtatcctcccttcttattttttctagctgttggaggtgtttaccacccgcgtatagcttctggcctgggcttggcctggattgttggacgagttctttatgcttatggctattacacgggagaacccagcaagcgtagtcgaggagccctggggtccatcgccctcctgggcttggtgggcacaactgtgtgctctgctttccagcatcttggttgggttaaaagtggcttgggcagtggacccaaatgctgccattaaagaattataggggtttaaaaactctcattcattttaaatgacttacctttatttccagttacattttttttctaaatataataaaaacttacctggcatcagcctcatacctaaaa

SEQ ID NO: 153791 - DNA, 1130 bp, Homo sapiens
  Payload ID: 10239
  Gene Symbol: MGST3
  Gene Name: microsomal glutathione S-transferase 3
  ENST ID: ENST00000627653
  CDS Start-End: 1-501
atgccctggaggggaaggcgcttccggctctgcagacgcaagatggctgtcctctctaaggaatatggttttgtgcttctaactggtgctgccagctttataatggtggcccacctagccatcaatgtttccaaggcccgcaagaagtacaaagtggagtatcctatcatgtacagcacggaccctgaaaatgggcacatcttcaactgcattcagcgagcccaccagaacacgttggaagtgtatcctcccttcttattttttctagctgttggaggtgtttaccacccgcgtatagcttctggcctgggcttggcctggattgttggacgagttctttatgcttatggctattacacgggagaacccagcaagcgtagtcgaggagccctggggtccatcgccctcctgggcttggtgggcacaactgtgtgctctgctttccagcatcttggttgggttaaaagtggcttgggcagtggacccaaatgctgccattaaagaattataggggtttaaaaactctcattcattttaaatgacttacctttatttccagttacattttttttctaaatataataaaaacttacctggcatcagcctcatacctaaaactcctgactcttaccactcatttccgtttgagtctgtatctgaaatcagtagcctagtcctactagatgagaaaggagccacaagtattgtgccctctcctcacccttccagcagatgcttctgtagtatgtgaggttgagaaaaagtctgattgtggtgatgtaggtatagtcatgccacagtgatgaaaaattaaagaaaaatcttctagctctcaggatatgcattatcacttgctacagatactccaaggccaaaggaatgcttgagcctaaaagttcaagaccagcctgggcaacatagcaaaaccccatctctacaaaaaaatatacaacagttagccaggcatgatggcacatgtctgcagtcccagctacttgggaggctaaggtgggaggatcacttgagcccagggtgtcaaggctgcagtgagttatgatcacactgctgcactccagcgtgggtgacagagcaagaccctgtctcaaataaataaaaattaagtttctatt

SEQ ID NO: 153792 - DNA, 4037 bp, Homo sapiens
  Payload ID: 10240
  Gene Symbol: MTTP
  Gene Name: microsomal triglyceride transfer protein
  Uniprot ID: P55157
  ENST ID: ENST00000265517
  CDS Start-End: 204-2888
acctacgtttaatcattaatagtgagcccttcagtgaacttaggtcctgattttggagtttggagtctgacctttccccaaagataaacatgattgttgcaggttctgaagagggtcactccctcactggctgccattgaaagagtccacttctcagtgactcctagctgggcactggatgcagttgaggattgctggtcaatatgattcttcttgctgtgctttttctctgcttcatttcctcatattcagcttctgttaaaggtcacacaactggtctctcattaaataatgaccggctgtacaagctcacgtactccactgaagttcttcttgatcggggcaaaggaaaactgcaagacagcgtgggctaccgcatttcctccaacgtggatgtggccttactatggaggaatcctgatggtgatgatgaccagttgatccaaataacgatgaaggatgtaaatgttgaaaatgtgaatcagcagagaggagagaagagcatcttcaaaggaaaaagcccatctaaaataatgggaaaggaaaacttggaagctctgcaaagacctacgctccttcatctaatccatggaaaggtcaaagagttctactcatatcaaaatgaggcagtggccatagaaaatatcaagagaggtctggctagcctatttcagacacagttaagctctggaaccaccaatgaggtagatatctctggaaattgtaaagtgacctaccaggctcatcaagacaaagtgatcaaaattaaggccttggattcatgcaaaatagcgaggtctggatttacgaccccaaatcaggtcttgggtgtcagttcaaaagctacatctgtcaccacctataagatagaagacagctttgttatagctgtgcttgctgaagaaacacacaattttggactgaatttcctacaaaccattaaggggaaaatagtatcgaagcagaaattagagctgaagacaaccgaagcaggcccaagattgatgtctggaaagcaggctgcagccataatcaaagcagttgattcaaagtacacggccattcccattgtggggcaggtcttccagagccactgtaaaggatgtccttctctctcggagctctggcggtccaccaggaaatacctgcagcctgacaacctttccaaggctgaggctgtcagaaacttcctggccttcattcagcacctcaggactgcgaagaaagaagagatccttcaaatactaaagatggaaaataaggaagtattacctcagctggtggatgctgtcacctctgctcagacctcagactcattagaagccattttggactttttggatttcaaaagtgacagcagcattatcctccaggagaggtttctctatgcctgtggatttgcttctcatcccaatgaagaactcctgagagccctcattagtaagttcaaaggttctattggtagcagtgacatcagagaaactgttatgatcatcactgggacacttgtcagaaagttgtgtcagaatgaaggctgcaaactcaaagcagtagtggaagctaagaagttaatcctgggaggacttgaaaaagcagagaaaaaagaggacaccaggatgtatctgctggctttgaagaatgccctgcttccagaaggcatcccaagtcttctgaagtatgcagaagcaggagaagggcccatcagccacctggctaccactgctctccagagatatgatctccctttcataactgatgaggtgaagaagaccttaaacagaatataccaccaaaaccgtaaagttcatgaaaagactgtgcgcactgctgcagctgctatcattttaaataacaatccatcctacatggacgtcaagaacatcctgctgtctattggggagcttccccaagaaatgaataaatacatgctcgccattgttcaagacatcctacgttttgaaatgcctgcaagcaaaattgtccgtcgagttctgaaggaaatggtcgctcacaattatgaccgtttctccaggagtggatcttcttctgcctacactggctacatagaacgtagtccccgttcggcatctacttacagcctagacattctctactcgggttctggcattctaaggagaagtaacctgaacatctttcagtacattgggaaggctggtcttcacggtagccaggtggttattgaagcccaaggactggaagccttaatcgcagccacccctgacgagggggaggagaaccttgactcctatgctggtatgtcagccatcctctttgatgttcagctcagacctgtcacctttttcaacggatacagtgatttgatgtccaaaatgctgtcagcatctggcgaccctatcagtgtggtgaaaggacttattctgctaatagatcattctcaggaacttcagttacaatctggactaaaagccaatatagaggtccagggtggtctagctattgatatttcaggtgcaatggagtttagcttgtggtatcgtgagtctaaaacccgagtgaaaaatagggtgactgtggtaataaccactgacatcacagtggactcctcttttgtgaaagctggcctggaaaccagtacagaaacagaagcaggcttggagtttatctccacagtgcagttttctcagtacccattcttagtttgcatgcagatggacaaggatgaagctccattcaggcaatttgagaaaaagtacgaaaggctgtccacaggcagaggttatgtctctcagaaaagaaaagaaagcgtattagcaggatgtgaattcccgctccatcaagagaactcagagatgtgcaaagtggtgtttgcccctcagccggatagtacttccagcggatggttttgaaactgacctgtgatattttacttgaatttgtctccccgaaagggacacaatgtggcatgactaagtacttgctctctgagagcacagcgtttacatatttacctgtatttaagatttttgtaaaaagctacaaaaaactgcagtttgatcaaatttgggtatatgcagtatgctacccacagcgtcattttgaatcatcatgtgacgctttcaacaacgttcttagtttacttatacctctctcaaatctcatttggtacagtcagaatagttattctctaagaggaaactagtgtttgttaaaaacaaaaataaaaacaaaaccacacaaggagaacccaattttgtttcaacaatttttgatcaatgtatatgaagctcttgataggacttccttaagcatgacgggaaaaccaaacacgttccctaatcaggaaaaaaaaaaaaaaaaaaagtaagacacaaacaaaccattttttttctctttttttggagttgggggcccagggagaagggacaagacttttaaaagacttgttagccaacttcaagaattaatatttatgtctctgttattgttagttttaagccttaaggtagaaggcacatagaaataacatctcatctttctgctgaccattttagtgaggttgttccaaagacattcaggtctctacctccagccctgcaaaaatattggacctagcacagaggaatcaggaaaattaatttcagaaactccatttgatttttcttttgctgtgtctttttgagactgtaatatggtacactgtcctctaagggacatcctcattttatctcacctttttgggggtgagagctctagttcatttaactgtactctgcacaatagctaggatgactaagagaacattgcttcaagaaactggtggatttggatttccaaaatatgaaataaggaaaaaaatgtttttatttgtatgaattaaaagatccatgttgaacatttgcaaatatttattaataaacagatgtggtgataaacccaaaacaaatgacaggtccttattttccactaaacacagacacatgaaatgaaagtttagctagcccactatttgttgtaaattgaaaacgaagtgtgataaaataaatatgtagaaatca

SEQ ID NO: 153793 - DNA, 4092 bp, Homo sapiens
  Payload ID: 10240
  Gene Symbol: MTTP
  Gene Name: microsomal triglyceride transfer protein
  Uniprot ID: P55157
  ENST ID: ENST00000457717
  CDS Start-End: 257-2941
tttcgaacccgcaatggaagaaaggggaggggtttatgcggggcggggtctggagttagtgttttgggagtgggaggtagttacagtgatgtctgttttttcccgttcaagaattaagtgtgtacctgcagacgtgtattcattcatatattcttgttctgaagagggtcactccctcactggctgccattgaaagagtccacttctcagtgactcctagctgggcactggatgcagttgaggattgctggtcaatatgattcttcttgctgtgctttttctctgcttcatttcctcatattcagcttctgttaaaggtcacacaactggtctctcattaaataatgaccggctgtacaagctcacgtactccactgaagttcttcttgatcggggcaaaggaaaactgcaagacagcgtgggctaccgcatttcctccaacgtggatgtggccttactatggaggaatcctgatggtgatgatgaccagttgatccaaataacgatgaaggatgtaaatgttgaaaatgtgaatcagcagagaggagagaagagcatcttcaaaggaaaaagcccatctaaaataatgggaaaggaaaacttggaagctctgcaaagacctacgctccttcatctaatccatggaaaggtcaaagagttctactcatatcaaaatgaggcagtggccatagaaaatatcaagagaggtctggctagcctatttcagacacagttaagctctggaaccaccaatgaggtagatatctctggaaattgtaaagtgacctaccaggctcatcaagacaaagtgatcaaaattaaggccttggattcatgcaaaatagcgaggtctggatttacgaccccaaatcaggtcttgggtgtcagttcaaaagctacatctgtcaccacctataagatagaagacagctttgttatagctgtgcttgctgaagaaacacacaattttggactgaatttcctacaaaccattaaggggaaaatagtatcgaagcagaaattagagctgaagacaaccgaagcaggcccaagattgatgtctggaaagcaggctgcagccataatcaaagcagttgattcaaagtacacggccattcccattgtggggcaggtcttccagagccactgtaaaggatgtccttctctctcggagctctggcggtccaccaggaaatacctgcagcctgacaacctttccaaggctgaggctgtcagaaacttcctggccttcattcagcacctcaggactgcgaagaaagaagagatccttcaaatactaaagatggaaaataaggaagtattacctcagctggtggatgctgtcacctctgctcagacctcagactcattagaagccattttggactttttggatttcaaaagtgacagcagcattatcctccaggagaggtttctctatgcctgtggatttgcttctcatcccaatgaagaactcctgagagccctcattagtaagttcaaaggttctattggtagcagtgacatcagagaaactgttatgatcatcactgggacacttgtcagaaagttgtgtcagaatgaaggctgcaaactcaaagcagtagtggaagctaagaagttaatcctgggaggacttgaaaaagcagagaaaaaagaggacaccaggatgtatctgctggctttgaagaatgccctgcttccagaaggcatcccaagtcttctgaagtatgcagaagcaggagaagggcccatcagccacctggctaccactgctctccagagatatgatctccctttcataactgatgaggtgaagaagaccttaaacagaatataccaccaaaaccgtaaagttcatgaaaagactgtgcgcactgctgcagctgctatcattttaaataacaatccatcctacatggacgtcaagaacatcctgctgtctattggggagcttccccaagaaatgaataaatacatgctcgccattgttcaagacatcctacgttttgaaatgcctgcaagcaaaattgtccgtcgagttctgaaggaaatggtcgctcacaattatgaccgtttctccaggagtggatcttcttctgcctacactggctacatagaacgtagtccccgttcggcatctacttacagcctagacattctctactcgggttctggcattctaaggagaagtaacctgaacatctttcagtacattgggaaggctggtcttcacggtagccaggtggttattgaagcccaaggactggaagccttaatcgcagccacccctgacgagggggaggagaaccttgactcctatgctggtatgtcagccatcctctttgatgttcagctcagacctgtcacctttttcaacggatacagtgatttgatgtccaaaatgctgtcagcatctggcgaccctatcagtgtggtgaaaggacttattctgctaatagatcattctcaggaacttcagttacaatctggactaaaagccaatatagaggtccagggtggtctagctattgatatttcaggtgcaatggagtttagcttgtggtatcgtgagtctaaaacccgagtgaaaaatagggtgactgtggtaataaccactgacatcacagtggactcctcttttgtgaaagctggcctggaaaccagtacagaaacagaagcaggcttggagtttatctccacagtgcagttttctcagtacccattcttagtttgcatgcagatggacaaggatgaagctccattcaggcaatttgagaaaaagtacgaaaggctgtccacaggcagaggttatgtctctcagaaaagaaaagaaagcgtattagcaggatgtgaattcccgctccatcaagagaactcagagatgtgcaaagtggtgtttgcccctcagccggatagtacttccagcggatggttttgaaactgacctgtgatattttacttgaatttgtctccccgaaagggacacaatgtggcatgactaagtacttgctctctgagagcacagcgtttacatatttacctgtatttaagatttttgtaaaaagctacaaaaaactgcagtttgatcaaatttgggtatatgcagtatgctacccacagcgtcattttgaatcatcatgtgacgctttcaacaacgttcttagtttacttatacctctctcaaatctcatttggtacagtcagaatagttattctctaagaggaaactagtgtttgttaaaaacaaaaataaaaacaaaaccacacaaggagaacccaattttgtttcaacaatttttgatcaatgtatatgaagctcttgataggacttccttaagcatgacgggaaaaccaaacacgttccctaatcaggaaaaaaaaaaaaaaaaaaagtaagacacaaacaaaccattttttttctctttttttggagttgggggcccagggagaagggacaagacttttaaaagacttgttagccaacttcaagaattaatatttatgtctctgttattgttagttttaagccttaaggtagaaggcacatagaaataacatctcatctttctgctgaccattttagtgaggttgttccaaagacattcaggtctctacctccagccctgcaaaaatattggacctagcacagaggaatcaggaaaattaatttcagaaactccatttgatttttcttttgctgtgtctttttgagactgtaatatggtacactgtcctctaagggacatcctcattttatctcacctttttgggggtgagagctctagttcatttaactgtactctgcacaatagctaggatgactaagagaacattgcttcaagaaactggtggatttggatttccaaaatatgaaataaggaaaaaaatgtttttatttgtatgaattaaaagatccatgttgaacatttgcaaatatttattaataaacagatgtggtgataaacccaaaacaaatgacaggtccttattttccactaaacacagacacatgaaatgaaagtttagctagcccactatttgttgtaaattgaaaacgaagtgtgataaaataaatatgtagaaatcata

SEQ ID NO: 153794 - DNA, 1155 bp, Homo sapiens
  Payload ID: 10240
  Gene Symbol: MTTP
  Gene Name: microsomal triglyceride transfer protein
  Uniprot ID: P55157
  ENST ID: ENST00000422897
  CDS Start-End: 87-542
actccctcactggctgccattgaaagagtccacttctcagtgactcctagctgggcactggatgcagttgaggattgctggtcaatatgattcttcttgctgtgctttttctctgcttcatttcctcatattcagcttctgttaaaggtcacacaactggtctctcattaaataatgaccggctgtacaagctcacgtactccactgaagttcttcttgatcggggcaaaggaaaactgcaagacagcgtgggctaccgcatttcctccaacgtggatgtggccttactatggaggaatcctgatggtgatgatgaccagttgatccaaataacgatgaaggatgtaaatgttgaaaatgtgaatcagcagagaggagagaagagcatcttcaaaggaaaaagcccatctaaaataatgggaaaggaaaacttggaagctctgcaaagacctacgctccttcatctaatccatggaaaggtaaaggggcgtttagattccacaactttttctccaacttcatatttttcttcccttcagtagatattattttgaggtaatcacattgtaactacttttatggtaaatggaatttcttcaagaactaaagaacagaggttgtaaattaaatgtttccaaactgaatcaatgccctgagttcccttacatttactagccaatttgtttcctatttttctggaaatctttatagtggaatgaagtatttatttattgatgaaaggcattattaaaaggtaaatttctcatcaaattataagggattacaaacgtaatgtaacaaagcaagtcatcaaagcatgattggatgaattcaggaaaggagacaaattatgagactgaaatgatccaactgagattagtaatattgatttgttatgagattatcgatatctggctaaagtacaaggttaaagattttaaaagggtatgacaagtctaaagtagagtttttttaaagcctttagaaattattttaaaactatgacatggaaaagccttttatatattaaaataatgattgaacactttataatatatatttgaaaatctgttttaaaaattctatgtgtgcattacttatggcttgattctagtcaattgaaatggtctaaataaatttggaattgagaaacaa

SEQ ID NO: 153795 - DNA, 551 bp, Homo sapiens
  Payload ID: 10240
  Gene Symbol: MTTP
  Gene Name: microsomal triglyceride transfer protein
  ENST ID: ENST00000511610
  CDS Start-End: 14-232
tttcgaacccgcaatggaagaaaggggaggggtttatgcggggcggggtctggagttagtgttttgggagtgggaggtagttacagtgatgtctgttttttcccgttcaagaattaagtgtgtacctgcagacgtgtattcattcatatattcttgcaggcccagtataatcacaaggattcataaaacggaagagggagacagaagagatggtcagagtgatatgaagtaaaaaggattcagcttactcttgctggatttgtaaatgcaggaagggaccacgagtcaaggaatgcaggtagcttctagaagctagaaaaggttctgaagagggtcactccctcactggctgccattgaaagagtccacttctcagtgactcctagctgggcactggatgcagttgaggattgctggtcaatatgattcttcttgctgtgctttttctctgcttcatttcctcatattcagcttctgttaaaggtcacacaactggtctctcattaaataatgaccggctgtacaagctcacgtactccactgaagttctt

SEQ ID NO: 153796 - DNA, 555 bp, Homo sapiens
  Payload ID: 10240
  Gene Symbol: MTTP
  Gene Name: microsomal triglyceride transfer protein
  ENST ID: ENST00000504724
  CDS Start-End: 14-184
tttcgaacccgcaatggaagaaaggggaggggtttatgcggggcggggtctggagttagtgttttgggagtgggaggtagttacagtgatgtctgttttttcccgttcaagaattaagtgtgtacctgcagacgtgtattcattcatatattcttgtgagtattggatgaaggaattaagatagtcccactgttaaaaatgcaaaacaacgaagaaaggctcctaatttttctgtgttgaaaatgagagaaaaacatctcttgcctatattatttttaatttatacagaaaattaccatatcacatgattttacataactcaagtggaaaattaaattcaaaaagcaggcccagtataatcacaaggattcataaaacggaagagggagacagaagagatggtcagagtgatatgaagtaaaaaggattcagcttactcttgctggatttgtaaatgcaggaagggaccacgagtcaaggaatgcaggtagcttctagaagctagaaaaggttctgaagagggtcactccctcactggctgccattgaaagagtc

SEQ ID NO: 153797 - DNA, 554 bp, Homo sapiens
  Payload ID: 10240
  Gene Symbol: MTTP
  Gene Name: microsomal triglyceride transfer protein
  ENST ID: ENST00000505094
  CDS Start-End: 14-166
tttcgaacccgcaatggaagaaaggggaggggtttatgcggggcggggtctggagttagtgttttgggagtgggaggtagttacagtgatgtctgttttttcccgttcaagaattaagtgtgtacctgcagacgtgtattcattcatatattcttgcccagtataatcacaaggattcataaaacggaagagggagacagaagagatggtcagagtgatatgaagtaaaaaggattcagcttactcttgctggatttgtaaatgcaggaagggaccacgagtcaaggaatgcaggtagcttctagaagctagaaaaggtcacacaactggtctctcattaaataatgaccggctgtacaagctcacgtactccactgaagttcttcttgatcggggcaaaggaaaactgcaagacagcgtgggctaccgcatttcctccaacgtggatgtggccttactatggaggaatcctgatggtgatgatgaccagttgatccaaataacgatgaaggatgtaaatgttgaaaatgtgaatcagcagagaggagagaaga

SEQ ID NO: 153798 - DNA, 564 bp, Homo sapiens
  Payload ID: 10240
  Gene Symbol: MTTP
  Gene Name: microsomal triglyceride transfer protein
  ENST ID: ENST00000513404
  CDS Start-End: 81-209
agcaagagcgccgcaggaaaccacttccacaccactgctcccctctcccccggaagcccttgttgctagtagggggctgcatggcacgcgcccctttgcgtccagagaataccatagtgcgggggagcgccaaccagtgccaggacacttaccgagctgaagagttgacaggttctgaagagggtcactccctcactggctgccattgaaagagtccacttctcagtgactcctagctgggcactggatgcagttgaggattgctggtcaatatgattcttcttgctgtgctttttctctgcttcatttcctcatattcagcttctgttaaaggtcacacaactggtctctcattaaataatgaccggctgtacaagctcacgtactccactgaagttcttcttgatcggggcaaaggaaaactgcaagacagcgtgggctaccgcatttcctccaacgtggatgtggccttactatggaggaatcctgatggtgatgatgaccagttgatccaaataacgatgaaggatgtaaatgttgaaaatgtgaatcagcagagaggag

SEQ ID NO: 153799 - DNA, 608 bp, Homo sapiens
  Payload ID: 10240
  Gene Symbol: MTTP
  Gene Name: microsomal triglyceride transfer protein
  ENST ID: ENST00000515141
  CDS Start-End: 16-195
catttcgaacccgcaatggaagaaaggggaggggtttatgcggggcggggtctggagttagtgttttgggagtgggaggtagttacagtgatgtctgttttttcccgttcaagaattaagtgtgtacctgcagacgtgtattcattcatatattcttgttctgaagagggtcactccctcactggctgccattgaaagagtccacttctcagtgactcctagctgggcactggatgcagttgaggattgctggtcaatatgattcttcttgctgtgctttttctctgcttcatttcctcatattcagcttctgttaaaggtcacacaactggtctctcattaaataatgaccggctgtacaagctcacgtactccactgaagttcttcttgatcggggcaaaggaaaactgcaagacagcgtgggctaccgcatttcctccaacgtggatgtggccttactatggaggaatcctgatggtgatgatgaccagttgatccaaataacgatgaaggatgtaaatgttgaaaatgtgaatcagcagagaggagagaagagcatcttcaaaggaaaaagcccatctaaaataatgggaaaggaaaacttgga

SEQ ID NO: 153800 - DNA, 537 bp, Homo sapiens
  Payload ID: 10240
  Gene Symbol: MTTP
  Gene Name: microsomal triglyceride transfer protein
  ENST ID: ENST00000505142
  CDS Start-End: 17-184
gctagtagggggctgcatggcacgcgcccctttgcgtccagagaataccatagtgcgggggagcgccaaccagtgccaggacacttaccgagctgaagagttgacaggcaggcccagtataatcacaaggattcataaaacggaagagggagacagaagagatggtcagagtgatatgaagtaaaaaggattcagcttactcttgctggatttgtaaatgcaggaagggaccacgagtcaaggaatgcaggtagcttctagaagctagaaaaggttctgaagagggtcactccctcactggctgccattgaaagagtccacttctcagtgactcctagctgggcactggatgcagttgaggattgctggtcaatatgattcttcttgctgtgctttttctctgcttcatttcctcatattcagcttctgttaaaggtcacacaactggtctctcattaaataatgaccggctgtacaagctcacgtactccactgaagttcttcttgatcggggcaaaggaaaactgcaagacagcg

SEQ ID NO: 153801 - DNA, 549 bp, Homo sapiens
  Payload ID: 10240
  Gene Symbol: MTTP
  Gene Name: microsomal triglyceride transfer protein
  ENST ID: ENST00000506883
  CDS Start-End: 14-549
agtagggggctgcatggcacgcgcccctttgcgtccagagaataccatagtgcgggggagcgccaaccagtgccaggacacttaccgagctgaagagttgacaggtcacacaactggtctctcattaaataatgaccggctgtacaagctcacgtactccactgaagttcttcttgatcggggcaaaggaaaactgcaagacagcgtgggctaccgcatttcctccaacgtggatgtggccttactatggaggaatcctgatggtgatgatgaccagttgatccaaataacgatgaaggatgtaaatgttgaaaatgtgaatcagcagagaggagagaagagcatcttcaaaggaaaaagcccatctaaaataatgggaaaggaaaacttggaagctctgcaaagacctacgctccttcatctaatccatggaaaggtcaaagagttctactcatatcaaaatgaggcagtggccatagaaaatatcaagagaggtctggctagcctatttcagacacagttaagctctggaaccaccaatgaggtaga

SEQ ID NO: 153802 - DNA, 3154 bp, Homo sapiens
  Payload ID: 10240
  Gene Symbol: MTTP
  Gene Name: microsomal triglyceride transfer protein
  ENST ID: ENST00000511045
  CDS Start-End: 14-2779
tttcgaacccgcaatggaagaaaggggaggggtttatgcggggcggggtctggagttagtgttttgggagtgggaggtagttacagtgatgtctgttttttcccgttcaagaattaagtgtgtacctgcagacgtgtattcattcatatattcttgtcacacaactggtctctcattaaataatgaccggctgtacaagctcacgtactccactgaagttcttcttgatcggggcaaaggaaaactgcaagacagcgtgggctaccgcatttcctccaacgtggatgtggccttactatggaggaatcctgatggtgatgatgaccagttgatccaaataacgatgaaggatgtaaatgttgaaaatgtgaatcagcagagaggagagaagagcatcttcaaaggaaaaagcccatctaaaataatgggaaaggaaaacttggaagctctgcaaagacctacgctccttcatctaatccatggaaaggtcaaagagttctactcatatcaaaatgaggcagtggccatagaaaatatcaagagaggtctggctagcctatttcagacacagttaagctctggaaccaccaatgaggtagatatctctggaaattgtaaagtgacctaccaggctcatcaagacaaagtgatcaaaattaaggccttggattcatgcaaaatagcgaggtctggatttacgaccccaaatcaggtcttgggtgtcagttcaaaagctacatctgtcaccacctataagatagaagacagctttgttatagctgtgcttgctgaagaaacacacaattttggactgaatttcctacaaaccattaaggggaaaatagtatcgaagcagaaattagagctgaagacaaccgaagcaggcccaagattgatgtctggaaagcaggctgcagccataatcaaagcagttgattcaaagtacacggccattcccattgtggggcaggtcttccagagccactgtaaaggatgtccttctctctcggagctctggcggtccaccaggaaatacctgcagcctgacaacctttccaaggctgaggctgtcagaaacttcctggccttcattcagcacctcaggactgcgaagaaagaagagatccttcaaatactaaagatggaaaataaggaagtattacctcagctggtggatgctgtcacctctgctcagacctcagactcattagaagccattttggactttttggatttcaaaagtgacagcagcattatcctccaggagaggtttctctatgcctgtggatttgcttctcatcccaatgaagaactcctgagagccctcattagtaagttcaaaggttctattggtagcagtgacatcagagaaactgttatgatcatcactgggacacttgtcagaaagttgtgtcagaatgaaggctgcaaactcaaagcagtagtggaagctaagaagttaatcctgggaggacttgaaaaagcagagaaaaaagaggacaccaggatgtatctgctggctttgaagaatgccctgcttccagaaggcatcccaagtcttctgaagtatgcagaagcaggagaagggcccatcagccacctggctaccactgctctccagagatatgatctccctttcataactgatgaggtgaagaagaccttaaacagaatataccaccaaaaccgtaaagttcatgaaaagactgtgcgcactgctgcagctgctatcattttaaataacaatccatcctacatggacgtcaagaacatcctgctgtctattggggagcttccccaagaaatgaataaatacatgctcgccattgttcaagacatcctacgttttgaaatgcctgcaagcaaaattgtccgtcgagttctgaaggaaatggtcgctcacaattatgaccgtttctccaggagtggatcttcttctgcctacactggctacatagaacgtagtccccgttcggcatctacttacagcctagacattctctactcgggttctggcattctaaggagaagtaacctgaacatctttcagtacattgggaaggctggtcttcacggtagccaggtggttattgaagcccaaggactggaagccttaatcgcagccacccctgacgagggggaggagaaccttgactcctatgctggtatgtcagccatcctctttgatgttcagctcagacctgtcacctttttcaacggatacagtgatttgatgtccaaaatgctgtcagcatctggcgaccctatcagtgtggtgaaaggacttattctgctaatagatcattctcaggaacttcagttacaatctggactaaaagccaatatagaggtccagggtggtctagctattgatatttcaggtgcaatggagtttagcttgtggtatcgtgagtctaaaacccgagtgaaaaatagggtgactgtggtaataaccactgacatcacagtggactcctcttttgtgaaagctggcctggaaaccagtacagaaacagaagcaggcttggagtttatctccacagtgcagttttctcagtacccattcttagtttgcatgcagatggacaaggatgaagctccattcaggcaatttgagaaaaagtacgaaaggctgtccacaggcagaggttatgtctctcagaaaagaaaagaaagcgtattagcaggatgtgaattcccgctccatcaagagaactcagagatgtgcaaagtggtgtttgcccctcagccggatagtacttccagcggatggttttgaaactgacctgtgatattttacttgaatttgtctccccgaaagggacacaatgtggcatgactaagtacttgctctctgagagcacagcgtttacatatttacctgtatttaagatttttgtaaaaagctacaaaaaactgcagtttgatcaaatttgggtatatgcagtatgctacccacagcgtcattttgaatcatcatgtgacgctttcaacaacgttcttagtttacttatacctctctcaaatctcatttggtacagtcagaatagttattctctaagaggaaactagtgtttgttaaaaacaaaaataaaaacaaaaccacacaaggagaacccaattttgtttcaacaatttttgatcaatgtatatg

SEQ ID NO: 153803 - DNA, 3855 bp, Homo sapiens
  Payload ID: 10240
  Gene Symbol: MTTP
  Gene Name: microsomal triglyceride transfer protein
  ENST ID: ENST00000619629
  CDS Start-End: 25-1575
tgcagttgaggattgctggtcaatatgattcttcttgctgtgctttttctctgcttcatttcctcatattcagcttctgttaaaggtcacacaactggtctctcattaaataatgaccggctgtacaagctcacgtactccactgaagttcttcttgatcggggcaaaggaaaactgcaagacagcgtgggctaccgcatttcctccaacgtggatgtggccttactatggaggaatcctgatggtgatgatgaccagttgatccaaataacgatgaaggatgtaaatgttgaaaatgtgaatcagcagagaggagagaagagcatcttcaaaggaaaaagcccatctaaaataatgggaaaggaaaacttggaagctctgcaaagacctacgctccttcatctaatccatggaaaggtcaaagagttctactcatatcaaaatgaggcagtggccatagaaaatatcaagagaggtctggctagcctatttcagacacagttaagctctggaaccaccaatgaggtagatatctctggaaattgtaaagtgacctaccaggctcatcaagacaaagtgatcaaaattaaggccttggattcatgcaaaatagcgaggtctggatttacgaccccaaatcaggtcttgggtgtcagttcaaaagctacatctgtcaccacctataagatagaagacagctttgttatagctgtgcttgctgaagaaacacacaattttggactgaatttcctacaaaccattaaggggaaaatagtatcgaagcagaaattagagctgaagacaaccgaagcaggcccaagattgatgtctggaaagcaggctgcagccataatcaaagcagttgattcaaagtacacggccattcccattgtggggcaggtcttccagagccactgtaaaggatgtccttctctctcggagctctggcggtccaccaggaaatacctgcagcctgacaacctttccaaggctgaggctgtcagaaacttcctggccttcattcagcacctcaggactgcgaagaaagaagagatccttcaaatactaaagatggaaaataaggaagtattacctcagctggtggatgctgtcacctctgctcagacctcagactcattagaagccattttggactttttggatttcaaaagtgacagcagcattatcctccaggagaggtttctctatgcctgtggatttgcttctcatcccaatgaagaactcctgagagccctcattagtaagttcaaaggttctattggtagcagtgacatcagagaaactgttatgatcatcactgggacacttgtcagaaagttgtgtcagaatgaaggctgcaaactcaaagcagtagtggaagctaagaagttaatcctgggaggacttgaaaaagcagagaaaaaagaggacaccaggatgtatctgctggctttgaagaatgccctgcttccagaaggcatcccaagtcttctgaagtatgcagaagcaggagaagggcccatcagccacctggctaccactgctctccagagatatgatctctttcataactgatgaggtgaagaagaccttaaacagaatataccaccaaaaccgtaaagttcatgaaaagactgtgcgcactgctgcagctgctatcattttaaataacaatccatcctacatggacgtcaagaacatcctgctgtctattggggagcttccccaagaaatgaataaatacatgctcgccattgttcaagacatcctacgttttgaaatgcctgcaagcaaaattgtccgtcgagttctgaaggaaatggtcgctcacaattatgaccgtttctccaggagtggatcttcttctgcctacactggctacatagaacgtagtccccgttcggcatctacttacagcctagacattctctactcgggttctggcattctaaggagaagtaacctgaacatctttcagtacattgggaaggctggtcttcacggtagccaggtggttattgaagcccaaggactggaagccttaatcgcagccacccctgacgagggggaggagaaccttgactcctatgctggtatgtcagccatcctctttgatgttcagctcagacctgtcacctttttcaacggatacagtgatttgatgtccaaaatgctgtcagcatctggcgaccctatcagtgtggtgaaaggacttattctgctaatagatcattctcaggaacttcagttacaatctggactaaaagccaatatagaggtccagggtggtctagctattgatatttcaggtgcaatggagtttagcttgtggtatcgtgagtctaaaacccgagtgaaaaatagggtgactgtggtaataaccactgacatcacagtggactcctcttttgtgaaagctggcctggaaaccagtacagaaacagaagcaggcttggagtttatctccacagtgcagttttctcagtacccattcttagtttgcatgcagatggacaaggatgaagctccattcaggcaatttgagaaaaagtacgaaaggctgtccacaggcagaggttatgtctctcagaaaagaaaagaaagcgtattagcaggatgtgaattcccgctccatcaagagaactcagagatgtgcaaagtggtgtttgcccctcagccggatagtacttccagcggatggttttgaaactgacctgtgatattttacttgaatttgtctccccgaaagggacacaatgtggcatgactaagtacttgctctctgagagcacagcgtttacatatttacctgtatttaagatttttgtaaaaagctacaaaaaactgcagtttgatcaaatttgggtatatgcagtatgctacccacagcgtcattttgaatcatcatgtgacgctttcaacaacgttcttagtttacttatacctctctcaaatctcatttggtacagtcagaatagttattctctaagaggaaactagtgtttgttaaaaacaaaaataaaaacaaaaccacacaaggagaacccaattttgtttcaacaatttttgatcaatgtatatgaagctcttgataggacttccttaagcatgacgggaaaaccaaacacgttccctaatcaggaaaaaaaaaaaaaaaaaaagtaagacacaaacaaaccattttttttctctttttttggagttgggggcccagggagaagggacaagacttttaaaagacttgttagccaacttcaagaattaatatttatgtctctgttattgttagttttaagccttaaggtagaaggcacatagaaataacatctcatctttctgctgaccattttagtgaggttgttccaaagacattcaggtctctacctccagccctgcaaaaatattggacctagcacagaggaatcaggaaaattaatttcagaaactccatttgatttttcttttgctgtgtctttttgagactgtaatatggtacactgtcctctaagggacatcctcattttatctcacctttttgggggtgagagctctagttcatttaactgtactctgcacaatagctaggatgactaagagaacattgcttcaagaaactggtggatttggatttccaaaatatgaaataaggaaaaaaatgtttttatttgtatgaattaaaagatccatgttgaacatttgcaaatatttattaataaacagatgtggtgataaacccaaaacaaatgacaggtccttattttccactaaacacagacacatgaaatgaaagtttagctagcccactatttgttgtaaattgaaaacgaagtgtgataaaataaatatgtagaaatc

SEQ ID NO: 153804 - DNA, 1928 bp, Homo sapiens
  Payload ID: 10241
  Gene Symbol: MCRS1
  Gene Name: microspherule protein 1
  Uniprot ID: Q96EZ8
  ENST ID: ENST00000343810
  CDS Start-End: 217-1605
cctggttcgttaaccggaagtagacgtacctcacggaagccggctttggccctgcggctgctaccgtcgccgcggagaaattgttggatctggcagtctaggaatgaatctcctctcagcctttaagctcacctggtcagaatccttggatgagcctgtgggaccgttcctcctagcccggtggtttggaaccagtggctttgggactgtaagaggatggacaaagattctcaggggctgctagattcatccctgatggcatcaggcactgccagccgctcagaggatgaggagtcactggcagggcagaagcgagcctcctcccaggccttgggcaccatccctaaacggagaagctcctccaggttcatcaagaggaagaagttcgatgatgagctggtggagagcagcctggcaaaatcttctacccgggcaaagggggccagtggggtggaaccagggcgctgttcggggagtgaaccctcctccagtgagaagaagaaggtatccaaagcccccagcactcctgtgccacccagcccagccccagcccctggactcaccaagcgtgtgaagaagagtaaacagccacttcaggtgaccaaggatctgggccgctggaagcctgcagatgacctcctgctcataaatgctgtgttgcagaccaacgacctgacctccgtccacctgggcgtgaaattcagctgccgcttcacccttcgggaggtccaggagcgttggtacgccctgctctacgatcctgtcatctccaagttggcctgtcaggccatgaggcagctgcacccagaggctattgcagccatccagagcaaggccctgtttagcaaggctgaggagcagctgctgagcaaagtgggatcgaccagccagcccaccttggagaccttccaggacctgctgcacagacaccctgatgccttctacctggcccgtaccgcgaaggccctgcaggcccactggcagctcatgaagcagtattacctgctggaggaccagacagtgcagccgctgcccaaaggggaccaagtgctgaacttctctgatgcagaggacctgattgatgacagtaagctcaaggacatgcgagatgaggtcctggaacatgagctgatggtggctgaccggcgccagaagcgagagattcggcagctggaacaggaactgcataagtggcaggtgctagtggacagcatcacaggcatgagctctccggacttcgacaaccagacactggcagtgctgcggggccgcatggtgcggtacctgatgcgctcgcgtgagatcaccctgggcagagcaaccaaggataaccagattgatgtggacctgtctctggagggtccggcctggaagatatcccggaaacaaggtgtcatcaagctgaagaacaacggtgatttcttcattgccaatgagggtcgacggcccatctacatcgatggacggccggtgctctgtggctccaaatggcgcctcagcaacaactctgtggtggagatcgccagcctgcgattcgtcttccttatcaaccaggacctcattgccctcatcagggctgaggctgccaagatcacaccacagtgaggagtggtggcaggactcgtgggccctctccggcctgtttcccctgccactccagcccccttgagctgggaactcaggctcctggaaaaacctgggcagtgggaggctcagctgcgggccattgatttgagcctttgagggaggatagggctggcctttgtgaagccagcagaggctgagaacctcaggcttccctagatccagagcccctccccatcttcctctctctaaaaacaaccctaccccccattgccaccttcactcctgtgtctccagctgattagcctcagactcttcttttattgtttttcttttgtaaataa

SEQ ID NO: 153805 - DNA, 1428 bp, Homo sapiens
  Payload ID: 10241
  Gene Symbol: MCRS1
  Gene Name: microspherule protein 1
  Uniprot ID: Q96EZ8
  ENST ID: ENST00000357123
  CDS Start-End: 1-1428
atgacacgtggcaccgggggaactgcccagcgtggaaggtctgggccagattctcaggggctgctagattcatccctgatggcatcaggcactgccagccgctcagaggatgaggagtcactggcagggcagaagcgagcctcctcccaggccttgggcaccatccctaaacggagaagctcctccaggttcatcaagaggaagaagttcgatgatgagctggtggagagcagcctggcaaaatcttctacccgggcaaagggggccagtggggtggaaccagggcgctgttcggggagtgaaccctcctccagtgagaagaagaaggtatccaaagcccccagcactcctgtgccacccagcccagccccagcccctggactcaccaagcgtgtgaagaagagtaaacagccacttcaggtgaccaaggatctgggccgctggaagcctgcagatgacctcctgctcataaatgctgtgttgcagaccaacgacctgacctccgtccacctgggcgtgaaattcagctgccgcttcacccttcgggaggtccaggagcgttggtacgccctgctctacgatcctgtcatctccaagttggcctgtcaggccatgaggcagctgcacccagaggctattgcagccatccagagcaaggccctgtttagcaaggctgaggagcagctgctgagcaaagtgggatcgaccagccagcccaccttggagaccttccaggacctgctgcacagacaccctgatgccttctacctggcccgtaccgcgaaggccctgcaggcccactggcagctcatgaagcagtattacctgctggaggaccagacagtgcagccgctgcccaaaggggaccaagtgctgaacttctctgatgcagaggacctgattgatgacagtaagctcaaggacatgcgagatgaggtcctggaacatgagctgatggtggctgaccggcgccagaagcgagagattcggcagctggaacaggaactgcataagtggcaggtgctagtggacagcatcacaggcatgagctctccggacttcgacaaccagacactggcagtgctgcggggccgcatggtgcggtacctgatgcgctcgcgtgagatcaccctgggcagagcaaccaaggataaccagattgatgtggacctgtctctggagggtccggcctggaagatatcccggaaacaaggtgtcatcaagctgaagaacaacggtgatttcttcattgccaatgagggtcgacggcccatctacatcgatggacggccggtgctctgtggctccaaatggcgcctcagcaacaactctgtggtggagatcgccagcctgcgattcgtcttccttatcaaccaggacctcattgccctcatcagggctgaggctgccaagatcacaccacagtga

SEQ ID NO: 153806 - DNA, 1686 bp, Homo sapiens
  Payload ID: 10241
  Gene Symbol: MCRS1
  Gene Name: microspherule protein 1
  Uniprot ID: Q96EZ8
  ENST ID: ENST00000546244
  CDS Start-End: 523-1338
gttaaccggaagtagacgtacctcacggaagccggctttggccctgcggctgctaccgtcgccgcggagaaattgttggatctggcagtctaggaatggttcatcaagaggaagaagttcgatgatgagctggtggagagcagcctggcaaaatcttctacccgggcaaagggggccagtggggtggaaccagggcgctgttcggggagtgaaccctcctccagtgagaagaagaaggtatccaaagcccccagcactcctgtgccacccagcccagccccagcccctggactcaccaagcgtgtgaagaagagtaaacagccacttcaggtgaccaaggatctgggccgctggaagcctgcagatgacctcctgctcataaatgctgtgttgcagaccaacgacctgacctccgtccacctgggcgtgaaattcagctgccgcttcacccttcgggaggtccaggagcgttggtacgccctgctctacgatcctgtcatctccaagttggcctgtcaggccatgaggcagctgcacccagaggctattgcagccatccagagcaaggccctgtttagcaaggctgaggagcagctgctgagcaaagtgggatcgaccagccagcccaccttggagaccttccaggacctgctgcacagacaccctgatgccttctacctggcccgtaccgcgaaggccctgcaggcccactggcagctcatgaagcagtattacctgctggaggaccagacagtgcagccgctgcccaaaggggaccaagtgctgaacttctctgatgcagaggacctgattgatgacagtaagctcaaggacatgcgagatgaggtcctggaacatgagctgatggtggctgaccggcgccagaagcgagagattcggcagctggaacaggaactgcataagtggcaggtgctagtggacagcatcacaggcatgagctctccggacttcgacaaccagacactggcagtgctgcggggccgcatggtgcggtacctgatgcgctcgcgtgagatcaccctgggcagagcaaccaaggataaccagattgatgtggacctgtctctggagggtccggcctggaagatatcccggaaacaaggtgtcatcaagctgaagaacaacggtgatttcttcattgccaatgagggtcgacggcccatctacatcgatggacggccggtgctctgtggctccaaatggcgcctcagcaacaactctgtggtggagatcgccagcctgcgattcgtcttccttatcaaccaggacctcattgccctcatcagggctgaggctgccaagatcacaccacagtgaggagtggtggcaggactcgtgggccctctccggcctgtttcccctgccactccagcccccttgagctgggaactcaggctcctggaaaaacctgggcagtgggaggctcagctgcgggccattgatttgagcctttgagggaggatagggctggcctttgtgaagccagcagaggctgagaacctcaggcttccctagatccagagcccctccccatcttcctctctctaaaaacaaccctaccccccattgccaccttcactcctgtgtctccagctgattagcctcagactcttcttttattgtttttcttttgtaaataaaaagcaccaggttccaaagtagttt

SEQ ID NO: 153807 - DNA, 1037 bp, Homo sapiens
  Payload ID: 10241
  Gene Symbol: MCRS1
  Gene Name: microspherule protein 1
  ENST ID: ENST00000553173
  CDS Start-End: 83-1037
gcggctgctaccgtcgccgcggagaaattgttggatctggcagtctaggaatgattctcaggggctgctagattcatccctgatggcatcaggcactgccagccgctcagaggatgaggagtcactggcagggcagaagcgagcctcctcccaggccttgggcaccatccctaaacggagaagctcctccaggttcatcaagaggaagaagttcgatgatgagctggtggagagcagcctggcaaaatcttctacccgggcaaagggggccagtggggtggaaccagggcgctgttcggggagtgaaccctcctccagtgagaagaagaaggtatccaaagcccccagcactcctgtgccacccagcccagccccagcccctggactcaccaagcgtgtgaagaagagtaaacagccacttcaggtgaccaaggatctgggccgctggaagcctgcagatgacctcctgctcataaatgctgtgttgcagaccaacgacctgacctccgtccacctgggcgtgaaattcagctgccgcttcacccttcgggaggtccaggagcgttggtacgccctgctctacgatcctgtcatctccaagttggcctgtcaggccatgaggcagctgcacccagaggctattgcagccatccagagcaaggccctgtttagcaaggctgaggagcagctgctgagcaaagtgggatcgaccagccagcccaccttggagaccttccaggacctgctgcacagacaccctgatgccttctacctggcccgtaccgcgaaggccctgcaggcccactggcagctcatgaagcagtattacctgctggaggaccagacagtgcagccgctgcccaaaggggaccaagtgctgaacttctctgatgcagaggacctgattgatgacagtaagctcaaggacatgcgagatgaggtcctggaacatgagctgatggtggctgaccggcgccagaagcgagagattcggcagctggaacaggaactgcataagtggcaggtgctagtggaca

SEQ ID NO: 153808 - DNA, 646 bp, Homo sapiens
  Payload ID: 10241
  Gene Symbol: MCRS1
  Gene Name: microspherule protein 1
  ENST ID: ENST00000549528
  CDS Start-End: 214-646
ccgtggggtgagaatgggcttgcgagtttacccccacctccccagccaccagcctgtgggtctcaaaccaaggctacttggtgctctgctttgagttgcagagaatctcctctcagcctttaagctcacctggtcagaatccttggatgagcctgtgggaccgttcctcctagcccggtggtttggaaccagtggctttgggactgtaagaggatggacaaagattctcaggggctgctagattcatccctgatggcatcaggcactgccagccgctcagaggatgaggagtcactggcagggcagaagcgagcctcctcccaggccttgggcaccatccctaaacggagaagctcctccaggaccctttacaggttcatcaagaggaagaagttcgatgatgagctggtggagagcagcctggcaaaatcttctacccgggcaaagggggccagtggggtggaaccagggcgctgttcggggagtgaaccctcctccagtgagaagaagaaggtatccaaagcccccagcactcctgtgccacccagcccagccccagcccctggactcaccaagcgtgtgaagaagagtaaacagccacttcaggtgaccaaggatctgggccgctggaagcctgcagatgacc

SEQ ID NO: 153809 - DNA, 1666 bp, Homo sapiens
  Payload ID: 10241
  Gene Symbol: MCRS1
  Gene Name: microspherule protein 1
  ENST ID: ENST00000548602
  CDS Start-End: 108-293
gacgtacctcacggaagccggctttggccctgcggctgctaccgtcgccgcggagaaattgttggatctggcagtctaggaatggttcatcaagaggaagaagttcgatgatgagctggtggagagcagcctggcaaaatcttctacccgggcaaagggggccagtggggtggaaccagggcgctgttcggggagtgaaccctcctccagtgagaagaagaaggtatccaaagcccccagcactcctgtgccacccagcccagccccagcccctggactcaccaagcgtgtgaagaagagtaaacagccacttcaggtgaccaaggatctgggccgctggaagcctgcagatgacctcctgctcataaatgctgtgttgcagaccaacgacctgacctccgtccacctgggcgtgaaattcagctgccgcttcacccttcgggaggtccaggagcgttggtacgccctgctctacgatcctgtcatctccaagttggcctgtcaggccatgaggcagctgcacccagaggctattgcagccatccagagcaaggccctgtttagcaaggctgaggagcagctgctgagcaaagtgggatcgaccagccagcccaccttggagaccttccaggacctgctgcacagacaccctgatgccttctacctggcccgtaccgcgaaggccctgcaggcccactggcagctcatgaagcagtattacctgctggaggaccagacagtgcagccgctgcccaaaggggaccaagtgctgaacttctctgatgcagaggacctgattgatgacagtaagctcaaggacatgcgagatgaggtcctggaacatgagctgatggtggctgaccggcgccagaagcgagagattcggcagctggaacaggaactgcataagtggcaggtgctagtggacagcatcacaggcatgagctctccggacttcgacaaccagacactggcagtgctgcggggccgcatggtgcggtacctgatgcgctcgcgtgagatcaccctgggcagagcaaccaaggataaccagattgatgtggacctgtctctggagggtccggcctggaagatatcccggaaacaaggtgtcatcaagctgaagaacaacggtgatttcttcattgccaatgagggtcgacggcccatctacatcgatggacggccggtgctctgtggctccaaatggcgcctcagcaacaactctgtggtggagatcgccagcctgcgattcgtcttccttatcaaccaggacctcattgccctcatcagggctgaggctgccaagatcacaccacagtgaggagtggtggcaggactcgtgggccctctccggcctgtttcccctgccactccagcccccttgagctgggaactcaggctcctggaaaaacctgggcagtgggaggctcagctgcgggccattgatttgagcctttgagggaggatagggctggcctttgtgaagccagcagaggctgagaacctcaggcttccctagatccagagcccctccccatcttcctctctctaaaaacaaccctaccccccattgccaccttcactcctgtgtctccagctgattagcctcagactcttcttttattgtttttcttttgtaaataaaaagcaccaggttccaaag

SEQ ID NO: 153810 - DNA, 1936 bp, Homo sapiens
  Payload ID: 10241
  Gene Symbol: MCRS1
  Gene Name: microspherule protein 1
  Uniprot ID: Q96EZ8
  ENST ID: ENST00000550165
  CDS Start-End: 268-1656
tgcggctgctaccgtcgccgcggagaaattgttggatctggcagtctaggaatgaggtgacttcatcaatgctcctaccccgagttcttgagacagacctggaccgatcccctaccttgggtgtgcactcttgggagaacgaggggcggagggtccgaatctcctctcagcctttaagctcacctggtcagaatccttggatgagcctgtgggaccgttcctcctagcccggtggtttggaaccagtggctttgggactgtaagaggatggacaaagattctcaggggctgctagattcatccctgatggcatcaggcactgccagccgctcagaggatgaggagtcactggcagggcagaagcgagcctcctcccaggccttgggcaccatccctaaacggagaagctcctccaggttcatcaagaggaagaagttcgatgatgagctggtggagagcagcctggcaaaatcttctacccgggcaaagggggccagtggggtggaaccagggcgctgttcggggagtgaaccctcctccagtgagaagaagaaggtatccaaagcccccagcactcctgtgccacccagcccagccccagcccctggactcaccaagcgtgtgaagaagagtaaacagccacttcaggtgaccaaggatctgggccgctggaagcctgcagatgacctcctgctcataaatgctgtgttgcagaccaacgacctgacctccgtccacctgggcgtgaaattcagctgccgcttcacccttcgggaggtccaggagcgttggtacgccctgctctacgatcctgtcatctccaagttggcctgtcaggccatgaggcagctgcacccagaggctattgcagccatccagagcaaggccctgtttagcaaggctgaggagcagctgctgagcaaagtgggatcgaccagccagcccaccttggagaccttccaggacctgctgcacagacaccctgatgccttctacctggcccgtaccgcgaaggccctgcaggcccactggcagctcatgaagcagtattacctgctggaggaccagacagtgcagccgctgcccaaaggggaccaagtgctgaacttctctgatgcagaggacctgattgatgacagtaagctcaaggacatgcgagatgaggtcctggaacatgagctgatggtggctgaccggcgccagaagcgagagattcggcagctggaacaggaactgcataagtggcaggtgctagtggacagcatcacaggcatgagctctccggacttcgacaaccagacactggcagtgctgcggggccgcatggtgcggtacctgatgcgctcgcgtgagatcaccctgggcagagcaaccaaggataaccagattgatgtggacctgtctctggagggtccggcctggaagatatcccggaaacaaggtgtcatcaagctgaagaacaacggtgatttcttcattgccaatgagggtcgacggcccatctacatcgatggacggccggtgctctgtggctccaaatggcgcctcagcaacaactctgtggtggagatcgccagcctgcgattcgtcttccttatcaaccaggacctcattgccctcatcagggctgaggctgccaagatcacaccacagtgaggagtggtggcaggactcgtgggccctctccggcctgtttcccctgccactccagcccccttgagctgggaactcaggctcctggaaaaacctgggcagtgggaggctcagctgcgggccattgatttgagcctttgagggaggatagggctggcctttgtgaagccagcagaggctgagaacctcaggcttccctagatccagagcccctccccatcttcctctctctaaaaacaaccctaccccccattgccaccttcactcctgtgtctccagctga

SEQ ID NO: 153811 - DNA, 608 bp, Homo sapiens
  Payload ID: 10241
  Gene Symbol: MCRS1
  Gene Name: microspherule protein 1
  ENST ID: ENST00000548646
  CDS Start-End: 1-195
cagctggaacaggaactgcataagtggcaggtgctagtggacagcatcacaggcatgagctctccggacttcgacaaccagacactggcagtgctgcggggccgcatggtgcggtacctgatgcgctcgcgtgaggtcccagccctcacctgccccatttccccagatcaccctgggcagagcaaccaaggataaccagattgatgtggacctgtctctggagggtccggcctggaagatatcccggaaacaaggtgtcatcaagctgaagaacaacggtgatttcttcattgccaatgagggtcgacggcccatctacatcgatggacggccggtgctctgtggctccaaatggcgcctcagcaacaactctgtggtggagatcgccagcctgcgattcgtcttccttatcaaccaggacctcattgccctcatcagggctgaggctgccaagatcacaccacagtgaggagtggtggcaggactcgtgggccctctccggcctgtttcccctgccactccagcccccttgagctgggaactcaggctcctggaaaaacctgggcagtgggaggctcagctgcgggccattgatttgagcctttgag

SEQ ID NO: 153812 - DNA, 636 bp, Homo sapiens
  Payload ID: 10241
  Gene Symbol: MCRS1
  Gene Name: microspherule protein 1
  ENST ID: ENST00000551598
  CDS Start-End: 1-522
aagctcaaggacatgcgagatgaggtcctggaacatgagctgatggtggctgaccggcgccagaagcgagagattcggcagctggaacaggaactgcataagtggcaggtgctagtggacagcatcacaggcatgagctctccggacttcgacaaccagacactggcagtgctgcggggccgcatggtgcggtacctgatgcgctcgcgtgagatcaccctgggcagagcaaccaaggataaccagattgatgtggacctgtctctggagggtccggcctggaagatatcccggaaacaaggtgtcatcaagctgaagaacaacggtgatttcttcattgccaatgagggtcgacggcccatctacatcgatggacggccggtgctctgtggctccaaatggcgcctcagcaacaactctgtggtggagacaggaagctggggccagagaagccaaattcacactgctagaaagctgacagagcaaggatataaacccagttcctggctgcgtcgaaattaaagtgctggtcttcaccaccaaactcccctgcccgcacgacaccaaggggtagtggggtgagacggcctccaggcagtctgccagtttctctaacattgaaggctcagaggtcaa

SEQ ID NO: 153813 - DNA, 894 bp, Homo sapiens
  Payload ID: 10241
  Gene Symbol: MCRS1
  Gene Name: microspherule protein 1
  ENST ID: ENST00000548596
  CDS Start-End: 338-894
acgcatgcgcaaaggcatggagaccgtggggtgagaatgggcttgcgagtttacccccacctccccagccaccagcctgtgggtctcaaaccaaggctacttggtgctctgctttgagttgcagaggtgacttcatcaatgctcctaccccgagttcttgagacagacctggaccgatcccctaccttgggtgtgcactcttgggagaacgaggggcggagggtccgaatctcctctcagcctttaagctcacctggtcagaatccttggatgagcctgtgggaccgttcctcctagcccggtggtttggaaccagtggctttgggactgtaagaggatggacaaagattctcaggggctgctagattcatccctgatggcatcaggcactgccagccgctcagaggatgaggagtcactggcagggcagaagcgagcctcctcccaggccttgggcaccatccctaaacggagaagctcctccaggttcatcaagaggaagaagttcgatgatgagctggtggagagcagcctggcaaaatcttctacccgggcaaagggggccagtggggtggaaccagggcgctgttcggggagtgaaccctcctccagtgagaagaagaaggtatccaaagcccccagcactcctgtgccacccagcccagccccagcccctggactcaccaagcgtgtgaagaagagtaaacagccacttcaggtgaccaaggatctgggccgctggaagcctgcagatgacctcctgctcataaatgctgtgttgcagaccaacgacctgacctccgtccacctgggcgtgaaattcagctgccgcttcacccttcgggaggtccaggagcgttggtacgccctgctctacgatcctgtcatctccaa

SEQ ID NO: 153814 - DNA, 876 bp, Homo sapiens
  Payload ID: 10241
  Gene Symbol: MCRS1
  Gene Name: microspherule protein 1
  ENST ID: ENST00000548334
  CDS Start-End: 260-876
cttgcgagtttacccccacctccccagccaccagcctgtgggtctcaaaccaaggctacttggtgctctgctttgagttgcagaggtgacttcatcaatgctcctaccccgagttcttgagacagacctggaccgatcccctaccttggaatctcctctcagcctttaagctcacctggtcagaatccttggatgagcctgtgggaccgttcctcctagcccggtggtttggaaccagtggctttgggactgtaagaggatggacaaagattctcaggggctgctagattcatccctgatggcatcaggcactgccagccgctcagaggatgaggagtcactggcagggcagaagcgagcctcctcccaggccttgggcaccatccctaaacggagaagctcctccaggttcatcaagaggaagaagttcgatgatgagctggtggagagcagcctggcaaaatcttctacccgggcaaagggggccagtggggtggaaccagggcgctgttcggggagtgaaccctcctccagtgagaagaagaaggtatccaaagcccccagcactcctgtgccacccagcccagccccagcccctggactcaccaagcgtgtgaagaagagtaaacagccacttcaggtgaccaaggatctgggccgctggaagcctgcagatgacctcctgctcataaatgctgtgttgcagaccaacgacctgacctccgtccacctgggcgtgaaattcagctgccgcttcacccttcgggaggtccaggagcgttggtacgccctgctctacgatcctgtcatctccaagttggcctgtcaggccatgaggcagctgcacccagaggctattgcagccatccagagcaa

SEQ ID NO: 153815 - DNA, 3142 bp, Homo sapiens
  Payload ID: 10242
  Gene Symbol: MICAL1
  Gene Name: microtubule associated monooxygenase, calponin and LIM domain containing 1
  Uniprot ID: Q8TDZ2
  ENST ID: ENST00000358577
  CDS Start-End: 68-3013
cccctcccggcttcggagccgccgccactcatctctgcccagctgctgccctccccaggaggcctccatggcttcacctacctccaccaacccagcgcatgcccactttgagagcttcctgcaggcccagctgtgccaggacgtgctgagcagcttccaggagctgtgtggggccctggggctggaacccggtggggggctgccccagtaccacaagatcaaggaccagctcaactactggagcgccaagtcactgtggaccaagctggacaagcgagcaggccagcctgtctaccagcagggccgggcctgcaccagcaccaagtgcctggtggtgggtgctggaccttgcgggctgcgggtcgctgtggagctggcgctgctgggggcccgagtggtgctggtggaaaagcgcaccaagttctctcgccacaacgtgctccacctctggcccttcaccatccacgacctgcgggcactcggtgctaagaagttctacgggcgcttctgcaccggcaccctggaccacatcagcatcaggcagctccagctgcttctgctgaaggtagcattgctgctgggggtggaaattcactggggtgtcactttcactggcctccagccccctcctaggaaggggagtggctggcgtgcccagctccaacccaacccccctgcccagctggccaactatgaatttgacgtccttatctcggctgcaggaggtaaattcgtccctgaaggcttcaaagttcgagaaatgcgaggcaaactggccattggcatcacagccaactttgtgaatggacgcaccgtggaggagacacaggtgccggagatcagtggtgtagccaggatctacaaccagagcttcttccagagccttctcaaagccacaggcattgatctggagaacattgtgtactacaaggacgacacccactactttgtgatgacagccaagaagcagtgcctgctgcggctgggggtgctgcgccagcccttctggcccctgggcactggagtggcacggggcttcctggcagcctttgatgcagcctggatggtgaagcggtgggcagagggcgctgagtccctagaggtgttggctgagcgtgagagcctgtaccagcttctgtcacagacatccccagaaaacatgcatcgcaatgtggcccagtatgggctggacccagccacccgctaccccaacctgaacctccgggcagtgacccccaatcaggtacgagacctgtatgatgtgctagccaaggagcctgtgcagaggaacaacgacaagacagatacagggatgccagccaccgggtcggcaggcacccaggaggagctgctacgctggtgccaggagcagacagctgggtacccgggagtccacgtctccgatttgtcttcctcctgggctgatgggctagctctgtgtgccctggtgtaccggctgcagcctggcctgctggaaccctcagagctgcaggggctgggagctctggaagcaactgcttgggcactaaaggtggcagagaatgagctgggcatcacaccggtggtgtctgcacaggccgtggtagcagggagtgacccactgggcctcattgcctacctcagccacttccacagtgccttcaagagcatggcccacagcccaggccctgtcagccaggcctccccagggacctccagtgctgtattattccttagtaaacttcagaggaccctgcagcgatcccgggccaaggaaaatgcagaggatgctggtggcaagaagctgcgcttggagatggaggccgagaccccaagtactgaggtgccacctgacccagagcctggtgtacccctgacacccccatcccaacaccaggaggccggtgctggggacctgtgtgcactttgtggggaacacctctatgtcctggaacgcctctgtgtcaacggccatttcttccaccggagctgcttccgctgccatacctgtgaggccacactgtggccaggtggctacgagcagcacccaggagatggacatttctactgcctccagcacctgccccagacagaccacaaagcggaaggcagcgatagaggccctgagagtccggagctccccacaccaagtgagaatagcatgccaccaggcctctcaactcccacagcctcgcaggagggggccggtcctgttccagatcccagccagcccacccgtcggcagatccgcctctccagcccggagcgccagcggttgtcctcccttaaccttacccctgacccggaaatggagcctccacccaagcctccccgcagctgctccgccttggcccgccacgccctggagagcagctttgtgggctggggcctgccagtccagagccctcaagctcttgtggccatggagaaggaggaaaaagagagtcccttctccagtgaagaggaagaagaagatgtgcctttggactcagatgtggaacaggccctgcagacctttgccaagacctcaggcaccatgaataactacccaacatggcgtcggactctgctgcgccgtgcgaaggaggaggagatgaagaggttctgcaaggcccagaccatccaacggcgactaaatgagattgaggctgccttgagggagctagaggccgagggcgtgaagctggagctggccttgaggcgccagagcagttccccagaacagcaaaagaaactatgggtaggacagctgctacagctcgttgacaagaaaaacagcctggtggctgaggaggccgagctcatgatcacggtgcaggaattgaatctggaggagaaacagtggcagctggaccaggagctacgaggctacatgaaccgggaagaaaacctaaagacagctgctgatcggcaggctgaggaccaggtcctgaggaagctggtggatttggtcaaccagagagatgccctcatccgcttccaggaggagcgcaggctcagcgagctggccttggggacaggggcccagggctagacgagggtgggccgtctgctttcgttcccacaaagaaagcacctcaccccagcacagtgccacccctgttcatctgggctgcctggcagagagccttgctgtttacaattaaaatgtttctgccacaaa

SEQ ID NO: 153816 - DNA, 3645 bp, Homo sapiens
  Payload ID: 10242
  Gene Symbol: MICAL1
  Gene Name: microtubule associated monooxygenase, calponin and LIM domain containing 1
  Uniprot ID: Q8TDZ2
  ENST ID: ENST00000358807
  CDS Start-End: 313-3516
cccaagactgtccccgctggaggcggtagagggatccagaagtaatgagatgctaatgagtcgcgaataaagcccgggcggcgccccgcgcccctcgcggaagcccacactccgcgcgactccaggcgcacgccccgggccgccccgcatcccagcatccccgcccgatctcggcgtttccgcccccgcccccgcccccgccctcccacccgctcagacctggttgccagcccaacaggaagcggcccctcccggcttcggagccgccgccactcatctctgcccagctgctgccctccccaggaggcctccatggcttcacctacctccaccaacccagcgcatgcccactttgagagcttcctgcaggcccagctgtgccaggacgtgctgagcagcttccaggagctgtgtggggccctggggctggaacccggtggggggctgccccagtaccacaagatcaaggaccagctcaactactggagcgccaagtcactgtggaccaagctggacaagcgagcaggccagcctgtctaccagcagggccgggcctgcaccagcaccaagtgcctggtggtgggtgctggaccttgcgggctgcgggtcgctgtggagctggcgctgctgggggcccgagtggtgctggtggaaaagcgcaccaagttctctcgccacaacgtgctccacctctggcccttcaccatccacgacctgcgggcactcggtgctaagaagttctacgggcgcttctgcaccggcaccctggaccacatcagcatcaggcagctccagctgcttctgctgaaggtagcattgctgctgggggtggaaattcactggggtgtcactttcactggcctccagccccctcctaggaaggggagtggctggcgtgcccagctccaacccaacccccctgcccagctggccaactatgaatttgacgtccttatctcggctgcaggaggtaaattcgtccctgaaggcttcaaagttcgagaaatgcgaggcaaactggccattggcatcacagccaactttgtgaatggacgcaccgtggaggagacacaggtgccggagatcagtggtgtagccaggatctacaaccagagcttcttccagagccttctcaaagccacaggcattgatctggagaacattgtgtactacaaggacgacacccactactttgtgatgacagccaagaagcagtgcctgctgcggctgggggtgctgcgccaggactggccagacaccaatcggctgctgggcagtgccaatgtggtgcccgaggctctgcagcgctttacccgggcagctgctgactttgccacccatggcaagctcgggaaactagagtttgcccaggatgcccatgggcagcctgatgtctctgcctttgacttcacgagcatgatgcgggcagagagttctgctcgtgtgcaagagaagcatggcgcccgcctgctgctgggactggtgggggactgcctggtggagcccttctggcccctgggcactggagtggcacggggcttcctggcagcctttgatgcagcctggatggtgaagcggtgggcagagggcgctgagtccctagaggtgttggctgagcgtgagagcctgtaccagcttctgtcacagacatccccagaaaacatgcatcgcaatgtggcccagtatgggctggacccagccacccgctaccccaacctgaacctccgggcagtgacccccaatcaggtacgagacctgtatgatgtgctagccaaggagcctgtgcagaggaacaacgacaagacagatacagggatgccagccaccgggtcggcaggcacccaggaggagctgctacgctggtgccaggagcagacagctgggtacccgggagtccacgtctccgatttgtcttcctcctgggctgatgggctagctctgtgtgccctggtgtaccggctgcagcctggcctgctggaaccctcagagctgcaggggctgggagctctggaagcaactgcttgggcactaaaggtggcagagaatgagctgggcatcacaccggtggtgtctgcacaggccgtggtagcagggagtgacccactgggcctcattgcctacctcagccacttccacagtgccttcaagagcatggcccacagcccaggccctgtcagccaggcctccccagggacctccagtgctgtattattccttagtaaacttcagaggaccctgcagcgatcccgggccaaggaaaatgcagaggatgctggtggcaagaagctgcgcttggagatggaggccgagaccccaagtactgaggtgccacctgacccagagcctggtgtacccctgacacccccatcccaacaccaggaggccggtgctggggacctgtgtgcactttgtggggaacacctctatgtcctggaacgcctctgtgtcaacggccatttcttccaccggagctgcttccgctgccatacctgtgaggccacactgtggccaggtggctacgagcagcacccaggagatggacatttctactgcctccagcacctgccccagacagaccacaaagcggaaggcagcgatagaggccctgagagtccggagctccccacaccaagtgagaatagcatgccaccaggcctctcaactcccacagcctcgcaggagggggccggtcctgttccagatcccagccagcccacccgtcggcagatccgcctctccagcccggagcgccagcggttgtcctcccttaaccttacccctgacccggaaatggagcctccacccaagcctccccgcagctgctccgccttggcccgccacgccctggagagcagctttgtgggctggggcctgccagtccagagccctcaagctcttgtggccatggagaaggaggaaaaagagagtcccttctccagtgaagaggaagaagaagatgtgcctttggactcagatgtggaacaggccctgcagacctttgccaagacctcaggcaccatgaataactacccaacatggcgtcggactctgctgcgccgtgcgaaggaggaggagatgaagaggttctgcaaggcccagaccatccaacggcgactaaatgagattgaggctgccttgagggagctagaggccgagggcgtgaagctggagctggccttgaggcgccagagcagttccccagaacagcaaaagaaactatgggtaggacagctgctacagctcgttgacaagaaaaacagcctggtggctgaggaggccgagctcatgatcacggtgcaggaattgaatctggaggagaaacagtggcagctggaccaggagctacgaggctacatgaaccgggaagaaaacctaaagacagctgctgatcggcaggctgaggaccaggtcctgaggaagctggtggatttggtcaaccagagagatgccctcatccgcttccaggaggagcgcaggctcagcgagctggccttggggacaggggcccagggctagacgagggtgggccgtctgctttcgttcccacaaagaaagcacctcaccccagcacagtgccacccctgttcatctgggctgcctggcagagagccttgctgtttacaattaaaatgtttctgccacaaa

SEQ ID NO: 153817 - DNA, 887 bp, Homo sapiens
  Payload ID: 10242
  Gene Symbol: MICAL1
  Gene Name: microtubule associated monooxygenase, calponin and LIM domain containing 1
  ENST ID: ENST00000431946
  CDS Start-End: 156-887
gccggtaagtcgtccagcggagccggctgcgagccccgcggccgggtggggtgaggtggggtgcgcttccggggaaacgcagctgcggtcgctcgggaaccacgcctggcagccactcatctctgcccagctgctgccctccccaggaggcctccatggcttcacctacctccaccaacccagcgcatgcccactttgagagcttcctgcaggcccagctgtgccaggacgtgctgagcagcttccaggagctgtgtggggccctggggctggaacccggtggggggctgccccagtaccacaagatcaaggaccagctcaactactggagcgccaagtcactgtggaccaagctggacaagcgagcaggccagcctgtctaccagcagggccgggcctgcaccagcaccaagtgcctggtggtgggtgctggaccttgcgggctgcgggtcgctgtggagctggcgctgctgggggcccgagtggtgctggtggaaaagcgcaccaagttctctcgccacaacgtgctccacctctggcccttcaccatccacgacctgcgggcactcggtgctaagaagttctacgggcgcttctgcaccggcaccctggaccacatcagcatcaggcagctccagctgcttctgctgaaggtagcattgctgctgggggtggaaattcactggggtgtcactttcactggcctccagccccctcctaggaaggggagtggctggcgtgcccagctccaacccaacccccctgcccagctggccaactatgaatttgacgtccttatctcggctgcaggaggtaaattcgtccctgaaggcttcaaagttcgagaaatgcgaggcaaactggccattggcatcacagccaacttt

SEQ ID NO: 153818 - DNA, 754 bp, Homo sapiens
  Payload ID: 10242
  Gene Symbol: MICAL1
  Gene Name: microtubule associated monooxygenase, calponin and LIM domain containing 1
  ENST ID: ENST00000433205
  CDS Start-End: 1-754
tgagagcctgtaccagcttctgtcacagacatccccagaaaacatgcatcgcaatgtggcccagtatgggctggacccagccacccgctaccccaacctgaacctccgggcagtgacccccaatcaggtacgagacctgtatgatgtgctagccaaggagcctgtgcagaggaacaacgacaagacagatacagggatgccagccaccggcacccaggaggagctgctacgctggtgccaggagcagacagctgggtacccgggagtccacgtctccgatttgtcttcctcctgggctgatgggctagctctgtgtgccctggtgtaccggctgcagcctggcctgctggaaccctcagagctgcaggggctgggagctctggaagcaactgcttgggcactaaaggtggcagagaatgagctgggcatcacaccggtggtgtctgcacaggccgtggtagcagggagtgacccactgggcctcattgcctacctcagccacttccacagtgccttcaagagcatggcccacagcccaggccctgtcagccaggcctccccagggacctccagtgctgtattattccttagtaaacttcagaggaccctgcagcgatcccgggccaaggaaaatgcagaggatgctggtggcaagaagctgcgcttggagatggaggccgagaccccaagtactgaggtgccacctgacccagagcctggtgtacccctgacacccccatcccaacaccaggag

SEQ ID NO: 153819 - DNA, 3678 bp, Homo sapiens
  Payload ID: 10242
  Gene Symbol: MICAL1
  Gene Name: microtubule associated monooxygenase, calponin and LIM domain containing 1
  Uniprot ID: Q8TDZ2
  ENST ID: ENST00000630715
  CDS Start-End: 292-3552
tttagctacaagtacttcagatccagctcagcacctgcagctgacacaggagcctggtccgccaccacccactcaccacgtgccccagccaacgccacttggccaggagcagagctgacctgtaaacacgtttgactgcttgattgggctcttcttataagccagctctgactggattttgaacgcttgaaatcaggctctccacaccattgacttgcagatgcttctgtgagagctgtgatggctaactgatgtttataatgccctccatccaggtagcaagatgtgtgtatgtcttgtctaagccactcatctctgcccagctgctgccctccccaggaggcctccatggcttcacctacctccaccaacccagcgcatgcccactttgagagcttcctgcaggcccagctgtgccaggacgtgctgagcagcttccaggagctgtgtggggccctggggctggaacccggtggggggctgccccagtaccacaagatcaaggaccagctcaactactggagcgccaagtcactgtggaccaagctggacaagcgagcaggccagcctgtctaccagcagggccgggcctgcaccagcaccaagtgcctggtggtgggtgctggaccttgcgggctgcgggtcgctgtggagctggcgctgctgggggcccgagtggtgctggtggaaaagcgcaccaagttctctcgccacaacgtgctccacctctggcccttcaccatccacgacctgcgggcactcggtgctaagaagttctacgggcgcttctgcaccggcaccctggaccacatcagcatcaggcagctccagctgcttctgctgaaggtagcattgctgctgggggtggaaattcactggggtgtcactttcactggcctccagccccctcctaggaaggggagtggctggcgtgcccagctccaacccaacccccctgcccagctggccaactatgaatttgacgtccttatctcggctgcaggaggtaaattcgtccctgaaggcttcaaagttcgagaaatgcgaggcaaactggccattggcatcacagccaactttgtgaatggacgcaccgtggaggagacacaggtgccggagatcagtggtgtagccaggatctacaaccagagcttcttccagagccttctcaaagccacaggcattgatctggagaacattgtgtactacaaggacgacacccactactttgtgatgacagccaagaagcagtgcctgctgcggctgggggtgctgcgccaggactggccagacaccaatcggctgctgggcagtgccaatgtggtgcccgaggctctgcagcgctttacccgggcagctgctgactttgccacccatggcaagctcgggaaactagagtttgcccaggatgcccatgggcagcctgatgtctctgcctttgacttcacgagcatgatgcgggcagagagttctgctcgtgtgcaagagaagcatggcgcccgcctgctgctgggactggtgggggactgcctggtggagcccttctggcccctgggcactggagtggcacggggcttcctggcagcctttgatgcagcctggatggtgaagcggtgggcagagggcgctgagtccctagaggtgttggctgagcgtgagagcctgtaccagcttctgtcacagacatccccagaaaacatgcatcgcaatgtggcccagtatgggctggacccagccacccgctaccccaacctgaacctccgggcagtgacccccaatcaggtacgagacctgtatgatgtgctagccaaggagcctgtgcagaggaacaacgacaagacagatacagggatgccagccaccgggtcggcaggcacccaggaggagctgctacgctggtgccaggagcagacagctgggtacccgggagtccacgtctccgatttgtcttcctcctgggctgatgggctagctctgtgtgccctggtgtaccggctgcagcctggcctgctggaaccctcagagctgcaggggctgggagctctggaagcaactgcttgggcactaaaggtggcagagaatgagctgggcatcacaccggtggtgtctgcacaggccgtggtagcagggagtgacccactgggcctcattgcctacctcagccacttccacagtgccttcaagagcatggcccacagcccaggccctgtcagccaggcctccccagggacctccagtgctgtattattccttagtaaacttcagaggaccctgcagcgatcccgggccaaggaaaatgcagaggatgctggtggcaagaagctgcgcttggagatggaggccgagaccccaagtactgaggtgccacctgacccagagcctggtgtacccctgacacccccatcccaacaccaggaggccggtgctggggacctgtgtgcactttgtggggaacacctctatgtcctggaacgcctctgtgtcaacggccatttcttccaccggagctgcttccgctgccatacctgtgaggccacactgtggccaggtggctacgagcagcacccaggagatggacatttctactgcctccagcacctgccccagacagaccacaaagcggaaggcagcgatagaggccctgagagtccggagctccccacaccaagtgagaatagcatgccaccaggcctctcaactcccacagcctcgcaggagggggccggtcctgttccagatcccagccagcccacccgtcggcagatccgcctctccagcccggagcgccagcggttgtcctcccttaaccttacccctgacccggaaatggagcctccacccaagcctccccgcagctgctccgccttggcccgccacgccctggagagcagctttgtgggctggggcctgccagtccagagccctcaagctcttgtggccatggagaaggaggaaaaagagagtcccttctccagtgaagaggaagaagaagatgtgcctttggactcagatgtggaacaggccctgcagacctttgccaagacctcaggcaccatgaataactacccaacatggcgtcggactctgctgcgccgtgcgaaggaggaggagatgaagaggttctgcaaggcccagaccatccaacggcgactaaatgagattgaggctgccttgagggagctagaggccgagggcgtgaagctggagctggccttgaggcgccagagcagttccccagaacagcaaaagaaactatgggtaggacagctgctacagctcgttgacaagaaaaacagcctggtggctgaggaggccgagctcatgatcacggtgcaggaattgaatctggaggagaaacagtggcagctggaccaggagctacgaggctacatgaaccgggaagaaaacctaaagacagctgctgatcggcaggctgaggaccaggtcctgaggaagctggtggatttggtcaaccagagagatgccctcatccgcttccaggaggagcgcaggctcagcgagctggccttggggacaggggcccagggctagacgagggtgggccgtctgctttcgttcccacaaagaaagcacctcaccccagcacagtgccacccctgttcatctgggctgcctggcagagagccttgctgtttacaattaaaatgtttctgccac

SEQ ID NO: 153820 - DNA, 3906 bp, Homo sapiens
  Payload ID: 10243
  Gene Symbol: MICAL2
  Gene Name: microtubule associated monooxygenase, calponin and LIM domain containing 2
  Uniprot ID: O94851
  ENST ID: ENST00000256194
  CDS Start-End: 289-3663
ctcggctggctaagcctgcgccgggccgcctcgctcgctcccagctctgtcagtggcccgcggggcccgatcgctgcgcccgcggccagggccgaggcaggcctgacccggggccgggcagcccgcgcgactttcggaacatggcaacccgtgtgtgtctcatcccagaaagagaagactttaaccactgtgatgcctgagaatccagtgagtgtgacgtttctccagatacttcatgctgttcacctgtgtcctcgccgcaccactgccgcacacgactcctgaaccatgggggaaaacgaggatgagaagcaggcccaggcggggcaggtttttgagaactttgtccaggcatccacgtgcaaaggtaccctccaggccttcaacattctcacacgacacctggacctagaccctctggaccacagaaacttttattccaagctcaagtccaaggtgaccacctggaaagccaaagccctgtggtacaaattggataagcgtggttcccacaaagagtataagcgagggaagtcgtgcacgaacaccaagtgtctcatagttgggggaggaccctgtggcttgcgcactgccattgaacttgcctacctgggagccaaagtggtcgtggtggagaagagggactccttctcccggaacaacgtgctacacctctggcctttcaccatccatgaccttcgtggcctgggagccaagaagttctatgggaagttctgtgctggctccatcgaccatatcagtattcgccaactacagctcatcctattcaaggtggccctgatgctgggagttgaaatccatgtgaatgtggagttcgtgaaggttctagagcctcctgaagatcaagaaaatcaaaaaattggctggcgggcagaatttctccctacagaccattctctgtcggagtttgagtttgacgtcatcattggtgccgatggccgcaggaacaccctggaagggttcagaagaaaagaattccgtgggaagctggcgattgccatcaccgccaacttcataaacagaaacagcacagcggaagccaaggtggaagagattagtggtgtggctttcatcttcaatcagaaattttttcaggaccttaaagaagaaacaggcatagatcttgagaacattgtttactacaaggactgcacccactattttgtaatgacagccaagaagcagagcctgctcgacaaaggtgtcatcattaacgactacatcgacacagagatgctgctgtgtgcggagaacgtgaaccaagacaacctgctatcctatgcccgggaagctgcagactttgccaccaactaccagctgccatccttagactttgccatgaaccactatgggcagcctgatgtggccatgtttgactttacctgcatgtatgcctcagagaacgcggccctggtgcgggagcggcaggcgcaccagctgctcgtggcccttgtgggtgacagcttgcttgagccattttggcccatgggtacaggctgtgcccgtggcttcctggcagcctttgacacggcatggatggtgaagagctggaaccagggcacccctcccctggagctgctggctgaaagggaaagtctctaccggctgttacctcagacaaccccggagaacatcaacaagaactttgagcagtacacgttggacccagggacacggtacccaaacctcaactcacactgtgtcaggccccatcaggtgaagcatttgtatatcactaaggagctggagcactaccctctcgagagactgggctcggtgaggagatctgtcaacctctccaggaaggagtcagatatccggcccagcaagctcctgacctggtgccagcagcagacagagggctaccagcatgtcaacgtcaccgacctgaccacatcctggcgcagtgggttggccctgtgtgccatcatccaccgcttccggcctgagctcatcaactttgactctttgaatgaagatgatgctgtggagaacaaccagctcgcatttgatgtggccgagcgagagtttgggatccctccagtgaccacgggcaaagagatggcatctgcccaggagcctgacaagctcagcatggtcatgtacctctccaagttctacgagctcttccggggcaccccactgaggcccgtggattcttggcgcaaaaactatggagaaaatgctgacctcagcttggccaaatcatccatttctaataactatctcaacctcacatttccaaggaagaggactccacgggtggatggtcaaaccggagagaatgacatgaacaaacggagacggaagggcttcaccaacctggacgagccttcaaacttttccagccgtagcttgggctccaatcaagagtgtgggagcagtaaggaaggtggaaatcagaacaaagtcaagtccatggcgaatcagctgctggccaagtttgaggagagcactcggaacccctcactcatgaagcaggaacgccgtgtctcagggataggtaagccggtcctgtgctcttcctccggccctcctgttcactcttgctgccccaagccggaggaggccacacccagcccatcacctcctctgaaaaggcagttcccctctgtggtcgtgacggggcacgtgctcagagagctcaagcaagtgtctgctggcagtgagtgcctgagcagaccttggagagccagagccaagtctgacctacagctgggtgggacagaaaatttcgctaccctgccttctacccgcccgagggcgcaggctctttccggggtgctgtggcggctgcagcaagtggaggaaaagattctccagaagagggctcagaacttggccaacagggaatttcacacaaagaacattaaggagaaggcggctcaccttgcctccatgtttggacacggggatttcccgcagaataaactactctctaaaggcctgtctcatactcatcctccatctcctccctctcgccttccgtctcctgatccagctgcttcttcctctccatcaactgttgactctgcttctcctgccagaaaggaaaagaagtcaccttcagggttccattttcatcccagccatttgagaacagtgcatcctcagctgacggtagggaaagtgtccagcggaataggggctgcagctgaagtcctggtcaatctgtacatgaatgatcacagacctaaggcccaggccacctctccagacctggaatctatgcgaaagtcatttccccttaacctgggaggcagcgacacgtgttacttctgtaagaaacgtgtgtacgtgatggaacggctgagcgccgagggccacttcttccaccgggagtgtttccgctgcagcatctgtgccaccaccttgcgcctggccgcctacacctttgactgcgatgaaggcaaattttactgcaagcctcacttcattcactgtaaaaccaatagcaaacaacggaagagacgggcagagttgaagcaacaaagagaggaggaggcaacatggcaagagcaggaagcccctcggagagacactcccaccgaaagttcttgcgcagtggccgccattggcaccctggaaggcagccccccagttcatttcagccttccagtgctacacccacttcttggctgacacacttctgctctaagagtctccctccctttatagaatgtcaaccaaagagtgccctcctcccctctcagcctcctctttagctagcctccccatctcatcacaacgcatgtctgtgacctttggtaatcatttacagtgccacacggaaccctgtattttgcacacagcaaaacaaacaatgtttagctttatttatggtatttgatgctgtaaatggaaataaatattgttctttataaa

SEQ ID NO: 153821 - DNA, 3711 bp, Homo sapiens
  Payload ID: 10243
  Gene Symbol: MICAL2
  Gene Name: microtubule associated monooxygenase, calponin and LIM domain containing 2
  Uniprot ID: O94851
  ENST ID: ENST00000342902
  CDS Start-End: 153-3464
gaacatggcaacccgtgtgtgtctcatcccagaaagagaagactttaaccactgtgatgcctgagaatccagtgagtgtgacgtttctccagatacttcatgctgttcacctgtgtcctcgccgcaccactgccgcacacgactcctgaaccatgggggaaaacgaggatgagaagcaggcccaggcggggcaggtttttgagaactttgtccaggcatccacgtgcaaaggtaccctccaggccttcaacattctcacacgacacctggacctagaccctctggaccacagaaacttttattccaagctcaagtccaaggtgaccacctggaaagccaaagccctgtggtacaaattggataagcgtggttcccacaaagagtataagcgagggaagtcgtgcacgaacaccaagtgtctcatagttgggggaggaccctgtggcttgcgcactgccattgaacttgcctacctgggagccaaagtggtcgtggtggagaagagggactccttctcccggaacaacgtgctacacctctggcctttcaccatccatgaccttcgtggcctgggagccaagaagttctatgggaagttctgtgctggctccatcgaccatatcagtattcgccaactacagctcatcctattcaaggtggccctgatgctgggagttgaaatccatgtgaatgtggagttcgtgaaggttctagagcctcctgaagatcaagaaaatcaaaaaattggctggcgggcagaatttctccctacagaccattctctgtcggagtttgagtttgacgtcatcattggtgccgatggccgcaggaacaccctggaagggttcagaagaaaagaattccgtgggaagctggcgattgccatcaccgccaacttcataaacagaaacagcacagcggaagccaaggtggaagagattagtggtgtggctttcatcttcaatcagaaattttttcaggaccttaaagaagaaacaggcatagatcttgagaacattgtttactacaaggactgcacccactattttgtaatgacagccaagaagcagagcctgctcgacaaaggtgtcatcattaacgactacatcgacacagagatgctgctgtgtgcggagaacgtgaaccaagacaacctgctatcctatgcccgggaagctgcagactttgccaccaactaccagctgccatccttagactttgccatgaaccactatgggcagcctgatgtggccatgtttgactttacctgcatgtatgcctcagagaacgcggccctggtgcgggagcggcaggcgcaccagctgctcgtggcccttgtgggtgacagcttgcttgagccattttggcccatgggtacaggctgtgcccgtggcttcctggcagcctttgacacggcatggatggtgaagagctggaaccagggcacccctcccctggagctgctggctgaaagggaaagtctctaccggctgttacctcagacaaccccggagaacatcaacaagaactttgagcagtacacgttggacccagggacacggtacccaaacctcaactcacactgtgtcaggccccatcaggtgaagcatttgtatatcactaaggagctggagcactaccctctcgagagactgggctcggtgaggagatctgtcaacctctccaggaaggagtcagatatccggcccagcaagctcctgacctggtgccagcagcagacagagggctaccagcatgtcaacgtcaccgacctgaccacatcctggcgcagtgggttggccctgtgtgccatcatccaccgcttccggcctgagctcatcaactttgactctttgaatgaagatgatgctgtggagaacaaccagctcgcatttgatgtggccgagcgagagtttgggatccctccagtgaccacgggcaaagagatggcatctgcccaggagcctgacaagctcagcatggtcatgtacctctccaagttctacgagctcttccggggcaccccactgaggcccgtggattcttggcgcaaaaactatggagaaaatgctgacctcagcttggccaaatcatccatttctaataactatctcaacctcacatttccaaggaagaggactccacgggtggatggtcaaaccggagagaatgacatgaacaaacggagacggaagggcttcaccaacctggacgagccttcaaacttttccagccgtagcttgggctccaatcaagagtgtgggagcagtaaggaaggtggaaatcagaacaaagtcaagtccatggcgaatcagctgctggccaagtttgaggagagcactcggaacccctcactcatgaagcaggaacgccgtgtctcagggataggtaagccggtcctgtgctcttcctccggccctcctgttcactcttgctgccccaagccggaggaggccacacccagcccatcacctcctctgaaaaggcagttcccctctgtggtcgtgacggggcacgtgctcagagagctcaagcaagtgtctgctggcagtgagtgcctgagcagaccttggagagccagagccaagtctgacctacagctgggtgggacagaaaatttcgctaccctgccttctacccgcccgagggcgcaggctctttccggggtgctgtggcggctgcagcaagtggaggaaaagattctccagaagagggctcagaacttggccaacagggaatttcacacaaagaacattaaggagaaggcggctcaccttgcctccatgtttggacacggggatttcccgcagaataaactactctctaaaggcctgtctcatactcatcctccatctcctccctctcgccttccgtctcctgatccagctgcttcttcctctccatcaactgttgactctgcttctcctgccagaaagctgacggtagggaaagtgtccagcggaataggggctgcagctgaagtcctggtcaatctgtacatgaatgatcacagacctaaggcccaggccacctctccagacctggaatctatgcgaaagtcatttccccttaacctgggaggcagcgacacgtgttacttctgtaagaaacgtgtgtacgtgatggaacggctgagcgccgagggccacttcttccaccgggagtgtttccgctgcagcatctgtgccaccaccttgcgcctggccgcctacacctttgactgcgatgaaggcaaattttactgcaagcctcacttcattcactgtaaaaccaatagcaaacaacggaagagacgggcagagttgaagcaacaaagagaggaggaggcaacatggcaagagcaggaagcccctcggagagacactcccaccgaaagttcttgcgcagtggccgccattggcaccctggaaggcagccccccagttcatttcagccttccagtgctacacccacttcttggctgacacacttctgctctaagagtctccctccctttatagaatgtcaaccaaagagtgccctcctcccctctcagcctcctctttagctagcctccccatctcatcacaacgcatgtctgtgacctttggtaatcatttacagtgccacacggaaccctgtattttgcacacagcaaaacaaacaatgtttagctttatttatggtatttgatgctgtaaatggaaataaatattgttctttataaagctc

SEQ ID NO: 153822 - DNA, 6625 bp, Homo sapiens
  Payload ID: 10243
  Gene Symbol: MICAL2
  Gene Name: microtubule associated monooxygenase, calponin and LIM domain containing 2
  Uniprot ID: O94851
  ENST ID: ENST00000379612
  CDS Start-End: 78-3008
gtgtgacgtttctccagatacttcatgctgttcacctgtgtcctcgccgcaccactgccgcacacgactcctgaaccatgggggaaaacgaggatgagaagcaggcccaggcggggcaggtttttgagaactttgtccaggcatccacgtgcaaaggtaccctccaggccttcaacattctcacacgacacctggacctagaccctctggaccacagaaacttttattccaagctcaagtccaaggtgaccacctggaaagccaaagccctgtggtacaaattggataagcgtggttcccacaaagagtataagcgagggaagtcgtgcacgaacaccaagtgtctcatagttgggggaggaccctgtggcttgcgcactgccattgaacttgcctacctgggagccaaagtggtcgtggtggagaagagggactccttctcccggaacaacgtgctacacctctggcctttcaccatccatgaccttcgtggcctgggagccaagaagttctatgggaagttctgtgctggctccatcgaccatatcagtattcgccaactacagctcatcctattcaaggtggccctgatgctgggagttgaaatccatgtgaatgtggagttcgtgaaggttctagagcctcctgaagatcaagaaaatcaaaaaattggctggcgggcagaatttctccctacagaccattctctgtcggagtttgagtttgacgtcatcattggtgccgatggccgcaggaacaccctggaagggttcagaagaaaagaattccgtgggaagctggcgattgccatcaccgccaacttcataaacagaaacagcacagcggaagccaaggtggaagagattagtggtgtggctttcatcttcaatcagaaattttttcaggaccttaaagaagaaacaggcatagatcttgagaacattgtttactacaaggactgcacccactattttgtaatgacagccaagaagcagagcctgctcgacaaaggtgtcatcattaacgactacatcgacacagagatgctgctgtgtgcggagaacgtgaaccaagacaacctgctatcctatgcccgggaagctgcagactttgccaccaactaccagctgccatccttagactttgccatgaaccactatgggcagcctgatgtggccatgtttgactttacctgcatgtatgcctcagagaacgcggccctggtgcgggagcggcaggcgcaccagctgctcgtggcccttgtgggtgacagcttgcttgagccattttggcccatgggtacaggctgtgcccgtggcttcctggcagcctttgacacggcatggatggtgaagagctggaaccagggcacccctcccctggagctgctggctgaaagggaaagtctctaccggctgttacctcagacaaccccggagaacatcaacaagaactttgagcagtacacgttggacccagggacacggtacccaaacctcaactcacactgtgtcaggccccatcaggtgaagcatttgtatatcactaaggagctggagcactaccctctcgagagactgggctcggtgaggagatctgtcaacctctccaggaaggagtcagatatccggcccagcaagctcctgacctggtgccagcagcagacagagggctaccagcatgtcaacgtcaccgacctgaccacatcctggcgcagtgggttggccctgtgtgccatcatccaccgcttccggcctgagctcatcaactttgactctttgaatgaagatgatgctgtggagaacaaccagctcgcatttgatgtggccgagcgagagtttgggatccctccagtgaccacgggcaaagagatggcatctgcccaggagcctgacaagctcagcatggtcatgtacctctccaagttctacgagctcttccggggcaccccactgaggcccgtggattcttggcgcaaaaactatggagaaaatgctgacctcagcttggccaaatcatccatttctaataactatctcaacctcacatttccaaggaagaggactccacgggtggatggtcaaaccggagagaatgacatgaacaaacggagacggaagggcttcaccaacctggacgagccttcaaacttttccagccgtagcttgggctccaatcaagagtgtgggagcagtaaggaaggtggaaatcagaacaaagtcaagtccatggcgaatcagctgctggccaagtttgaggagagcactcggaacccctcactcatgaagcaggaaaagaagtcaccttcagggttccattttcatcccagccatttgagaacagtgcatcctcaggaatctatgcgaaagtcatttccccttaacctgggaggcagcgacacgtgttacttctgtaagaaacgtgtgtacgtgatggaacggctgagcgccgagggccacttcttccaccgggagtgtttccgctgcagcatctgtgccaccaccttgcgcctggccgcctacacctttgactgcgatgaaggcaaattttactgcaagcctcacttcattcactgtaaaaccaatagcaaacaacggaagagacgggcagagttgaagcaacaaagagaggaggaggcaacatggcaagagcaggaagcccctcggagagacactcccaccgaaagttcttgcgcagtggccgccattggcaccctggaaggcagccccccaggtatctccacctccttctttaggaaggtgctgggctggcccctcaggctgccgagggacctgtgtaactggatgcagggactcctgcaagctgctggcctccatatcagggacaatgcttacaactactgctacatgtacgagctcctgagcctggggctgccactcctctgggcgttctctgaggtcctggcagccatgtacagggaatctgagggctccctcgagagcatctgcaactgggtgctcaggtgcttcccagtcaagctccgctgacatggctggctgccccaaagtgccttcacatttccagggaggcttcagatggcagtgcgtttgcagtttgctcaggctctggccaggaagcctagcattctctaagcaattagctcaaagccaaagaatttcacatgggccacctccgcctggccttatcagggtgaacatctactcacggtgctagggccagggatgatatgaaggatcttttctatagctttgtgagccatacttctgggtttacatttcaatttttttaattttaattagcccagagaaagcatttttttctatgagtgtcaatttttctaaacatgggtttgaagcttataaccagttttataaaccccttgaacactgcagtgagttatcaaagccactgcctgcaaagtggatgatttaagattttacacgcatgaaaatgagtgtgccatctcctgaccagtgccttttgacttaggtacccagatgccacttgtcagcagcaggatactttttacaacacgaaagcataattattttagaagaagagagtagaagggcagaatagaattcaacttacagaagcacggagcagtgtgtggttggctgttatctgtccccctgggaggaggactgttttgctcccttgttttgatgttaaacagtagcttaaaggctttcccccccataccaactcacagccaaatgacaaagaaccgtggggtttcaacagattctacaaacatgcattttcccttcccactaatgggcactgcagggaaagcccattggcatttgaccatggagctgatgcagtgccaaagatgagctctttcaactgatggcattttagcccctgtggctcccagcggatcccccagcccgggctgcaggctgagccaaggctgtgcagggtccatattggtcaggccaagtggagtggaagactctgtccacttatgtggtgtcctttgggactgagggggtttgttagcacatcaggctattgctgggaagcgtggcctgcccagtgagcattgcctgtggacatcctgactgcttagctgctccgctgccacacatatgtggtcaaaacagaaaccaatttcacactgccctgggaaaggaatgggtctgacctccaggggaagctctaccatatcttgactggcagggaaggctgggagtggaagctatttatggactgatccaaaggacatatgcatgagtaagggtaaaaatgagcatgcaggtccacctgtgttcttactctgggtatctagaagagtcctcagctctccctactccacgctgcctagacatacacagctgcagggtctggctgaacaatcaaggggccgccagagaaaggccatctacggtgcgcagtgtatctggagttgctgggcccaagatagctctgtggagttatcactagagatgcctctggattaactaagaggtgtgcctgggtgtgggtgaggagtcagaacctttgagagctttgagatgacagtttctatggggcgggaagaaggaggtgcatttctacaaacacttccctgaaatccttgggaaaaacagaggcatggccgtggccaactctgtgggaactggcgcctctgtccttgttggcactgttctcagtccgatgacttgcattgtgttttctccaatttttgctgggattttaatgttcagcatggtgggaggaacccttgattccttttgtttgagtatagaaagtaaatttttgaggtcatgatgtgaacggccatgttattgtgattatcttcagctcaggataggctgagatgctttgtggagtgttccatgaagcccgagtcggaatctctgactgtcgtgtacagccataaggagactggtttgaattactgtggcgagacagggcgtgcctgtcagaaatctgagatgtttgtacgctctgagatgttgaacctttctggtgggcagcaccgacacccaggggtggacccccgaggatgaatgcctctaggcctccgcaacatattcaagaatgaatgggagacgctagagtaaaatgggggcagagaggatatcagggagcaagatgcaaactgtgtgcatccactctcgtaaacaagtagctggtcacaaccagaaaggttcatctctcctaagcaaacagcgactctttcagaggaagtttccctctttcaatcgtggccttattttcaactccggtgccttctcgtgatgttaatcatttccttttttccccacactaagctctcttttctatctttctctctctttccaatcttacgccatggccatcagttcatttcagccttccagtgctacacccacttcttggctgacacacttctgctctaaggtgactggttttcttgccaattttcaaagagtggtactaacccccaacccgctttccgcaccccgtcctctccgccagcagtactggttgcactaactgtgagtgtcttgcatactgatggactcatttggtggcatggttggctaacagcatggcggggggtgttcagcttgagacccatgcctgtgttcatttcccatggagctggcagcctggtctaccccaagtgcatgccccgcctctcctctctcccttgggtctgcctgcgtgcatgcttctccagttgcgtctgcgaagctacctactttcttgggagggtcgaccttgatcatgaaacaataccatgagggggcctctgtcacctttgaaaagaacactttttgagcagcctcaaaaagctcatacataccagcgccttcttaaattggctctaatgtaaagattgttaatgtcatttatcaaaaccataggtgattatttggagggatttaaaaaacttaattactctcaggcctcatcccaagcttgacacatgctctgtaggttgaacacataatcacaaatattctagcaaatgctgccttggttgcagcctgcactgtagacccaagggttttgctgtggctcttcttatctcccttggctcataaagccccagatgatgccagagcttcaattagagccatcatcatcccaggcagggatatctttgagaaatgactcagttcagccccaggcccctgtgactctgcttaaagcacacatttctgctgactcttgtacctggggcagcaggataatcaccaacacactcttaacgagaaacaacacaccaagcaccgtggagctgtcctaggcaacactcgcggtctcaggctgcggtgggcgtctgtcctgcatgtggcccagaccaccctgacccccgggcctgcctgcctggccctgcatgctgcacgctcactgtatttgtgcagatcctggccagtacaaagtcgttgctcttgtcttatcttctcttacagagtctccctccctttatagaatgtcaaccaaagagtgccctcctcccctctcagcctcctctttagctagcctccccatctcatcacaacgcatgtctgtgacctttggtaatcatttacagtgccacacggaaccctgtattttgcacacagcaaaacaaacaatgtttagctttatttatggtatttgatgctgtaaatggaaataaatattgttctttataaagctc

SEQ ID NO: 153823 - DNA, 593 bp, Homo sapiens
  Payload ID: 10243
  Gene Symbol: MICAL2
  Gene Name: microtubule associated monooxygenase, calponin and LIM domain containing 2
  ENST ID: ENST00000533389
  CDS Start-End: 289-593
ataggggaagagattacctgcaatgccacatcgacaggccaaaaggcacaattctgtatctgttataaatatttatgtttagtattgaacactaaatagtgtggttaatatttgaatgtcttaaagaaattgcatttttacttctcagcacccatcccccaccctaacctcatcgtccaaagctgacctctgcctccccctactttcacaggtgtgacgtttctccagatacttcatgctgttcacctgtgtcctcgccgcaccactgccgcacacgactcctgaaccatgggggaaaacgaggatgagaagcaggcccaggcggggcaggtttttgagaactttgtccaggcatccacgtgcaaaggtaccctccaggccttcaacattctcacacgacacctggacctagaccctctggaccacagaaacttttattccaagctcaagtccaaggtgaccacctggaaagccaaagccctgtggtacaaattggataagcgtggttcccacaaagagtataagcgagggaagtcgtgcacgaacaccaagtgtctcatagttgggggaggaccctgtggcttgcgcactgc

SEQ ID NO: 153824 - DNA, 566 bp, Homo sapiens
  Payload ID: 10243
  Gene Symbol: MICAL2
  Gene Name: microtubule associated monooxygenase, calponin and LIM domain containing 2
  ENST ID: ENST00000525119
  CDS Start-End: 165-566
agatggtgtgcttccagctgataccaggagcagaagttttgagaagagactgtttgtcatgtggatagtggaaagccctgctctctggtgtgacgtttctccagatacttcatgctgttcacctgtgtcctcgccgcaccactgccgcacacgactcctgaaccatgggggaaaacgaggatgagaagcaggcccaggcggggcaggtttttgagaactttgtccaggcatccacgtgcaaaggtaccctccaggccttcaacattctcacacgacacctggacctagaccctctggaccacagaaacttttattccaagctcaagtccaaggtgaccacctggaaagccaaagccctgtggtacaaattggataagcgtggttcccacaaagagtataagcgagggaagtcgtgcacgaacaccaagtgtctcatagttgggggaggaccctgtggcttgcgcactgccattgaacttgcctacctgggagccaaagtggtcgtggtggagaagagggactccttctcccggaacaacgtgctacacctctggcctttcaccatc

SEQ ID NO: 153825 - DNA, 516 bp, Homo sapiens
  Payload ID: 10243
  Gene Symbol: MICAL2
  Gene Name: microtubule associated monooxygenase, calponin and LIM domain containing 2
  ENST ID: ENST00000532420
  CDS Start-End: 253-516
aatgatgctgattctctcctctgcacagcctcacaatcacctgaatatccccttcaagtgcatcctgccctgggtttcctgtgtgcacattgagtttccttctctagttgaagagagagtttgcagaggctggcaaacctggagctggactgaatggcctggacaggtggagcaggtgtgacgtttctccagatacttcatgctgttcacctgtgtcctcgccgcaccactgccgcacacgactcctgaaccatgggggaaaacgaggatgagaagcaggcccaggcggggcaggtttttgagaactttgtccaggcatccacgtgcaaaggtaccctccaggccttcaacattctcacacgacacctggacctagaccctctggaccacagaaacttttattccaagctcaagtccaaggtgaccacctggaaagccaaagccctgtggtacaaattggataagcgtggttcccacaaagagtataagcgagggaagtcgtgcacgaacaccaag

SEQ ID NO: 153826 - DNA, 3358 bp, Homo sapiens
  Payload ID: 10243
  Gene Symbol: MICAL2
  Gene Name: microtubule associated monooxygenase, calponin and LIM domain containing 2
  Uniprot ID: O94851
  ENST ID: ENST00000527546
  CDS Start-End: 155-2959
aggaacatggcaacccgtgtgtgtctcatcccagaaagagaagactttaaccactgtgatgcctgagaatccagtgagtgtgacgtttctccagatacttcatgctgttcacctgtgtcctcgccgcaccactgccgcacacgactcctgaaccatgggggaaaacgaggatgagaagcaggcccaggcggggcaggtttttgagaactttgtccaggcatccacgtgcaaaggtaccctccaggccttcaacattctcacacgacacctggacctagaccctctggaccacagaaacttttattccaagctcaagtccaaggtgaccacctggaaagccaaagccctgtggtacaaattggataagcgtggttcccacaaagagtataagcgagggaagtcgtgcacgaacaccaagtgtctcatagttgggggaggaccctgtggcttgcgcactgccattgaacttgcctacctgggagccaaagtggtcgtggtggagaagagggactccttctcccggaacaacgtgctacacctctggcctttcaccatccatgaccttcgtggcctgggagccaagaagttctatgggaagttctgtgctggctccatcgaccatatcagtattcgccaactacagctcatcctattcaaggtggccctgatgctgggagttgaaatccatgtgaatgtggagttcgtgaaggttctagagcctcctgaagatcaagaaaatcaaaaaattggctggcgggcagaatttctccctacagaccattctctgtcggagtttgagtttgacgtcatcattggtgccgatggccgcaggaacaccctggaagggttcagaagaaaagaattccgtgggaagctggcgattgccatcaccgccaacttcataaacagaaacagcacagcggaagccaaggtggaagagattagtggtgtggctttcatcttcaatcagaaattttttcaggaccttaaagaagaaacaggcatagatcttgagaacattgtttactacaaggactgcacccactattttgtaatgacagccaagaagcagagcctgctcgacaaaggtgtcatcattaacgactacatcgacacagagatgctgctgtgtgcggagaacgtgaaccaagacaacctgctatcctatgcccgggaagctgcagactttgccaccaactaccagctgccatccttagactttgccatgaaccactatgggcagcctgatgtggccatgtttgactttacctgcatgtatgcctcagagaacgcggccctggtgcgggagcggcaggcgcaccagctgctcgtggcccttgtgggtgacagcttgcttgagccattttggcccatgggtacaggctgtgcccgtggcttcctggcagcctttgacacggcatggatggtgaagagctggaaccagggcacccctcccctggagctgctggctgaaagggaaagtctctaccggctgttacctcagacaaccccggagaacatcaacaagaactttgagcagtacacgttggacccagggacacggtacccaaacctcaactcacactgtgtcaggccccatcaggtgaagcatttgtatatcactaaggagctggagcactaccctctcgagagactgggctcggtgaggagatctgtcaacctctccaggaaggagtcagatatccggcccagcaagctcctgacctggtgccagcagcagacagagggctaccagcatgtcaacgtcaccgacctgaccacatcctggcgcagtgggttggccctgtgtgccatcatccaccgcttccggcctgagctcatcaactttgactctttgaatgaagatgatgctgtggagaacaaccagctcgcatttgatgtggccgagcgagagtttgggatccctccagtgaccacgggcaaagagatggcatctgcccaggagcctgacaagctcagcatggtcatgtacctctccaagttctacgagctcttccggggcaccccactgaggcccgtggattcttggcgcaaaaactatggagaaaatgctgacctcagcttggccaaatcatccatttctaataactatctcaacctcacatttccaaggaagaggactccacgggtggatggtcaaaccggagagaatgacatgaacaaacggagacggaagggcttcaccaacctggacgagccttcaaacttttccagccgtagcttgggctccaatcaagagtgtgggagcagtaaggaaggtggaaatcagaacaaagtcaagtccatggcgaatcagctgctggccaagtttgaggagagcactcggaacccctcactcatgaagcaggaaaagaagtcaccttcagggttccattttcatcccagccatttgagaacagtgcatcctcagctgacggtagggaaagtgtccagcggaataggggctgcagctgaagtcctggtcaatctgtacatgaatgatcacagacctaaggcccaggccacctctccagacctggaatctatgcgaaagtcatttccccttaacctgggaggcagcgacacgtgttacttctgtaagaaacgtgtgtacgtgatggaacggctgagcgccgagggccacttcttccaccgggagtgtttccgctgcagcatctgtgccaccaccttgcgcctggccgcctacacctttgactgcgatgaaggcaaattttactgcaagcctcacttcattcactgtaaaaccaatagcaaacaacggaagagacgggcagagttgaagcaacaaagagaggaggaggcaacatggcaagagcaggaagcccctcggagagacactcccaccgaaagttcttgcgcagtggccgccattggcaccctggaaggcagccccccagttcatttcagccttccagtgctacacccacttcttggctgacacacttctgctctaaggtgactggttttcttgccaattttcaaagagtggtactaacccccaacccgctttccgcaccccgtcctctccgccagcagtactggttgcactaactgtgagtgtcttgcatactgatggactcatttggtggcatggttggctaacagcatggcggggggtgttcagcttgagacccatgcctgtgttcatttcccatggagctggcagcctggtctaccccaagtgcatgccccgcctctcctctctcccttgggtctgcctgcgtgcatgcttctccagttgcgtctgcgaagctacctactttcttgggagggtcgaccttgatcatgaaacaataccatgagggggcctctgtcacctttgaaaagaacacttttt

SEQ ID NO: 153827 - DNA, 589 bp, Homo sapiens
  Payload ID: 10243
  Gene Symbol: MICAL2
  Gene Name: microtubule associated monooxygenase, calponin and LIM domain containing 2
  ENST ID: ENST00000532179
  CDS Start-End: 295-589
accaagactaatgaaggtccggccctccccagtgtaggaggcaggtaaatgatcacactgtgacaaatgctcaaacggggatgtgcttgcaaaggctagagacagcacgggaggaaggagcagtccattctgctgagagtgtgagtaccgagaaagcatggcactgggcttgaaggatgaggagttcgccagacacagaggatgaggagagcagcacgtgtgacgtttctccagatacttcatgctgttcacctgtgtcctcgccgcaccactgccgcacacgactcctgaaccatgggggaaaacgaggatgagaagcaggcccaggcggggcaggtttttgagaactttgtccaggcatccacgtgcaaaggtaccctccaggccttcaacattctcacacgacacctggacctagaccctctggaccacagaaacttttattccaagctcaagtccaaggtgaccacctggaaagccaaagccctgtggtacaaattggataagcgtggttcccacaaagagtataagcgagggaagtcgtgcacgaacaccaagtgtctcatagttgggggaggaccctgtggct

SEQ ID NO: 153828 - DNA, 473 bp, Homo sapiens
  Payload ID: 10243
  Gene Symbol: MICAL2
  Gene Name: microtubule associated monooxygenase, calponin and LIM domain containing 2
  ENST ID: ENST00000530823
  CDS Start-End: 463-473
gaacaaactttctttgcaggattgggtcaaccatggggtctgatttggagatgcttcccttctctgtcagctgctcatgtctcaaatgaagagccttttgtgatgaccatgtatggaatagtgtctgaagtaccactgcactgtacctgtctttgcgtctaaacatcactaccatcatcacgggacaaaccgcccatctcagtggtgtctggcagtgagctgaacatggcaacccgtgtgtgtctcatcccagaaagagaagactttaaccactgtgatgcctgagaatccaagacagagtctcactgcgttgcccaggctggtcttgaactcttggactcaagcaatcctcccaccttggcctcccaaagagcaggaattacaggtgtgacgtttctccagatacttcatgctgttcacctgtgtcctcgccgcaccactgccgcacacgactcctgaaccatgggggaaaa

SEQ ID NO: 153829 - DNA, 546 bp, Homo sapiens
  Payload ID: 10243
  Gene Symbol: MICAL2
  Gene Name: microtubule associated monooxygenase, calponin and LIM domain containing 2
  ENST ID: ENST00000526065
  CDS Start-End: 282-546
aatgaaggtccggccctccccagtgtaggaggcaggtaaatgatcacactgtgacaaatgctcaaacggggatgtgcttgcaaaggctagagacagcacgggaggaaggagcagtccattctgctgagagtgtagctcagttccaagaacacttattgatgcttacaccgggccaagccctgtgatgggccctgggttccagaggtgtgacgtttctccagatacttcatgctgttcacctgtgtcctcgccgcaccactgccgcacacgactcctgaaccatgggggaaaacgaggatgagaagcaggcccaggcggggcaggtttttgagaactttgtccaggcatccacgtgcaaaggtaccctccaggccttcaacattctcacacgacacctggacctagaccctctggaccacagaaacttttattccaagctcaagtccaaggtgaccacctggaaagccaaagccctgtggtacaaattggataagcgtggttcccacaaagagtataagcgagggaagtcgtgcacgaacaccaagg

SEQ ID NO: 153830 - DNA, 573 bp, Homo sapiens
  Payload ID: 10243
  Gene Symbol: MICAL2
  Gene Name: microtubule associated monooxygenase, calponin and LIM domain containing 2
  ENST ID: ENST00000524685
  CDS Start-End: 212-573
ggtagatggtgtgcttccagctgataccaggagcagaagttttgagaagagactgtttgtcatgtggatagtggaaagccctgctctctggtaacgaatgaagaaaggctttaaagctgggtgtctacggagaggtgtgacgtttctccagatacttcatgctgttcacctgtgtcctcgccgcaccactgccgcacacgactcctgaaccatgggggaaaacgaggatgagaagcaggcccaggcggggcaggtttttgagaactttgtccaggcatccacgtgcaaaggtaccctccaggccttcaacattctcacacgacacctggacctagaccctctggaccacagaaacttttattccaagctcaagtccaaggtgaccacctggaaagccaaagccctgtggtacaaattggataagcgtggttcccacaaagagtataagcgagggaagtcgtgcacgaacaccaagtgtctcatagttgggggaggaccctgtggcttgcgcactgccattgaacttgcctacctgggagccaaagtggtcgtggtggagaagagggactcctt

SEQ ID NO: 153831 - DNA, 3774 bp, Homo sapiens
  Payload ID: 10243
  Gene Symbol: MICAL2
  Gene Name: microtubule associated monooxygenase, calponin and LIM domain containing 2
  Uniprot ID: O94851
  ENST ID: ENST00000537344
  CDS Start-End: 153-3527
gaacatggcaacccgtgtgtgtctcatcccagaaagagaagactttaaccactgtgatgcctgagaatccagtgagtgtgacgtttctccagatacttcatgctgttcacctgtgtcctcgccgcaccactgccgcacacgactcctgaaccatgggggaaaacgaggatgagaagcaggcccaggcggggcaggtttttgagaactttgtccaggcatccacgtgcaaaggtaccctccaggccttcaacattctcacacgacacctggacctagaccctctggaccacagaaacttttattccaagctcaagtccaaggtgaccacctggaaagccaaagccctgtggtacaaattggataagcgtggttcccacaaagagtataagcgagggaagtcgtgcacgaacaccaagtgtctcatagttgggggaggaccctgtggcttgcgcactgccattgaacttgcctacctgggagccaaagtggtcgtggtggagaagagggactccttctcccggaacaacgtgctacacctctggcctttcaccatccatgaccttcgtggcctgggagccaagaagttctatgggaagttctgtgctggctccatcgaccatatcagtattcgccaactacagctcatcctattcaaggtggccctgatgctgggagttgaaatccatgtgaatgtggagttcgtgaaggttctagagcctcctgaagatcaagaaaatcaaaaaattggctggcgggcagaatttctccctacagaccattctctgtcggagtttgagtttgacgtcatcattggtgccgatggccgcaggaacaccctggaagggttcagaagaaaagaattccgtgggaagctggcgattgccatcaccgccaacttcataaacagaaacagcacagcggaagccaaggtggaagagattagtggtgtggctttcatcttcaatcagaaattttttcaggaccttaaagaagaaacaggcatagatcttgagaacattgtttactacaaggactgcacccactattttgtaatgacagccaagaagcagagcctgctcgacaaaggtgtcatcattaacgactacatcgacacagagatgctgctgtgtgcggagaacgtgaaccaagacaacctgctatcctatgcccgggaagctgcagactttgccaccaactaccagctgccatccttagactttgccatgaaccactatgggcagcctgatgtggccatgtttgactttacctgcatgtatgcctcagagaacgcggccctggtgcgggagcggcaggcgcaccagctgctcgtggcccttgtgggtgacagcttgcttgagccattttggcccatgggtacaggctgtgcccgtggcttcctggcagcctttgacacggcatggatggtgaagagctggaaccagggcacccctcccctggagctgctggctgaaagggaaagtctctaccggctgttacctcagacaaccccggagaacatcaacaagaactttgagcagtacacgttggacccagggacacggtacccaaacctcaactcacactgtgtcaggccccatcaggtgaagcatttgtatatcactaaggagctggagcactaccctctcgagagactgggctcggtgaggagatctgtcaacctctccaggaaggagtcagatatccggcccagcaagctcctgacctggtgccagcagcagacagagggctaccagcatgtcaacgtcaccgacctgaccacatcctggcgcagtgggttggccctgtgtgccatcatccaccgcttccggcctgagctcatcaactttgactctttgaatgaagatgatgctgtggagaacaaccagctcgcatttgatgtggccgagcgagagtttgggatccctccagtgaccacgggcaaagagatggcatctgcccaggagcctgacaagctcagcatggtcatgtacctctccaagttctacgagctcttccggggcaccccactgaggcccgtggattcttggcgcaaaaactatggagaaaatgctgacctcagcttggccaaatcatccatttctaataactatctcaacctcacatttccaaggaagaggactccacgggtggatggtcaaaccggagagaatgacatgaacaaacggagacggaagggcttcaccaacctggacgagccttcaaacttttccagccgtagcttgggctccaatcaagagtgtgggagcagtaaggaaggtggaaatcagaacaaagtcaagtccatggcgaatcagctgctggccaagtttgaggagagcactcggaacccctcactcatgaagcaggaacgccgtgtctcagggataggtaagccggtcctgtgctcttcctccggccctcctgttcactcttgctgccccaagccggaggaggccacacccagcccatcacctcctctgaaaaggcagttcccctctgtggtcgtgacggggcacgtgctcagagagctcaagcaagtgtctgctggcagtgagtgcctgagcagaccttggagagccagagccaagtctgacctacagctgggtgggacagaaaatttcgctaccctgccttctacccgcccgagggcgcaggctctttccggggtgctgtggcggctgcagcaagtggaggaaaagattctccagaagagggctcagaacttggccaacagggaatttcacacaaagaacattaaggagaaggcggctcaccttgcctccatgtttggacacggggatttcccgcagaataaactactctctaaaggcctgtctcatactcatcctccatctcctccctctcgccttccgtctcctgatccagctgcttcttcctctccatcaactgttgactctgcttctcctgccagaaaggaaaagaagtcaccttcagggttccattttcatcccagccatttgagaacagtgcatcctcagctgacggtagggaaagtgtccagcggaataggggctgcagctgaagtcctggtcaatctgtacatgaatgatcacagacctaaggcccaggccacctctccagacctggaatctatgcgaaagtcatttccccttaacctgggaggcagcgacacgtgttacttctgtaagaaacgtgtgtacgtgatggaacggctgagcgccgagggccacttcttccaccgggagtgtttccgctgcagcatctgtgccaccaccttgcgcctggccgcctacacctttgactgcgatgaaggcaaattttactgcaagcctcacttcattcactgtaaaaccaatagcaaacaacggaagagacgggcagagttgaagcaacaaagagaggaggaggcaacatggcaagagcaggaagcccctcggagagacactcccaccgaaagttcttgcgcagtggccgccattggcaccctggaaggcagccccccagttcatttcagccttccagtgctacacccacttcttggctgacacacttctgctctaagagtctccctccctttatagaatgtcaaccaaagagtgccctcctcccctctcagcctcctctttagctagcctccccatctcatcacaacgcatgtctgtgacctttggtaatcatttacagtgccacacggaaccctgtattttgcacacagcaaaacaaacaatgtttagctttatttatggtatttgatgctgtaaatggaaataaatattgttctttataaagctc

SEQ ID NO: 153832 - DNA, 2963 bp, Homo sapiens
  Payload ID: 10244
  Gene Symbol: MICAL3
  Gene Name: microtubule associated monooxygenase, calponin and LIM domain containing 3
  Uniprot ID: Q7RTP6
  ENST ID: ENST00000383094
  CDS Start-End: 16-2862
tgagagtgaggcagcatggaggagaggaagcatgagaccatgaacccagctcatgtcctctttgaccggtttgtccaggccaccacctgcaagggaaccctcaaggctttccaggagctctgtgaccacctggaactaaagccaaaggactaccgctccttctatcacaagctcaagtccaagcttaactactggaaagccaaagccctctgggcaaaattggacaaacggggcagtcacaaagactacaaaaagggaaaagcgtgcactaacaccaagtgtctcatcattggggctggcccctgtggtctccgtacagccatcgacttatccttactgggggccaaggtggttgttattgagaaacgagatgccttctcccgcaacaacgtcttgcatctctggccattcaccatacatgatctacgaggtctgggtgccaagaagttctatggcaagttctgtgctggagccatcgaccatatcagtatccgtcagctccaactaatacttttgaaagtagccttgatcctaggcattgaaatccacgtcaatgtggaattccaaggacttatacagcctcctgaggaccaagagaatgaacggataggctggcgggcactggtgcaccccaagactcatcctgtgtcagagtatgaatttgaagtgatcatcggtggggatggtcggaggaacaccttggaagggtttcgtcggaaagaattccgtggcaaactggccatcgccatcacggcaaattttatcaaccgaaatacaacagcagaagctaaagtggaagagatcagtggtgtggcttttatattcaaccaaaaatttttccaggaactgagggaagccacaggtattgacttggagaacatcgtttactacaaagatgacacacactatttcgttatgacagccaaaaagcagagtttgctggacaaaggagtgatactacatgactacgccgacacagagctcctgctttcccgagaaaacgtggaccaggaggctctgctcagctatgccagggaggcggcagacttctctacccagcagcagctgccgtctctggattttgccatcaatcactatgggcagcccgatgtggccatgtttgacttcacttgtatgtatgcctccgagaacgccgccttggtgcgggagcagaacggacaccagttactagtggctctggtcggggacagcctcctagagcctttctggccaatgggaacaggaatagcccggggctttctagctgctatggactctgcctggatggtccgaagttggtctctaggaacgagccctttggaagtgctggcagagagggaaagtatttacaggttgctgcctcagaccacccctgagaatgtgagtaagaacttcagccagtacagtatcgaccctgtcactcggtatcccaatatcaacgtcaacttcctccggccaagccaggtgcgccatttatatgatactggcgaaacaaaagatattcacctggaaatggagagcctggtgaattcccgaaccacccccaaattgactcgcaatgagtctgtagctcgttcaagcaaactgctgggttggtgccagaggcagacagatggctatgcaggggtaaacgtgacagatctcaccatgtcctggaaaagtggcttggccctttgtgcaattatccatagataccgccctgacctgatagattttgattctttggatgagcaaaatgtggagaagaataaccaactggcctttgacattgctgagaaggaattgggcatttctcccatcatgacaggcaaagaaatggcctccgtgggggagcctgataagctgtccatggtgatgtacctgactcagttctacgagatgtttaaggactccctcccctctagcgacaccttggacctaaatgccgaggagaaagcagtcctgatagccagcaccagatcccctatctccttcctaagcaaacttggccagaccatctctcggaagcgttctcccaaggataaaaaggaaaaggacttggatggtgctgggaagaggagaaagaccagtcaatcagaggaggaggaagctcctcggggccacagaggagaaagaccgaccctggtgagcactctgacagacaggaggatggacgttgccgttgggaaccagaacaaagtgaagtacatggcgacccagctgctggccaaatttgaagagaatgcgcccgcacagtccatcggcatacggagacagggctccatgaagaaggagttcccgcagaacctgggaggcagcgacacatgctacttctgccagaagcgggtctacgtgatggagaggctgagtgccgagggcaagttcttccaccggagctgcttcaagtgcgagtactgcgccaccaccctgcgcctctcggcctacgcctacgacatcgaggatggtaaattctactgtaagccacactactgctatcgactctctggctacgcacaaaggaagagaccggcagtggctcccctgtctggaaaggaggccaaaggacccctgcaggatggcgccaccacagatgcaaacggacgggccaacgccgtggccagctccactgagagaaccccaggttcaggcgtgaacggcctggaggagcccagcatcgccaagcgactgaggggcaccccagagcggatcgagctggagaactaccgcctgtccctgaggcaggctgaggcactgcaggaggtaccggaggagactcaggccgagcacaacctgagcagcgtgctggacacgggcgccgaggaggacgtcgccagcaggtcagcacgcagggctgcagggcgcccacccgccacacggccctaagagcctcctcacctctgtgtgtctcggtttcttctcagtgaagggaggcctcctgtctttcctgctgcccgcagtccattctccccagtcccttttaggtt

SEQ ID NO: 153833 - DNA, 3046 bp, Homo sapiens
  Payload ID: 10244
  Gene Symbol: MICAL3
  Gene Name: microtubule associated monooxygenase, calponin and LIM domain containing 3
  Uniprot ID: Q7RTP6
  ENST ID: ENST00000400561
  CDS Start-End: 24-2924
gggagtgctgagagtgaggcagcatggaggagaggaagcatgagaccatgaacccagctcatgtcctctttgaccggtttgtccaggccaccacctgcaagggaaccctcaaggctttccaggagctctgtgaccacctggaactaaagccaaaggactaccgctccttctatcacaagctcaagtccaagcttaactactggaaagccaaagccctctgggcaaaattggacaaacggggcagtcacaaagactacaaaaagggaaaagcgtgcactaacaccaagtgtctcatcattggggctggcccctgtggtctccgtacagccatcgacttatccttactgggggccaaggtggttgttattgagaaacgagatgccttctcccgcaacaacgtcttgcatctctggccattcaccatacatgatctacgaggtctgggtgccaagaagttctatggcaagttctgtgctggagccatcgaccatatcagtatccgtcagctccaactaatacttttgaaagtagccttgatcctaggcattgaaatccacgtcaatgtggaattccaaggacttatacagcctcctgaggaccaagagaatgaacggataggctggcgggcactggtgcaccccaagactcatcctgtgtcagagtatgaatttgaagtgatcatcggtggggatggtcggaggaacaccttggaagggtttcgtcggaaagaattccgtggcaaactggccatcgccatcacggcaaattttatcaaccgaaatacaacagcagaagctaaagtggaagagatcagtggtgtggcttttatattcaaccaaaaatttttccaggaactgagggaagccacaggtattgacttggagaacatcgtttactacaaagatgacacacactatttcgttatgacagccaaaaagcagagtttgctggacaaaggagtgatactacatgactacgccgacacagagctcctgctttcccgagaaaacgtggaccaggaggctctgctcagctatgccagggaggcggcagacttctctacccagcagcagctgccgtctctggattttgccatcaatcactatgggcagcccgatgtggccatgtttgacttcacttgtatgtatgcctccgagaacgccgccttggtgcgggagcagaacggacaccagttactagtggctctggtcggggacagcctcctagagcctttctggccaatgggaacaggaatagcccggggctttctagctgctatggactctgcctggatggtccgaagttggtctctaggaacgagccctttggaagtgctggcagagagggaaagtatttacaggttgctgcctcagaccacccctgagaatgtgagtaagaacttcagccagtacagtatcgaccctgtcactcggtatcccaatatcaacgtcaacttcctccggccaagccaggtgcgccatttatatgatactggcgaaacaaaagatattcacctggaaatggagagcctggtgaattcccgaaccacccccaaattgactcgcaatgagtctgtagctcgttcaagcaaactgctgggttggtgccagaggcagacagatggctatgcaggggtaaacgtgacagatctcaccatgtcctggaaaagtggcttggccctttgtgcaattatccatagataccgccctgacctgatagattttgattctttggatgagcaaaatgtggagaagaataaccaactggcctttgacattgctgagaaggaattgggcatttctcccatcatgacaggcaaagaaatggcctccgtgggggagcctgataagctgtccatggtgatgtacctgactcagttctacgagatgtttaaggactccctcccctctagcgacaccttggacctaaatgccgaggagaaagcagtcctgatagccagcaccagatcccctatctccttcctaagcaaacttggccagaccatctctcggaagcgttctcccaaggataaaaaggaaaaggacttggatggtgctgggaagaggagaaagaccagtcaatcagaggaggaggaagctcctcggggccacagaggagaaagaccgaccctggtgagcactctgacagacaggaggatggacgttgccgttgggaaccagaacaaagtgaagtacatggcgacccagctgctggccaaatttgaagagaatgcgcccgcacagtccatcggcatacggagacagggctccatgaagaaggagttcccgcagaacctgggaggcagcgacacatgctacttctgccagaagcgggtctacgtgatggagaggctgagtgccgagggcaagttcttccaccggagctgcttcaagtgcgagtactgcgccaccaccctgcgcctctcggcctacgcctacgacatcgaggatggtaaattctactgtaagccacactactgctatcgactctctggctacgcacaaaggaagagaccggcagtggctcccctgtctggaaaggaggccaaaggacccctgcaggatggcgccaccacagatgcaaacggacgggccaacgccgtggccagctccactgagagaaccccaggttcaggcgtgaacggcctggaggagcccagcatcgccaagcgactgaggggcaccccagagcggatcgagctggagaactaccgcctgtccctgaggcaggctgaggcactgcaggaggtaccggaggagactcaggccgagcacaacctgagcagcgtgctggacacgggcgccgaggaggacgtcgccagcagagactgggtctccccatggttgcccaggatggtctcaaactcctgggctcaaatgatccacccacctcagcctcccacagtgctgggatcacagatgtgagctactgggcccagctgagcataagagtcttttctgtgtcacctttgtgttccctacagtgtctagcaagtgcgttgtgaggggaagataattgaataaattttatccaggtaaatgaacaa

SEQ ID NO: 153834 - DNA, 4756 bp, Homo sapiens
  Payload ID: 10244
  Gene Symbol: MICAL3
  Gene Name: microtubule associated monooxygenase, calponin and LIM domain containing 3
  Uniprot ID: Q7RTP6
  ENST ID: ENST00000414725
  CDS Start-End: 1-2931
atggaggagaggaagcatgagaccatgaacccagctcatgtcctctttgaccggtttgtccaggccaccacctgcaagggaaccctcaaggctttccaggagctctgtgaccacctggaactaaagccaaaggactaccgctccttctatcacaagctcaagtccaagcttaactactggaaagccaaagccctctgggcaaaattggacaaacggggcagtcacaaagactacaaaaagggaaaagcgtgcactaacaccaagtgtctcatcattggggctggcccctgtggtctccgtacagccatcgacttatccttactgggggccaaggtggttgttattgagaaacgagatgccttctcccgcaacaacgtcttgcatctctggccattcaccatacatgatctacgaggtctgggtgccaagaagttctatggcaagttctgtgctggagccatcgaccatatcagtatccgtcagctccaactaatacttttgaaagtagccttgatcctaggcattgaaatccacgtcaatgtggaattccaaggacttatacagcctcctgaggaccaagagaatgaacggataggctggcgggcactggtgcaccccaagactcatcctgtgtcagagtatgaatttgaagtgatcatcggtggggatggtcggaggaacaccttggaagggtttcgtcggaaagaattccgtggcaaactggccatcgccatcacggcaaattttatcaaccgaaatacaacagcagaagctaaagtggaagagatcagtggtgtggcttttatattcaaccaaaaatttttccaggaactgagggaagccacaggtattgacttggagaacatcgtttactacaaagatgacacacactatttcgttatgacagccaaaaagcagagtttgctggacaaaggagtgatactacatgactacgccgacacagagctcctgctttcccgagaaaacgtggaccaggaggctctgctcagctatgccagggaggcggcagacttctctacccagcagcagctgccgtctctggattttgccatcaatcactatgggcagcccgatgtggccatgtttgacttcacttgtatgtatgcctccgagaacgccgccttggtgcgggagcagaacggacaccagttactagtggctctggtcggggacagcctcctagagcctttctggccaatgggaacaggaatagcccggggctttctagctgctatggactctgcctggatggtccgaagttggtctctaggaacgagccctttggaagtgctggcagagagggaaagtatttacaggttgctgcctcagaccacccctgagaatgtgagtaagaacttcagccagtacagtatcgaccctgtcactcggtatcccaatatcaacgtcaacttcctccggccaagccaggtgcgccatttatatgatactggcgaaacaaaagatattcacctggaaatggagagcctggtgaattcccgaaccacccccaaattgactcgcaatgagtctgtagctcgttcaagcaaactgctgggttggtgccagaggcagacagatggctatgcaggggtaaacgtgacagatctcaccatgtcctggaaaagtggcttggccctttgtgcaattatccatagataccgccctgacctgatagattttgattctttggatgagcaaaatgtggagaagaataaccaactggcctttgacattgctgagaaggaattgggcatttctcccatcatgacaggcaaagaaatggcctccgtgggggagcctgataagctgtccatggtgatgtacctgactcagttctacgagatgtttaaggactccctcccctctagcgacaccttggacctaaatgccgaggagaaagcagtcctgatagccagcaccagatcccctatctccttcctaagcaaacttggccagaccatctctcggaagcgttctcccaaggataaaaaggaaaaggacttggatggtgctgggaagaggagaaagaccagtcaatcagaggaggaggaagctcctcggggccacagaggagaaagaccgaccctggtgagcactctgacagacaggaggatggacgttgccgttgggaaccagaacaaagtgaagtacatggcgacccagctgctggccaaatttgaagagaatgcgcccgcacagtccatcggcatacggagacagctgacacaagagcgtggggccagccagccgtcctgctgcctgcctgggcaggttcgccctgcccccaccccccggtggaaacagggctccatgaagaaggagttcccgcagaacctgggaggcagcgacacatgctacttctgccagaagcgggtctacgtgatggagaggctgagtgccgagggcaagttcttccaccggagctgcttcaagtgcgagtactgcgccaccaccctgcgcctctcggcctacgcctacgacatcgaggatggtaaattctactgtaagccacactactgctatcgactctctggctacgcacaaaggaagagaccggcagtggctcccctgtctggaaaggaggccaaaggacccctgcaggatggcgccaccacagatgcaaacggacgggccaacgccgtggccagctccactgagagaaccccaggttcaggcgtgaacggcctggaggagcccagcatcgccaagcgactgaggggcaccccagagcggatcgagctggagaactaccgcctgtccctgaggcaggctgaggcactgcaggaggtaccggaggagactcaggccgagcacaacctgagcagcgtgctggacacgggcgccgaggaggacgtcgccagcaggtcagcacgcagggctgcagggcgcccacccgccacacggccctaagagcctcctcacctctgtgtgtctcggtttcttctcagtgaagggaggcctcctgtctttcctgctgcccgcagtccattctccccagtcccttttaggttcttagcctcatcttctagtcagtgaggactcctccatcagactcaattcagagattcaggaagtatttattccttgaggacctgacatgtccccagctccaagtctgtcattgggaaggaaagtggcaggctctgcccccgggttattcacagattcagcagagggaaggacgggcacacggggagggactctgggtgattcagccaccagtgcaccgggccgtcttgagggaggcctagtccgtcccccaggcatctttttttctcctgtaggtaaagaaagggactgaaaatgtgtgccccaggggccgcatgcagcaccagtggatgcatgcttaggcagttccagagctgtaatcacatccagctgggtgacacctttggggatgtgcatgctataaccctaggactccctatatccactgccctgcaccccagggcttccagtatcagcgaaggcttcaaagtgttcagccgattacagatgatcaagagagccaagaatcaaaagggggtccggtgtcctgtggggcttcaggacagaaacacaggctgcaaacccgaggggcagaggcctcaagtggccttggagagcatttgaatcacacaccttgatttagccatgatgaagggaacatgtggggataaggagagcagagcagtttttttaaggtccaagaacgctttccagaaggtgtttgctgggccgagctgctttcagctgcacccgccacctcagccctcatgtcagacaccctctgcctagattcattcttgggctgcctcacagaccgctcctccgtgcatgccgggggcagcctctgccttggtgtctgcagttccaaagctgtcactgatggtgcatcctcatccagaactctgcttccctatccagagcacccatggaggccccactctccccactgtgcccagatgagggggagcccactctctctctccactgaccctgcagtgagggtgagagatgctgtgtgtcaaaacacatttataaacccttgagcagagctactggcttgaccttgggctgagtgtgggtcagcaccattttctccactgtaatttataaattgtgagaggcagtggggcagcaagttcatgtaatgtagcaaggacattccaggaaggctaacccctggcatttatggcaggtatgacaggagggcagcacagaaaacatgaaatcagtcagcatctatgcaatgcaatacatgcctcatcttactcagattgaagttaaaaaaagattttaaaactagcattcatgctgggcgcagtggctcatgcctgtaatcccagcactttgggaggccaaggtgggcacatcacttaaggtcaggagttcaagaccagcctggccaacataatgaaaccctgtctctactaaaaatacaaaaattagctgggcatggtggtgcacacctgtaatcccagctacttgggagggtaaggcatgagaattgcttgaacctgggaggcggaggttgcagcgagccgagatcatgccactgcaccactgcactccagcctgtgtgacagaatgagactccatctcaaaaaaaattaaaattaaaatcaaaaaataaaataaaggccaggcacggtggctcacacaggagaatcacttgaacctgggaggcggaggttgcagtgatctgagatcacaccagtacactccagcctgggagatggtgagactccgtctc

SEQ ID NO: 153835 - DNA, 542 bp, Homo sapiens
  Payload ID: 10244
  Gene Symbol: MICAL3
  Gene Name: microtubule associated monooxygenase, calponin and LIM domain containing 3
  ENST ID: ENST00000424046
  CDS Start-End: 167-542
gcttataaccctgcgtccggccggcggggcgcgaggaagcccccgcctcgcgttcccgtgtggtcacctcccgccggaggatgcgtggccagattaacgtgacagtgtcaggtggacccacagccatcccacctccccctctggggagtgctgagagtgaggcagcatggaggagaggaagcatgagaccatgaacccagctcatgtcctctttgaccggtttgtccaggccaccacctgcaagggaaccctcaaggctttccaggagctctgtgaccacctggaactaaagccaaaggactaccgctccttctatcacaagctcaagtccaagcttaactactggaaagccaaagccctctgggcaaaattggacaaacggggcagtcacaaagactacaaaaagggaaaagcgtgcactaacaccaagtgtctcatcattggggctggcccctgtggtctccgtacagccatcgacttatccttactgggggccaaggtggttgttattgagaaacgagatgccttctcccgcaacaacg

SEQ ID NO: 153836 - DNA, 9445 bp, Homo sapiens
  Payload ID: 10244
  Gene Symbol: MICAL3
  Gene Name: microtubule associated monooxygenase, calponin and LIM domain containing 3
  Uniprot ID: Q7RTP6
  ENST ID: ENST00000441493
  CDS Start-End: 354-6362
cagcgcgcgctcctgcagccccggcggagtcccggcggggagcgcccgcgtaggcaggcacccggggcagccctccgtcctcgccgcgcggcctgagaacccctgggccctgggcgagggggctgggctgtgcagcccccgaggctaactgggcgggatcgcagctgcaggggttgtgcgagcagccacggcggcacctgtgccctgcgggcacccaccctgcccctgccgaggcaggcgcccaccgccggcggtgatgcggctgtgaagccctagtcgattaacgtgacagtgtcaggtggacccacagccatcccacctccccctctggggagtgctgagagtgaggcagcatggaggagaggaagcatgagaccatgaacccagctcatgtcctctttgaccggtttgtccaggccaccacctgcaagggaaccctcaaggctttccaggagctctgtgaccacctggaactaaagccaaaggactaccgctccttctatcacaagctcaagtccaagcttaactactggaaagccaaagccctctgggcaaaattggacaaacggggcagtcacaaagactacaaaaagggaaaagcgtgcactaacaccaagtgtctcatcattggggctggcccctgtggtctccgtacagccatcgacttatccttactgggggccaaggtggttgttattgagaaacgagatgccttctcccgcaacaacgtcttgcatctctggccattcaccatacatgatctacgaggtctgggtgccaagaagttctatggcaagttctgtgctggagccatcgaccatatcagtatccgtcagctccaactaatacttttgaaagtagccttgatcctaggcattgaaatccacgtcaatgtggaattccaaggacttatacagcctcctgaggaccaagagaatgaacggataggctggcgggcactggtgcaccccaagactcatcctgtgtcagagtatgaatttgaagtgatcatcggtggggatggtcggaggaacaccttggaagggtttcgtcggaaagaattccgtggcaaactggccatcgccatcacggcaaattttatcaaccgaaatacaacagcagaagctaaagtggaagagatcagtggtgtggcttttatattcaaccaaaaatttttccaggaactgagggaagccacaggtattgacttggagaacatcgtttactacaaagatgacacacactatttcgttatgacagccaaaaagcagagtttgctggacaaaggagtgatactacatgactacgccgacacagagctcctgctttcccgagaaaacgtggaccaggaggctctgctcagctatgccagggaggcggcagacttctctacccagcagcagctgccgtctctggattttgccatcaatcactatgggcagcccgatgtggccatgtttgacttcacttgtatgtatgcctccgagaacgccgccttggtgcgggagcagaacggacaccagttactagtggctctggtcggggacagcctcctagagcctttctggccaatgggaacaggaatagcccggggctttctagctgctatggactctgcctggatggtccgaagttggtctctaggaacgagccctttggaagtgctggcagagagggaaagtatttacaggttgctgcctcagaccacccctgagaatgtgagtaagaacttcagccagtacagtatcgaccctgtcactcggtatcccaatatcaacgtcaacttcctccggccaagccaggtgcgccatttatatgatactggcgaaacaaaagatattcacctggaaatggagagcctggtgaattcccgaaccacccccaaattgactcgcaatgagtctgtagctcgttcaagcaaactgctgggttggtgccagaggcagacagatggctatgcaggggtaaacgtgacagatctcaccatgtcctggaaaagtggcttggccctttgtgcaattatccatagataccgccctgacctgatagattttgattctttggatgagcaaaatgtggagaagaataaccaactggcctttgacattgctgagaaggaattgggcatttctcccatcatgacaggcaaagaaatggcctccgtgggggagcctgataagctgtccatggtgatgtacctgactcagttctacgagatgtttaaggactccctcccctctagcgacaccttggacctaaatgccgaggagaaagcagtcctgatagccagcaccagatcccctatctccttcctaagcaaacttggccagaccatctctcggaagcgttctcccaaggataaaaaggaaaaggacttggatggtgctgggaagaggagaaagaccagtcaatcagaggaggaggaagctcctcggggccacagaggagaaagaccgaccctggtgagcactctgacagacaggaggatggacgttgccgttgggaaccagaacaaagtgaagtacatggcgacccagctgctggccaaatttgaagagaatgcgcccgcacagtccatcggcatacggagacagggctccatgaagaaggagttcccgcagaacctgggaggcagcgacacatgctacttctgccagaagcgggtctacgtgatggagaggctgagtgccgagggcaagttcttccaccggagctgcttcaagtgcgagtactgcgccaccaccctgcgcctctcggcctacgcctacgacatcgaggatggtaaattctactgtaagccacactactgctatcgactctctggctacgcacaaaggaagagaccggcagtggctcccctgtctggaaaggaggccaaaggacccctgcaggatggcgccaccacagatgcaaacggacgggccaacgccgtggccagctccactgagagaaccccaggttcaggcgtgaacggcctggaggagcccagcatcgccaagcgactgaggggcaccccagagcggatcgagctggagaactaccgcctgtccctgaggcaggctgaggcactgcaggaggtaccggaggagactcaggccgagcacaacctgagcagcgtgctggacacgggcgccgaggaggacgtcgccagcagtagttccgagtctgagatggaggaggagggagaggaggaggaggaggagcctcgcctgcccccatctgacctgggtggtgttccgtggaaggaggccgtgcggatccatgcccttctgaaagggaaaagtgaagaggagctagaggcctcaaagagctttgggcctgggaatgaagaggaggaggaggaggaggaagaatatgaagaggaggaggaggaggactatgacgaggaggaggaagagtccagtgaagccgggaaccagaggctccagcaggtcatgcacgcggcggatcctctggagatccaggctgacgtgcactggactcatatccgtgagagagaggaggaagagaggatggcgccggcctctgagtcctctgcttccggagccccattggatgagaatgacctagaggaagatgtggactcagaaccagccgagatagaaggggaggcagcagaggatggggacccaggggacactggtgctgagctggatgatgatcagcactggtctgacagcccgtcggatgctgacagagagctgcgtttgccgtgcccagctgagggggaagcagagctggagctgagggtgtcggaagatgaggagaagctgcccgcctcaccgaagcaccaagagagaggtccctcccaagccaccagccccatccggtctccccaggaatcagctcttctgttcattccagtccacagcccctcaacagaggggccccaactcccacctgtccctgccgccacccaggagaaatcacctgaggagcgccttttccctgagcctttgctccccaaagagaagcccaaagctgatgccccctcggatctgaaagctgtgcactctcccatccgatcacagccagtgaccctgccagaagctaggactcctgtctcaccagggagcccgcagccccagccacccgtggcggcctccacgcccccacccagcccactccccatctgctcccagccccagccttccaccgaggccactgtcccatcccctacccagtcccccatacgcttccagcctgccccggccaaaacatccaccccactggcccctctccctgtccaaagccaaagtgacaccaaggacagactgggcagcccccttgctgtggatgaggccctcagacggagcgacctggtggaggagttctggatgaagagtgcggagatccgccgcagcctcgggctcacacctgtggaccgcagcaaggggcccgagcccagcttccccacgcctgccttcaggccagtgtccctcaaatcctattccgttgaaaagtccccccaggatgagggactccaccttctcaagcctctgtccatccccaaaaggctgggcctgccaaagccggaaggcgagccgttgtccctgccaaccccccggtccccgtccgacagagagctacgcagcgcccaggaggagcgcagggagctgtccagcagctctggcctgggcctgcacgggagctcctccaacatgaagacactgggcagccagagcttcaacacctcggactccgccatgctcacgcccccctccagcccgcccccaccgccacccccgggcgaggagcccgccaccttgcggaggaagctcagggaggccgagcccaatgcctcggtggtcccgccgcccttgcccgccacctggatgcggcccccccgggagcctgctcagccccccagagaggaggtgcggaagtcgtttgtggagagcgtggaggagattccctttgctgatgatgtggaggacacctatgacgacaagactgaggactcaagcctgcaggagaaattcttcacgcccccgtcctgctggccgcgccccgagaagcctcgccacccgcccctggccaaggagaacgggaggctgcctgctctggaggggacgctgcagccacagaagagggggctgcccttggtgtccgcggaagccaaggagttggccgaggagcgcatgcgagccagggagaagtccgtgaagagccaggcgctgcgggacgccatggccaggcagctgagcaggatgcagcagatggagctggcctcaggcgcccccaggccccgcaaggcgtcctcagcaccctcccagggcaaggagcgccggcctgactcccccacacgccccactctcaggggctccgaggagcccaccctgaagcatgaagccaccagcgaggaggtcctctccccgccgtcggactcagggggcccagatggctctttcacttcatccgagggctccagtgggaagagcaagaagaggtcgtcactcttctccccccgcagaaacaagaaggagaagaagtccaaaggcgagggccggcccccggagaagcccagctccaacctcctagaagaagccgccgccaaacccaagtccctgtggaagtccgtcttctccgggtacaagaaggacaagaagaagaaggccgacgacaagtcctgccccagcaccccctccagcggggccacggtggactctggaaagcacagggtgcttcccgtcgtaagggcagagctgcagctccggcgccagctgagcttctccgaggactcagacctctccagcgacgatgtccttgagaagtcctcacagaagtcccggcgagagccaagaacctacacggaggaggaactgaatgccaagctgacccggcgtgtgcaaaaggcagctcggagacaggccaagcaggaggagcttaagcggctgcatcgagcccagatcatccagcggcagctgcagcaggtggaggagaggcagcggcggctggaggaaaggggcgtggctgtggagaaggcgctccggggcgaagcaggcatgggcaagaaggacgaccccaagctgatgcaggagtggttcaagctagtgcaggagaagaacgccatggtgcgctacgagtcggagctgatgatctttgcccgggagctggagctggaagaccggcagagtcgactgcagcaggagctccgggaacgcatggcagtggaagatcaccttaagactgaggaggagctgtcagaagagaagcagattctcaatgagatgctggaggtggtggagcagagagactcactggtggcgctgctggaggagcagcggctccgggagagagaggaggacaaggacctggaggctgccatgctgtccaagggcttcagccttaactggtcctgagctcccacccaacgctccattttctgttggcatccgcctggccaggcagtggcatccaaaccacccggagccgcgatctgaggaggcctggcacctccttggagtttacgctcagatgcccgtgtgctgcttggaaagtggtcgagtcccgcgtgcagtggggagccccaggtgacagtggttatctgagacggctccacctcctgggaggaggcccacctggacctcccactcagaggagcagcacggcgtgtatggcatgacgcaggggaccaccccgcgcgctccctgaggatgtgctggctgtgccccttttttccactggcacatttggtaagagagggaagctgctccccgtcagaaccacagtgcgccgtgcgaggggcactgtcttcttcatgctccctggagcaccaccaaagaaacgtaaacaataccccacgaaagcagggtcaggggtcagggtgcgatcgagacccaggatgggggcgtccagtcatgcccaccccagcatcacaggagacatggaggtgcgggcaggctcctgaattattatgcaaattaggaggacgcaggaggggtctgccctccagccgaacaccacacactggaccctaagtggccaaatgcctgggccgcttgctggctgtggcctgaggcttgtgggttgctgcattttgcttgtagttcacaaccattttgacactggaaaatgctgactttgggggacaggatgaggccctacattctaagcccccagttggcagacaggcattgtccctgttccacatttatgtcgggacaggagatgaccttttcctccgtgtttttcctgtgtttgcacgttgaaatgaagctgacaacctggcaagacgctcagccgcttcaaaccctttttgtcaattaacttattttttaatacttgaaaagaagtaacttcgtttgtgtatctttactagaggaactgatcacctgcgcccgggtgcgggagccacagcggcatctggtgcgtcctacgcgacctggtccggggctgcccggtgctcctcacgtgcatctatttattagcctttctcttcgtatcactggcctggctggcatcagggagctgcccagaacccctgtgtgggtcctcctcacagctttctgtcccctcctccacccggtgcctgcctcaccctggcgctagaccatctggaccactcatgtgatgagggtgcatttccgttctgttttgggccaggccaacagcagagctgccactctcaccctcccagtgagaattccggctctgcagaactcgcccttgtctcagtttgggggccagggcatcaccttcctccgcacatatgttaaagaaggtttcaggatgggccctcatccacacaggccaagagggtgcaaggtgggaccctggaatcatgtggctggtgagaattccctcctcccagcctaagattcacccagacggaaacgcgagtgctgcagtggatgctgggatgcaggctggtgcctctcaagcagatcagcgactcccgcccttccttccgaaggcgacgggcacctgccttgtgccggatcttcatggggacataaagggcgagccccgaatcactagctcctatagccaaactgttcctttctcacggttccgcaccagcctggctgtgtacagctcatcaagccactgagctaatcggggtggggtgcttgtccatcaaagcagtcagcacatagcccagcgaggagccatccggaccagacccgcctgccaggggcgctccagccgcctgccgcctccgtgggctggggccagctgggagcagaggcctggcccctccaaggcgtcccgcagtggagcaggctgagtggctgtgctgaccttgggctttccatgggaaccacactgtgcttcaacttgaacattcatcccagctgcaaaggagcaaagaacctgtgtcatccttgtctgtccagaagctgccatctctctcccatgcacatccgggagataacgccgctagtggccgccacagcgctgattctccacctgttctcacgtgaggcaaaggtctccttttcttttctctttacttaaaaaaggggagaggagggtttctagattccatcttcaaaccccagtcgtcccataaaattggacgtgggaaaagaccttcactgcctgcgtggcctttcccagacctctcctcgaatgccacaaaaccggtccagccccggcagagccgccttcggcccttgtagctcctgctggccccacaacagggaaacagtttgcaaagtggcttggaaggagtgtggcctagggatctgctgtaagtggccagacgtagcaggagagcccagtgtcaccttctggtcctggtcagccttaacactgtggcatcctccacagcacacacggcagcctgcagtctggaaggtggacccgagcctttgcagagaggcgccgcagagccgcaggcctgcgccccagccttctgctcccgactgtgaggacacccagttctagtagagcactttttttaaagctcccattttgtaaccactagtttgcggttgacttgagtactctggtgacttcctgcgtcaagcgttctcaagctgtgagaatgtgcgcagctccaggcaggttttctctcggagagttaagtcttcccttgaaggcagggaagcaggatggatacacatatatcacacgcataaaacaccaggtgcgggagcagcccagactcaaggctgactaaactggaggctgaataccgtggaggtccacatgcagcttccctggagggcaggccggaggcgctcccgcccctgggcttgaggatgctgcaccccgtgggcttccaggcctgcccagatgatgccttcaggcctctgtccctggcggccatcctcaggccgattttgaccagcaatgatagactcttcttaaccctttcaaaataaatttttcagtgggacagaaaggagagttaaaaaacatttttttaaaggtggtaacatctgacccacaaagggaatgggtctgttttatgcaaaataaaagtttttcaaataaa

SEQ ID NO: 153837 - DNA, 5113 bp, Homo sapiens
  Payload ID: 10244
  Gene Symbol: MICAL3
  Gene Name: microtubule associated monooxygenase, calponin and LIM domain containing 3
  ENST ID: ENST00000495076
  CDS Start-End: 184-1191
gcttctccggctgctacctaccgcgccggacgctcgggctgcggaacagggcggcactggcccgccacagcgacgccggcgccgagggacaccgcagtatgaggcagagattaacgtgacagtgtcaggtggacccacagccatcccacctccccctctggggagtgctgagagtgaggcagcatggaggagaggaagcatgagaccatgaacccagctcatgtcctctttgaccggtttgtccaggccaccacctgcaagggaaccctcaaggctttccaggagctctgtgaccacctggaactaaagccaaaggactaccgctccttctatcacaagctcaagtccaagcttaactactggaaagccaaagccctctgggcaaaattggacaaacggggcagtcacaaagactacaaaaagggaaaagcgtgcactaacaccaagtgtctcatcattggggctggcccctgtggtctccgtacagccatcgacttatccttactgggggccaaggtggttgttattgagaaacgagatgccttctcccgcaacaacgtcttgcatctctggccattcaccatacatgatctacgaggtctgggtgccaagaagttctatggcaagttctgtgctggagccatcgaccatatcagtatccgtcagctccaactaatacttttgaaagtagccttgatcctaggcattgaaatccacgtcaatgtggaattccaaggacttatacagcctcctgaggaccaagagaatgaacggataggctggcgggcactggtgcaccccaagactcatcctgtgtcagagtatgaatttgaagtgatcatcggtggggatggtcggaggaacaccttggaagggtttcgtcggaaagaattccgtggcaaactggccatcgccatcacggcaaattttatcaaccgaaatacaacagcagaagctaaagtggaagagatcagtggtgtggcttttatattcaaccaaaaatttttccaggaactgagggaagccacaggactacgccgacacagagctcctgctttcccgagaaaacgtggaccaggaggctctgctcagctatgccagggaggcggcagacttctctacccagcagcagctgccgtctctggattttgccatcaatcactatgggcagcccgatgtggccatgtttgacttcacttgtatgtatgcctccgagaacgccgccttggtgcgggagcagaacggacaccagttactagtggctctggtcggggacagcctcctagagcctttctggccaatgggaacaggaatagcccggggctttctagctgctatggactctgcctggatggtccgaagttggtctctaggaacgagccctttggaagtgctggcagagagggaaagtatttacaggttgctgcctcagaccacccctgagaatgtgagtaagaacttcagccagtacagtatcgaccctgtcactcggtatcccaatatcaacgtcaacttcctccggccaagccaggtgcgccatttatatgatactggcgaaacaaaagatattcacctggaaatggagagcctggtgaattcccgaaccacccccaaattgactcgcaatgagtctgtagctcgttcaagcaaactgctgggttggtgccagaggcagacagatggctatgcaggggtaaacgtgacagatctcaccatgtcctggaaaagtggcttggccctttgtgcaattatccatagataccgccctgacctgatagattttgattctttggatgagcaaaatgtggagaagaataaccaactggcctttgacattgctgagaaggaattgggcatttctcccatcatgacaggcaaagaaatggcctccgtgggggagcctgataagctgtccatggtgatgtacctgactcagttctacgagatgtttaaggactccctcccctctagcgacaccttggacctaaatgccgaggagaaagcagtcctgatagccagcaccagatcccctatctccttcctaagcaaacttggccagaccatctctcggaagcgttctcccaaggataaaaaggaaaaggacttggatggtgctgggaagaggagaaagaccagtcaatcagaggaggaggaagctcctcggggccacagaggagaaagaccgaccctggtgagcactctgacagacaggaggatggacgttgccgttgggaaccagaacaaagtgaagtacatggcgacccagctgctggccaaatttgaagagaatgcgcccgcacagtccatcggcatacggagacagggctccatgaagaaggagttcccgcagaacctgggaggcagcgacacatgctacttctgccagaagcgggtctacgtgatggagaggctgagtgccgagggcaagttcttccaccggagctgcttcaagtgcgagtactgcgccaccaccctgcgcctctcggcctacgcctacgacatcgaggatggtaaattctactgtaagccacactactgctatcgactctctggctacgcacaaaggaagagaccggcagtggctcccctgtctggaaaggaggccaaaggacccctgcaggatggcgccaccacagatgcaaacggacgggccaacgccgtggccagctccactgagagaaccccaggttcaggcgtgaacggcctggaggagcccagcatcgccaagcgactgaggggcaccccagagcggatcgagctggagaactaccgcctgtccctgaggcaggctgaggcactgcaggaggtaccggaggagactcaggccgagcacaacctgagcagcgtgctggacacgggcgccgaggaggacgtcgccagcaggtcagcacgcagggctgcagggcgcccacccgccacacggccctaagagcctcctcacctctgtgtgtctcggtttcttctcagtgaagggaggcctcctgtctttcctgctgcccgcagtccattctccccagtcccttttaggttcttagcctcatcttctagtcagtgaggactcctccatcagactcaattcagagattcaggaagtatttattccttgaggacctgacatgtccccagctccaagtctgtcattgggaaggaaagtggcaggctctgcccccgggttattcacagattcagcagagggaaggacgggcacacggggagggactctgggtgattcagccaccagtgcaccgggccgtcttgagggaggcctagtccgtcccccaggcatctttttttctcctgtaggtaaagaaagggactgaaaatgtgtgccccaggggccgcatgcagcaccagtggatgcatgcttaggcagttccagagctgtaatcacatccagctgggtgacacctttggggatgtgcatgctataaccctaggactccctatatccactgccctgcaccccagggcttccagtatcagcgaaggcttcaaagtgttcagccgattacagatgatcaagagagccaagaatcaaaagggggtccggtgtcctgtggggcttcaggacagaaacacaggctgcaaacccgaggggcagaggcctcaagtggccttggagagcatttgaatcacacaccttgatttagccatgatgaagggaacatgtggggataaggagagcagagcagtttttttaaggtccaagaacgctttccagaaggtgtttgctgggccgagctgctttcagctgcacccgccacctcagccctcatgtcagacaccctctgcctagattcattcttgggctgcctcacagaccgctcctccgtgcatgccgggggcagcctctgccttggtgtctgcagttccaaagctgtcactgatggtgcatcctcatccagaactctgcttccctatccagagcacccatggaggccccactctccccactgtgcccagatgagggggagcccactctctctctccactgaccctgcagtgagggtgagagatgctgtgtgtcaaaacacatttataaacccttgagcagagctactggcttgaccttgggctgagtgtgggtcagcaccattttctccactgtaatttataaattgtgagaggcagtggggcagcaagttcatgtaatgtagcaaggacattccaggaaggctaacccctggcatttatggcaggtatgacaggagggcagcacagaaaacatgaaatcagtcagcatctatgcaatgcaatacatgcctcatcttactcagattgaagttaaaaaaagattttaaaactagcattcatgctgggcgcagtggctcatgcctgtaatcccagcactttgggaggccaaggtgggcacatcacttaaggtcaggagttcaagaccagcctggccaacataatgaaaccctgtctctactaaaaatacaaaaattagctgggcatggtggtgcacacctgtaatcccagctacttgggagggtaaggcatgagaattgcttgaacctgggaggcggaggttgcagcgagccgagatcatgccactgcaccactgcactccagcctgtgtgacagaatgagactccatctcaaaaaaaattaaaattaaaatcaaaaaataaaataaaggccaggcacggtggctcacacaggagaatcacttgaacctgggaggcggaggttgcagtgatctgagatcacaccagtacactccagcctgggagatggtgagactccgtctcaaaaaaaaaaaaaaaaaaaaaaagataattaaaagtagcattcagtgctatacagaatgaaaaacagtctcttaaaagtgaagagccgggtgcggtggctcacgcctgtaatcccaacgctttgggaggctgaggtgggcggatcacttgaggccaaaagttcgagaccagcctggccaacatggtgaaaccccatctttactaaaaatacaaaaaattagccgggcatggtggcggtcgcctgtaatcccagttactcgggaggctgaggcaggagaatcactggaacccagaaggcagaggttgcagtgagccaagatcgtgccatcaaactccagcctaggcaacaagagcgaaac

SEQ ID NO: 153838 - DNA, 3323 bp, Homo sapiens
  Payload ID: 10244
  Gene Symbol: MICAL3
  Gene Name: microtubule associated monooxygenase, calponin and LIM domain containing 3
  Uniprot ID: Q7RTP6
  ENST ID: ENST00000585038
  CDS Start-End: 63-3284
gtgtcaggtggacccacagccatcccacctccccctctggggagtgctgagagtgaggcagcatggaggagaggaagcatgagaccatgaacccagctcatgtcctctttgaccggtttgtccaggccaccacctgcaagggaaccctcaaggctttccaggagctctgtgaccacctggaactaaagccaaaggactaccgctccttctatcacaagctcaagtccaagcttaactactggaaagccaaagccctctgggcaaaattggacaaacggggcagtcacaaagactacaaaaagggaaaagcgtgcactaacaccaagtgtctcatcattggggctggcccctgtggtctccgtacagccatcgacttatccttactgggggccaaggtggttgttattgagaaacgagatgccttctcccgcaacaacgtcttgcatctctggccattcaccatacatgatctacgaggtctgggtgccaagaagttctatggcaagttctgtgctggagccatcgaccatatcagtatccgtcagctccaactaatacttttgaaagtagccttgatcctaggcattgaaatccacgtcaatgtggaattccaaggacttatacagcctcctgaggaccaagagaatgaacggataggctggcgggcactggtgcaccccaagactcatcctgtgtcagagtatgaatttgaagtgatcatcggtggggatggtcggaggaacaccttggaagggtttcgtcggaaagaattccgtggcaaactggccatcgccatcacggcaaattttatcaaccgaaatacaacagcagaagctaaagtggaagagatcagtggtgtggcttttatattcaaccaaaaatttttccaggaactgagggaagccacaggtattgacttggagaacatcgtttactacaaagatgacacacactatttcgttatgacagccaaaaagcagagtttgctggacaaaggagtgatactacatgactacgccgacacagagctcctgctttcccgagaaaacgtggaccaggaggctctgctcagctatgccagggaggcggcagacttctctacccagcagcagctgccgtctctggattttgccatcaatcactatgggcagcccgatgtggccatgtttgacttcacttgtatgtatgcctccgagaacgccgccttggtgcgggagcagaacggacaccagttactagtggctctggtcggggacagcctcctagagcctttctggccaatgggaacaggaatagcccggggctttctagctgctatggactctgcctggatggtccgaagttggtctctaggaacgagccctttggaagtgctggcagagagggaaagtatttacaggttgctgcctcagaccacccctgagaatgtgagtaagaacttcagccagtacagtatcgaccctgtcactcggtatcccaatatcaacgtcaacttcctccggccaagccaggtgcgccatttatatgatactggcgaaacaaaagatattcacctggaaatggagagcctggtgaattcccgaaccacccccaaattgactcgcaatgagtctgtagctcgttcaagcaaactgctgggttggtgccagaggcagacagatggctatgcaggggtaaacgtgacagatctcaccatgtcctggaaaagtggcttggccctttgtgcaattatccatagataccgccctgacctgatagattttgattctttggatgagcaaaatgtggagaagaataaccaactggcctttgacattgctgagaaggaattgggcatttctcccatcatgacaggcaaagaaatggcctccgtgggggagcctgataagctgtccatggtgatgtacctgactcagttctacgagatgtttaaggactccctcccctctagcgacaccttggacctaaatgccgaggagaaagcagtcctgatagccagcaccagatcccctatctccttcctaagcaaacttggccagaccatctctcggaagcgttctcccaaggataaaaaggaaaaggacttggatggtgctgggaagaggagaaagaccagtcaatcagaggaggaggaagctcctcggggccacagaggagaaagaccgaccctggtgagcactctgacagacaggaggatggacgttgccgttgggaaccagaacaaagtgaagtacatggcgacccagctgctggccaaatttgaagagaatgcgcccgcacagtccatcggcatacggagacagcaacgggaaaaggagtgttctcggacctgccccaaaaaagtgatcaccctgtctcctccccctactccacctccctgtcgggcacatggcggccagcagacatacagggatcttgatgctgacaaccgtggcaagcagagcccccaccatgagaggccagagcctgaacctcctcgtcgattttttgtcgaccagtgggagctttctcttagtctccgctcctctgcccgccccgcctctccctcctccgactccctccgacagaagtatataaagatgtacacgggcggagtgagctcattggctgagcagatagccaatcagcttcaaaggaaagaacaacccaaagcccttctagacaagaaggaactgggctccatgaagaaggagttcccgcagaacctgggaggcagcgacacatgctacttctgccagaagcgggtctacgtgatggagaggctgagtgccgagggcaagttcttccaccggagctgcttcaagtgcgagtactgcgccaccaccctgcgcctctcggcctacgcctacgacatcgaggatggtaaattctactgtaagccacactactgctatcgactctctggctacgcacaaaggaagagaccggcagtggctcccctgtctggaaaggaggccaaaggacccctgcaggatggcgccaccacagatgcaaacggacgggccaacgccgtggccagctccactgagagaaccccaggtagcctcacttccttgtttggctgggtggcgcgtcactccctcggcctctgtgacaaggccaagggcatgagccagcacctccaaagcaacatttcttcattcgggcaacaagtggcccaaaaccctctggactcctttttcatgtgccagctgcttgcgttcggagtcccctttctctatggcctgtcggaggtgctggtgcaaatcagaggggagttccactggcaggctgtggcccagtgatggggccgtccggtgggcggcagagccgtgaagtgctgt

SEQ ID NO: 153839 - DNA, 519 bp, Homo sapiens
  Payload ID: 10244
  Gene Symbol: MICAL3
  Gene Name: microtubule associated monooxygenase, calponin and LIM domain containing 3
  ENST ID: ENST00000579997
  CDS Start-End: 1-519
gggtacaagaaggacaagaagaagaaggccgacgacaagtcctgccccagcaccccctccagcggggccacggtggactctggaaagcacagggtgcttcccgtcgtaagggcagagctgcagctccggcgccagctgagcttctccgaggactcagacctctccagcgacgatgtccttgagaagtcctcacagaagtcccggcgagagccaagaacctacacggaggaggaactgaatgccaagctgacccggcgtgtgcaaaaggcagctcggagacaggccaagcaggaggagcttaagcggctgcatcgagcccagatcatccagcggcagctgcagcaggtggaggagaggcagcggcggctggaggaaaggggcgtggctgtggagaaggcgctccggggcgaagcagttgagcccagtggcgggactccacgacgtagacctctctccttctgcccttgctgtgtccaggaaggcatgggcaagaaggacgaccccaagctgatgcaggag

SEQ ID NO: 153840 - DNA, 5981 bp, Homo sapiens
  Payload ID: 10244
  Gene Symbol: MICAL3
  Gene Name: microtubule associated monooxygenase, calponin and LIM domain containing 3
  ENST ID: ENST00000461307
  CDS Start-End: 1-1490
gccaggtgcgccatttatatgatactggcgaaacaaaagatattcacctggaaatggagagcctggtgaattcccgaaccacccccaaattgactcgcaatgagtctgtagctcgttcaagcaaactgctgggttggtgccagaggcagacagatggctatgcaggggtaaacgtgacagatctcaccatgtcctggaaaagtggcttggccctttgtgcaattatccatagataccgccctgacctgatagattttgattctttggatgagcaaaatgtggagaagaataaccaactggcctttgacattgctgagaaggaattgggcatttctcccatcatgacaggcaaagaaatggcctccgtgggggagcctgataagctgtccatggtgatgtacctgactcagttctacgagatgtttaaggactccctcccctctagcgacaccttggacctaaatgccgaggagaaagcagtcctgatagccagcaccagatcccctatctccttcctaagcaaacttggccagaccatctctcggaagcgttctcccaaggataaaaaggaaaaggacttggatggtgctgggaagaggagaaagaccagtcaatcagaggaggaggaagctcctcggggccacagaggagaaagaccgaccctggtgagcactctgacagacaggaggatggacgttgccgttgggaaccagaacaaagtgaagtacatggcgacccagctgctggccaaatttgaagagaatgcgcccgcacagtccatcggcatacggagacagctgacacaagagcgtggggccagccagccgtcctgctgcctgcctgggcaggttcgccctgcccccaccccccggtggaaacagggctccatgaagaaggagttcccgcagaacctgggaggcagcgacacatgctacttctgccagaagcgggtctacgtgatggagaggctgagtgccgagggcaagttcttccaccggagctgcttcaagtgcgagtactgcgccaccaccctgcgcctctcggcctacgcctacgacatcgaggatggtaaattctactgtaagccacactactgctatcgactctctggctacgcacaaaggaagagaccggcagtggctcccctgtctggaaaggaggccaaaggacccctgcaggatggcgccaccacagatgcaaacggacgggccaacgccgtggccagctccactgagagaaccccaggtagcctcacttccttgtttggctgggtggcgcgtcactccctcggcctctgtgacaaggccaagggcatgagccagcacctccaaagcaacatttcttcattcgggcaacaagtggcccaaaaccctctggactcctttttcatgtgccagctgcttgcgttcggagtcccctttctctatggcctgtcggaggtgctggtgcaaatcagaggggagttccactggcaggctgtggcccagtgatggggccgtccggtgggcggcagagccgtgaagtgctgtccctcagccccgtcccgcaccatcacacctgagggcggcccaggtcctgtgtaggtagacaggagctcgcaggcgctcagacactgctcccatcacccgccctggtgaggccaaggccactcggccttcatgcagtttgcttccaagctcctctgacggcctggagctgtgttgattaagccccgtggtcttgttttgggttcaccttcacttaagattctgcgtcctgttccctgtcactgtgtgtggatgagctgtggctgctctcctgtctgccctgcaccgtgatgggacatgccctgtcctgaccccttggccactgggcttgtcatgaggtccaagccctcacctgtcccactttcatgaccacttccttgtgttgggaggtgaacagtaccatctctacctctacaaacacatttattcttgtcatagcatgacaggactcgcagggtttgtgggtaccaggcctgttgggaagaattatgtagattttccttaaaatggcctctctcagcaacttgtaaaacttgcctgtgagatgcgtccagagctccacaaactgctgggtgttctgaatgtcccacatacagctccaggtggttcacggcccagggtcactgtggcaagagggggccagcagggctgtgtttctgtctgtcacactttcctcttgttcaaaacacatgtatctcaagcagctatatacaaaactcataaaaattaaagatggtcagccagtgccaggaaatgtggaggaggagttggtcatagaatttccatggtgggacaagagaattacccatttggccttcaacgagaggttcccagagttgcatcctttcccttccctaacagctggttcatgtaggccttgtggtgctcattctgggagagggaagatgcgcccagaggctaggcggtgtgccctgggagccatgagaacccagccaagccaggtgaacgcagcttctgctactgcacgtgcccttattatcatctgagcaagttttttaagtaccctgcaggtgggaccaacattttatagccatgtttcaaccattaatgacttttaaaccttctacaatcttgaagatctttataatccatctttctcgtgaagtacccacaggcctttgcagctgacactctcagagcatgggcagaatcactggtagagaaaaataaccaaaggggtctagacagagactttggctttatgctatagaatgtacattcagttggagagagcaccaccttattagtctgggccctatttcatcagagatggattttctgaggaacctgactactcagtagaacaactcaaaagaaactaaactttccatttcggtttggagtacagaacattttttaaaaagaattaaacacagtgaagtttaggttattcctgaatgacgccaggtttgctgactttcccatctggtcgaggttgccattcttgccatctaattgaaagtataatgggtttcaggtttttaggagttctaaagaattacgctttccatagagaataagaggaagaatgttctacatagtggggagagaggatgagggttggcagtgtggttaaagagcaaaaccaccaagaaagagtcagagccctgaggacgtctctgtccgcgtggttcttgattctgagccagaaggtgacttggtatagcacgggagttcaaaatgtggtgtcccaaaggaatcacagtgtggacctttacagttaatgacaggcactgtcccccagcttgggtggcaaaggccagtgagctcagggctgaggggcttaccctccggcagctcagagtccagaacatcttagtccggcagctcagaatcagggcaccttgcctcccggtgagctcactctgctgctagccttggtagaaaaggaacaggattatgggcagtattttatggctggcatgaaatagatacccttttctcctttgatagagatttccttctttaaatatgaaactgaagctttgaggacttaactagacttccttttgaaaagtttcagaaaagctcaggtgtggccaggcacgatggctcatgcctgtaatcccagcactttgggaggccgaggcgggcagatcacgaggtcaggagatcgagaccatcctggctaacacagtgaaaccccgtctctactaaaaatacaaaaaaattagccgggtgtggtgtggtggcggatgcctgtagtcccagctactcgggaggctgaggcaggagaatggcgtgaacccaggaggcagaggttgcagtaagtcgagatcacaccactgcactccagcctgatgacagagcaagactccatctaaaaaaaaaaaagaagaaaagggaaagctcaggtgtttcagggtcccagaatgtatgttgtagagaacagtcattagctcaggcccatggtaaccgcctctactgtgcactcgaccagtagaggcgatgatgacggcacttgattctcttgtgtgtaactcagccatcctccctagacccacgtcccaggaggcagggctggtaaagctatgactgggcagtgtttgacccagctgtgcttttactctgtgcctcctctttatattgtggcatttctctcttctcctttatgttctttttctttttatgccaaaattcttgctgttgccaaaacaaaaacaaaaaaacacacccacacccaattacaacctgcagttcaaagaaccactctaggtcggctttaaagtattgtctttctctggtaaccaaatctgtacctgctgcctaatttagtgtttgggggcattgtttacagtatttctgtttgtaatgtgcttttaatatagaaatcctcttttttgttcttaaatctatgaatgctgtgtttccaagcttatacttactactgcgtgttagtggtcctggcacagattttcttaccctggccttgtactgtccaccatgactttagaaaaagcttgaacaataggcagagaaaggaaatccccaaaagggattattttccccttggacatgagaagtttagttacaggtttcttgaattcgtttttgtccagaggaatcctctttttatctgatacggttgatgaccaaaaatgaagtagggaagccgaaggcatagccggaaaggaacagaagagctttttccccgagtgctcatcaccgggttcattaccggccagagatggacggggagaagcacgttagtttcctgtcatcttatggaaaagatgatctgaagttaaaaaatgaaggtcacaagtggcagttgcctgacccctgtccccagacattccttgcccgataaccatgaggttccatagttcggatcctgaatgggcctttaggaaatgcaggcctttcccacaccagctagaagggtagccaggcagtagaatttcattcaaccctagggttcccacctgacagagggaagttcggaagtcttactgcttcccacgtccccttcccttctaggcatttatggaaagctttttagtggagcaagagaattctacaatccagcttacctcccaccttaccccaagagccatagctgacggtgatgtgtgaatgtttatatataggtacacgtttgtatgtatatagatctaattgcacatatatgggtagatatttatttatatgttgcaccctaaattatagtaattataataattgtgaagctgtttctaaagctgcttgttcctggttctgagaaccacgggagcctcacactggggagccgtactccaggtcagggctttggggatgcacagcagcgtacgggcagcacgcctgtaaggaggtgagtgggtgggtgtctcagaaaatgggcagcacacccccaagaaagggccccaagagcagactaggaacgcagggggctgctgctgccaggacaccacggagagccgggcacccgcctcacatgtctcctgtctggctccactgagttagccgtttgagcccactcctatcttttggtggttagtgcatcttcagctcttttctgcaagacactggaacattcctaggctgtcccaaaaggagttccaccatagcctttaaggtccgagcagggcaccaaggggttcacttttctcccgagccattcagcttggggtgcctgcgggaggggcggacagccagccggcttcccggcggcggtacgagagcccaacaggagaggattagctgtgccaaggaacacgccactgctgcctgtctactgcccgccttctctccacttccatttttgcctttgtttttaacttgtgctcttgtgagttcttggtgtgtttctttgtgagtttttatttaattgtgtaactttgtttttgccgttgactgtgaaaccaagttgtcgtgcttttaattttttttttaacaaatgttacattcttatttaagagaataaattccaaacaa

SEQ ID NO: 153841 - DNA, 436 bp, Homo sapiens
  Payload ID: 10244
  Gene Symbol: MICAL3
  Gene Name: microtubule associated monooxygenase, calponin and LIM domain containing 3
  ENST ID: ENST00000584751
  CDS Start-End: 1-418
gcaggaggagcttaagcggctgcatcgagcccagatcatccagcggcagctgcagcaggtggaggagaggcagcggcggctggaggaaaggggcgtggctgtggagaaggcgctccggggcgaagcagactattggggagagtcttattacagtgacctcatcgacttgcatctgggtggtatgtatggcagcgcctgtgctgacactaaccccgctgacgccctttctccacccacgcttcccagtccctgctcacaaaaacaaggagaaatcaacccaataaccaaatggcaaaagcacagacccttttccagctcaaaacagagcagcgtgctgatctccccgctgcccacatgtgctccagaggaagatctgagcttgcttttgctgcctggggtcgtttttaattttttataataaaactttgcccacccg

SEQ ID NO: 153842 - DNA, 569 bp, Homo sapiens
  Payload ID: 10244
  Gene Symbol: MICAL3
  Gene Name: microtubule associated monooxygenase, calponin and LIM domain containing 3
  ENST ID: ENST00000578984
  CDS Start-End: 1-569
ggaggaggaggaggaagaatatgaagaggaggaggaggaggactatgacgaggaggaggaagagtccagtgaagtgcccgaccttccctccatacgccacgcggcggtgcaggcctggctggagacggtctccggagccccattggatgagaatgacctagaggaagatgtggactcagaaccagccgagatagaaggggaggcagcagaggatggggacccaggggacactggtgctgagctggatgatgatcagcactggtctgacagcccgtcggatgctgacagagagctgcgtttgccgtgcccagctgagggggaagcagagctggagctgagggtgtcggaagatgaggagaagctgcccgcctcaccgaagcaccaagagagaggtccctcccaagccaccagccccatccggtctccccaggaatcagctcttctgttcattccagtccacagcccctcaacagaggggccccaactcccacctgtccctgccgccacccaggagaaatcacctgaggagcgccttttccctgagcctttgctccccaaagagaagccca

SEQ ID NO: 153843 - DNA, 807 bp, Homo sapiens
  Payload ID: 10244
  Gene Symbol: MICAL3
  Gene Name: microtubule associated monooxygenase, calponin and LIM domain containing 3
  ENST ID: ENST00000577821
  CDS Start-End: 1-807
cagctccaacctcctagaagaagccgccgccaaacccaagtccctgtggaagtccgtcttctccgggtacaagaaggacaagaagaagaaggccgacgacaagtcctgccccagcaccccctccagcggggccacggtggactctggaaagcacagggtgcttcccgtcgtaagggcagagctgcagctccggcgccagctgagcttctccgaggactcagacctctccagcgacgatgtccttgagaagtcctcacagaagtcccggcgagagtcaatttatgtaccacacgccttggcattcaggagatcatgtgcatcaaagccaagaacctacacggaggaggaactgaatgccaagctgacccggcgtgtgcaaaaggcagctcggagacaggccaagcaggaggagcttaagcggctgcatcgagcccagatcatccagcggcagctgcagcaggtggaggagaggcagcggcggctggaggaaaggggcgtggctgtggagaaggcgctccggggcgaagcagactattggggagagtcttattacagtgacctcatcgacttgcatctgggtggcatgggcaagaaggacgaccccaagctgatgcaggagtggttcaagctagtgcaggagaagaacgccatggtgcgctacgagtcggagctgatgatctttgcccgggagctggagctggaagaccggcagagtcgactgcagcaggagctccgggaacgcatggcagtggaaggtgagtggggtaaggcacccatggaggccagggtgggtgccacctccaggcc

SEQ ID NO: 153844 - DNA, 593 bp, Homo sapiens
  Payload ID: 10244
  Gene Symbol: MICAL3
  Gene Name: microtubule associated monooxygenase, calponin and LIM domain containing 3
  ENST ID: ENST00000498573
  CDS Start-End: 1-593
atgcccttctgaaagggaaaagtgaagaggagctagaggcctcaaagagctttgggcctgggaatgaagaggaggaggaggaggaggaagaatatgaagaggaggaggaggaggactatgacgaggaggaggaagagtccagtgaagccccattggatgagaatgacctagaggaagatgtggactcagaaccagccgagatagaaggggaggcagcagaggatggggacccaggggacactggtgctgagctggatgatgatcagcactggtctgacagcccgtcggatgctgacagagagctgcgtttgccgtgcccagctgagggggaagcagagctggagctgagggtgtcggaagatgaggagaagctgcccgcctcaccgaagcaccaagagagaggtccctcccaagccaccagccccatccggtctccccaggaatcagctcttctgttcattccagtccacagcccctcaacagaggggccccaactcccacctgtccctgccgccacccaggagaaatcacctgaggagcgccttttccctgagcctttgctccccaaagagaagcccaaagctgatgccccc

SEQ ID NO: 153845 - DNA, 4833 bp, Homo sapiens
  Payload ID: 10245
  Gene Symbol: MAST1
  Gene Name: microtubule associated serine/threonine kinase 1
  Uniprot ID: Q9Y2H9
  ENST ID: ENST00000251472
  CDS Start-End: 40-4752
ctgctgccgcacctgccaccatgtcgccgccgccgggtcatgtctgactctctctggaccgcgctttctaatttctcgatgccctccttccccggcggcagtatgttccgccgcaccaagagctgccgcaccagtaatcggaaaagcctcatcctgaccagcacttcacccacgctaccgagaccccactccccgctgccaggtcacctaggcagcagtcccctggacagcccccgaaacttctcccccaacacccccgcccacttctcgtttgcctcctcccgaagggcggacggacgccggtggtctctggcctcgctcccttcatctggctatggcaccaacacgcccagttccaccgtctcgtcctcctgctcctcccaggagcgccttcaccagctgccctaccagcccacggtggacgagctccacttcctctccaaacacttcgggagcaccgagagcatcacagacgaggatggtggccgtcgctccccagccgtgcggccccgctcacggagcctcagccccgggcgctccccctcctcctacgacaacgagatcgtgatgatgaatcacgtctacaaggagaggttcccgaaggccactgcgcagatggaggagaagctgcgcgactttacccgcgcctacgaacccgacagcgttctgcctctggccgatggcgtgctcagcttcatccaccaccagatcatcgagctggcccgggactgcctgaccaagtcccgtgacggcctcatcaccacggtctacttctatgaattgcaggagaacctggagaagctccttcaagacgcctatgaacgctctgagagcttggaggtggccttcgttactcagctggtgaagaagttgcttattatcatctcacgccctgcgaggctgctggagtgcctggaattcaaccccgaggagttctaccacctgctggaggcggccgaaggacacgccaaggagggccaccttgtgaagacggacatcccccgctacatcatccgccagctgggcctcacccgtgacccctttccagatgtggtgcatctggaggaacaggacagtggtggttccaacacccctgagcaagacgatctctctgagggccgcagcagcaaggccaagaaaccgccgggggagaatgacttcgataccatcaagctcataagcaacggtgcctacggcgctgtctacctggtgcggcaccgcgacacgcggcagcgctttgccatgaaaaagatcaacaagcagaacttgatcctccgcaaccagatccagcaggcctttgtggagcgcgatatcctcaccttcgccgagaacccgtttgtggtcggcatgttctgctcctttgagactcggcgccacctctgcatggtcatggaatatgtggaaggcggcgactgtgccaccctgctgaagaatattggagcgctgcccgtagagatggcccgcatgtactttgctgagacggtgctagccctggagtatttgcacaactatggcatcgtgcaccgcgacctcaagcctgacaacctccttatcacctccatgggtcacatcaagctcacagatttcggcctctccaagatggggctcatgagcctcaccaccaacttatatgaaggccacatcgagaaggacgcccgagagttcctggacaaacaggtgtgtgggaccccagagtacatcgcgcccgaggtcatcctgcgtcaaggctacggcaagccagtggactggtgggctatggggatcatcctctacgagttcctggtgggctgtgtgcccttcttcggagacacaccagaggagctatttggacaggtcatcagtgatgacatcctgtggcccgagggggatgaggccctacctacggaggcccaactcctcatatccagcctcctgcagaccaaccctctggtcaggcttggggcaggcggcgcttttgaggtgaagcagcacagtttctttcgagacctggactggacagggctgctgaggcagaaggccgagttcatcccccacctagagtcggaagatgacactagctactttgacacccgctcagacaggtatcaccacgtgaactcctatgacgaggatgacacgacggaggaggagcccgtggaaatccgccagttctcttcctgctctccgcgcttcagcaaggtgtatagcagcatggagcagctgtcgcagcacgagcccaagaccccagtagcagctgcagggagcagcaagcgggagccgagcaccaagggccccgaggagaaggtggccggcaagcgggaggggctgggcggcctgaccctgcgtgagaagacctggagagggggctctccggagatcaagcgattctccgcgtccgaggccagtttcctggagggagaggccagtccccctttgggcgcccgccgccgtttctcggcgctgctggagcccagccgcttcagcgccccccaagaggacgaggatgaggcccggctgcgcaggcctccccggcccagctccgaccccgcgggatccctggatgcacgggcccccaaagaggagactcaaggggaaggcacctccagcgccggggactccgaggccactgaccgtccacgcccaggtgacctctgcccaccctcgaaggatggggatgcatcaggcccaagggctaccaatgacttggttctgcgccgggcgcggcaccagcagatgtcaggggatgtggcagtagagaagaggccttctcgaactgggggcaaagtcatcaaatcagcctcagccactgccttatctgtcatgattcctgcagtggacccacatggaagttcaccccttgctagtcccatgtctccacgatctctgtcctccaacccatcctcacgggactcctcacccagccgggactactcaccagctgtcagtgggctccgctcccccatcaccatccagcgctcgggcaagaagtatggcttcacactgcgtgccatccgtgtctacatgggtgacacggatgtctatagtgtccaccacattgtctggcatgtggaggaaggaggcccagcccaggaggcaggactctgtgctggggacctcatcacccacgtgaatggggagcctgtgcatggcatggtgcatcctgaggtcgtggagctgatccttaagagtggcaacaaggtagcagtgaccacaacgcccttcgaaaatacctctatccgcattggtcccgcaaggcgcagcagctacaaggctaaaatggctcggaggaacaagcgaccctccgccaaggagggccaggagagcaagaagcgcagctccctcttccggaagatcacgaagcagtcgaacctgctgcatactagccgctcgctgtcgtcgctgaaccgctcgctgtcatccagcgatagtctcccgggctcgcctacgcacgggctgccggcgcgctcgcccacgcacagctaccgctccacgcctgactccgcctacctaggcgcctcatcccagagcagctccccagcctcgagcacgcccaactcgcctgcgtcgtcggcgtcgcaccacattcggcccagcacgctgcacggactgtcgccaaagctccatcgccagtaccgctctgcgcgatgcaagtcggccggcaacatccctctatcgccgctggcacacacgccgtcccccacgcaggcgtcaccgccgccactgccgggccacacggtgggcagctcgcacactactcagagcttcccggccaaactgcactcatcgcctcccgtcgtgcgcccgcgccccaagagtgccgagccccctcgctcgccgctcctcaagcgcgtgcagtcggccgagaagctgggagcctctttgagtgcggacaagaagggcgcgctgcgcaaacacagcctcgaggtgggccacccggatttccgcaaggacttccatggcgagctggcgctgcatagccttgccgagtccgacggtgagacgcccccagtcgagggccttggcgcgccccggcaggtcgccgtccgccgcctgggccgacaggagtcacctttgagcctgggcgcggacccgttgctgcccgagggtgcctccaggccaccagtgtcgagcaaggagaaggaatccccggggggcgccgaggcgtgcaccccaccccgcgcgacgacccccggtggccggaccctggagcgggacgtcggctgcacgcggcatcagagcgtgcagacggaggatggcactggcgggatggccagggctgtggccaaggcggcgctgagcccggtgcaggaacacgagacaggccggcgcagcagctctggcgaggcgggcacacccctggtacccattgtcgtagagcctgcgcggcccggggctaaggctgtggtgcctcagcctctgggcgcggactccaaggggttgcaggaacccgcacccctggcgccttccgtgcccgaggccccccggggccgggagcgctgggtgttggaggtggtggaggagcgcaccacgctgagcggtcctcgctccaagcccgcctccccaaagctctccccggagccccagacaccctccctagccccagcgaagtgcagtgcacccagcagtgcagtgaccccagtcccacccgcatccctcttgggctcaggcaccaagcctcaagtggggctgacctcccggtgccctgctgaagctgtgcccccagcaggcctgaccaaaaaaggagtgtccagtcccgcacccccgggaccatagccaagggggtcatcggccccgcgctgtacagcctccgtatacatatgtacacatataaataaagtgcgtccgtgctgcgtg

SEQ ID NO: 153846 - DNA, 398 bp, Homo sapiens
  Payload ID: 10245
  Gene Symbol: MAST1
  Gene Name: microtubule associated serine/threonine kinase 1
  ENST ID: ENST00000590204
  CDS Start-End: 1-398
cccgcgcccctcctccgtccctcccgcaggccactgcgcagatggaggagaagctgcgcgactttacccgcgcctacgaacccgacagcgttctgcctctggccgatggcgtgctcagcttcatccaccaccagatcatcgagctggcccgggactgcctgaccaagtcccgtgacggcctcatcaccacggtctacttctatgaattgcaggagaacctggagaagctccttcaagacgcctatgaacgctctgagagcttggaggtggccttcgttactcagctggtgaagaagttgcttattatcatctcacgccctgcgaggctgctggagtgcctggaattcaaccccgaggagttctaccacctgctggaggcggccgaaggacacgccaag

SEQ ID NO: 153847 - DNA, 1408 bp, Homo sapiens
  Payload ID: 10245
  Gene Symbol: MAST1
  Gene Name: microtubule associated serine/threonine kinase 1
  ENST ID: ENST00000588379
  CDS Start-End: 1-1300
gagaccccactccccgctgccaggtcacctaggcagcagtcccctggacagcccccgaaacttctcccccaacacccccgcccacttctcgtttgcctcctcccgaagggcggacggacgccggtggtctctggcctcgctcccttcatctggctatggcaccaacacgcccagttccaccgtctcgtcctcctgctcctcccaggagcgccttcaccagctgccctaccagcccacggtggacgagctccacttcctctccaaacacttcgggagcaccgagagcatcacagacgaggatggtggccgtcgctccccagccgtgcggccccgctcacggagcctcagccccgggcgctccccctcctcctacgacaacgagatcgtgatgatgaatcacgtctacaaggagaggttcccgaaggccactgcgcagatggaggagaagctgcgcgactttacccgcgcctacgaacccgacagcgttctgcctctggccgatggcgtgctcagcttcatccaccaccagatcatcgagctggcccgggactgcctgaccaagtcccgtgacggcctcatcaccacggtctacttctatgaattgcaggagaacctggagaagctccttcaagacgcctatgaacgctctgagagcttggaggtggccttcgttactcagctggtgaagaagttgcttattatcatctcacgccctgcgaggctgctggagtgcctggaattcaaccccgaggagttctaccacctgctggaggcggccgaaggacacgccaaggagggccaccttgtgaagacggacatcccccgctacatcatccgccagctgggcctcacccgtgacccctttccagatgtggtgcatctggaggaacaggacagtggtggttccaacacccctgagcaagacgatctctctgagggccgcagcagcaaggccaagaaaccgccgggggagaatgacttcgataccatcaagctcataagcaacggtgcctacggcgctgtctacctggtgcggcaccgcgacacgcggcagcgctttgccatgaaaaagatcaacaagcagaacttgatcctccgcaaccagatccagcaggcctttgtggagcgcgatatcctcaccttcgccgagaacccgtttgtggtcggcatgttctgctcctttgagactcggcgccacctctgcatggtcatggaatatgtggaaggtgtggctgcctgcggggctgcagggaagatggggccgtgctcactggtcagggctgcggggtggcctgcctgagccgcagtctccatattgattagtcggcctgtatgtttatccatctatttatttctccagtcattgatttgtccatccattctacctatatatttattcagtcatcta

SEQ ID NO: 153848 - DNA, 1496 bp, Homo sapiens
  Payload ID: 10245
  Gene Symbol: MAST1
  Gene Name: microtubule associated serine/threonine kinase 1
  ENST ID: ENST00000591495
  CDS Start-End: 18-1445
tcgccgccgctgccgccatggacgattcgggcctcatccgccgccggaggctgcagaaggatttgcccctgccccggaaaagcagcagctgccgcaccagtaatcggaaaagcctcatcctgaccagcacttcacccacgctaccgagaccccactccccgctgccaggtcacctaggcagcagtcccctggacagcccccgaaacttctcccccaacacccccgcccacttctcgtttgcctcctcccgaagggcggacggacgccggtggtctctggcctcgctcccttcatctggctatggcaccaacacgcccagttccaccgtctcgtcctcctgctcctcccaggagcgccttcaccagctgccctaccagcccacggtggacgagctccacttcctctccaaacacttcgggagcaccgagagcatcacagacgaggatggtggccgtcgctccccagccgtgcggccccgctcacggagcctcagccccgggcgctccccctcctcctacgacaacgagatcgtgatgatgaatcacgtctacaaggagaggttcccgaaggccactgcgcagatggaggagaagctgcgcgactttacccgcgcctacgaacccgacagcgttctgcctctggccgatggcgtgctcagcttcatccaccaccagatcatcgagctggcccgggactgcctgaccaagtcccgtgacggcctcatcaccacggtctacttctatgaattgcaggagaacctggagaagctccttcaagacgcctatgaacgctctgagagcttggaggtggccttcgttactcagctggtgaagaagttgcttattatcatctcacgccctgcgaggctgctggagtgcctggaattcaaccccgaggagttctaccacctgctggaggcggccgaaggacacgccaaggagggccaccttgtgaagacggacatcccccgctacatcatccgccagctgggcctcacccgtgacccctttccagatgtggtgcatctggaggaacaggacagtggtggttccaacacccctgagcaagacgatctctctgagggccgcagcagcaaggccaagaaaccgccgggggagaatgacttcgataccatcaagctcataagcaacggtgcctacggcgctgtctacctggtgcggcaccgcgacacgcggcagcgctttgccatgaaaaagatcaacaagcagaacttgatcctccgcaaccagatccagcaggcctttgtggagcgcgatatcctcaccttcgccgagaacccgtttgtggtcggcatgttctgctcctttgagactcggcgccacctctgcatggtcatggaatatgtggaaggtgtggctgcctgcggggctgcagggaagatggggccgtgctcactggtcagggctgcggggtggcctgcctgagccgcagtctccatattgattagtcggcctgtatgtttatccatctattta

SEQ ID NO: 153849 - DNA, 5738 bp, Homo sapiens
  Payload ID: 10246
  Gene Symbol: MAST2
  Gene Name: microtubule associated serine/threonine kinase 2
  Uniprot ID: Q6P0Q8
  ENST ID: ENST00000361297
  CDS Start-End: 284-5680
taggcaggcggctgagccggcggcgggtggcctgcccaacgtgtgctgggtgggagaaggcgaggcgtcagcgatgctgtctcttccgtgaggagcgcagaggaggtcgcggcgccggaggccccagaaggctcgaaggcgccgcgggctggggtcggtggcttagggagcccgtccggccatggtggccgcgggtggtggttggcgcggctgcgctgcggcccggggcagtgcggagccgggacagtcgcggcgctgacgcccgcgggccccagctgcagatatgaagcggagccgctgccgcgaccgaccgcagccgccgccgcccgaccgccgggaggatggagttcagcgggcagcggagctgtctcagtctttgccgccgcgccggcgagcgccgcccgggaggcagcggctggaggagcggacgggccccgcggggcccgagggcaaggagcaggatgtagtaactggagttagtcccctgctcttcaggaaactcagtaatcctgacatattttcatccactggaaaagttaaacttcagcgacaactgagtcaggatgattgtaagttatggagaggaaacctggccagctctctatcgggtaagcagctgctccctttgtccagcagtgtacatagcagtgtgggacaggtgacttggcagtcgtcaggagaagcatcaaacctggttcgaatgagaaaccagtcccttggacagtctgcaccttctcttactgctggcctgaaggagttgagccttccaagaagaggcagcttttgtcggacaagtaaccgcaagagcttgattgtgacctctagcacatcacctacactaccacggccacactcaccactccatggccacacaggtaacagtcctttggacagcccccggaatttctctccaaatgcacctgctcacttttcttttgttcctgcccgtaggactgatgggcggcgctggtctttggcctctttgccctcttcaggatatggaactaacactcctagctccactgtctcatcatcatgctcctcacaggaaaagctgcatcagttgcctttccagcctacagctgatgagctgcactttttgacgaagcatttcagcacagagagcgtaccagatgaggaaggacggcagtccccagccatgcggcctcgctcccggagcctcagtcccggacgatccccagtatcctttgacagtgaaataataatgatgaatcatgtttacaaagaaagattcccaaaggccaccgcacaaatggaagagcgactagcagagtttatttcctccaacactccagacagcgtgctgcccttggcagatggagccctgagctttattcatcatcaggtgattgagatggcccgagactgcctggataaatctcggagtggcctcattacatcacaatacttctacgaacttcaagataatttggagaaacttttacaagatgctcatgagcgctcagagagctcagaagtggcttttgtgatgcagctggtgaaaaagctgatgattatcattgcccgcccagcacgtctcctggaatgcctggagtttgaccctgaagagttctaccaccttttagaagcagctgagggccacgccaaagagggacaagggattaaatgtgacattccccgctacatcgttagccagctgggcctcacccgggatcccctagaagaaatggcccagttgagcagctgtgacagtcctgacactccagagacagatgattctattgagggccatggggcatctctgccatctaaaaagacaccctctgaagaggacttcgagaccattaagctcatcagcaatggcgcctatggggctgtatttctggtgcggcacaagtccacccggcagcgctttgccatgaagaagatcaacaagcagaacctgatcctacggaaccagatccagcaggccttcgtggagcgtgacatactgactttcgctgagaacccctttgtggtcagcatgttctgctcctttgataccaagcgccacttgtgcatggtgatggagtacgttgaagggggagactgtgccactctgctgaagaatattggggccctgcctgtggacatggtgcgtctatactttgcggaaactgtgctggccctggagtacttacacaactatggcatcgtgcaccgtgacctcaagcctgacaacctcctaattacatccatggggcacatcaagctcacggactttggactgtccaaaattggcctcatgagtctgacaacgaacttgtatgagggtcatattgaaaaggatgcccgggaattcctggacaagcaggtatgcgggaccccagaatacattgcgcctgaggtgatcctgcgccagggctatgggaagccagtggactggtgggccatgggcattatcctgtatgagttcctggtgggctgcgtccctttttttggagatactccggaggagctctttgggcaggtgatcagtgatgagattgtgtggcctgagggtgatgaggcactgcccccagacgcccaggacctcacctccaaactgctccaccagaaccctctggagagacttggcacaggcagtgcctatgaggtgaagcagcacccattctttactggtctggactggacaggacttctccgccagaaggctgaatttattcctcagttggagtcagaggatgatactagctattttgacacccgctcagagcgataccaccacatggactcggaggatgaggaagaagtgagtgaggatggctgccttgagatccgccagttctcttcctgctctccaaggttcaacaaggtgtacagcagcatggagcggctctcactgctcgaggagcgccggacaccacccccgaccaagcgcagcctgagtgaggagaaggaggaccattcagatggcctggcagggctcaaaggccgagaccggagctgggtgattggctcccctgagatattacggaagcggctgtcggtgtctgagtcatcccacacagagagtgactcaagccctccaatgacagtgcgacgccgctgctcaggcctcctggatgcgcctcggttcccggagggccctgaggaggccagcagcaccctcaggaggcaaccacaggagggtatatgggtcctgacacccccatctggagagggggtatctgggcctgtcactgaacactcaggggagcagcggccaaagctggatgaggaagctgttggccggagcagtggttccagtccagctatggagacccgaggccgtgggacctcacagctggctgagggagccacagccaaggccatcagtgacctggctgtgcgtagggcccgccaccggctgctctctggggactcaacagagaagcgcactgctcgccctgtcaacaaagtgatcaagtccgcctcagccacagccctctcactcctcattccttcggaacaccacacctgctccccgttggccagccccatgtccccacattctcagtcgtccaacccatcatcccgggactcttctccaagcagggacttcttgccagcccttggcagcatgaggcctcccatcatcatccaccgagctggcaagaagtatggcttcaccctgcgggccattcgcgtctacatgggtgactccgatgtctacaccgtgcaccatatggtgtggcacgtggaggatggaggtccggccagtgaggcagggcttcgtcaaggtgacctcatcacccatgtcaatggggaacctgtgcatggcctggtgcacacggaggtggtagagctgatcctgaagagtggaaacaaggtggccatttcaacaactcccctggagaacacatccattaaagtggggccagctcggaagggcagctacaaggccaagatggcccgaaggagcaagaggagccgcggcaaggatgggcaagaaagcagaaaaaggagctccctgttccgcaagatcaccaagcaagcatccctgctccacaccagccgcagcctttcttcccttaaccgctccttgtcatcaggggagagtgggccaggctctcccacacacagccacagcctttccccccgatctcccactcaaggctaccgggtgacccccgatgctgtgcattcagtgggagggaattcatcacagagcagctcccccagctccagcgtgcccagttccccagccggctctgggcacacacggcccagctccctccacggtctggcacccaagctccaacgccagtaccgctctccacggcgcaagtcagcaggcagcatcccactgtcaccactggcccacaccccttctcccccacccccaacagcttcacctcagcggtccccatcgcccctgtctggccatgtagcccaggcctttcccacaaagcttcacttgtcacctcccctgggcaggcaactctcacggcccaagagtgcggagccaccccgttcaccactactcaagagggtgcagtcggctgagaaactggcagcagcacttgccgcctctgagaagaagctagccacttctcgcaagcacagccttgacctgccccactctgaactaaagaaggaactgccgcccagggaagtgagccctctggaggtagttggagccaggagtgtgctgtctggcaagggggccctgccagggaagggggtgctgcagcctgctccctcacgggccctaggcaccctccggcaggaccgagccgaacgacgggagtcgctgcagaagcaagaagccattcgtgaggtggactcctcagaggacgacaccgaggaagggcctgagaacagccagggtgcacaggagctgagcttggcacctcacccagaagtgagccagagtgtggcccctaaaggagcaggagagagtggggaagaggatcctttcccgtccagagaccctaggagcctgggcccaatggtcccaagcctattgacagggatcacactggggcctcccagaatggaaagtcccagtggtccccacaggaggctcgggagcccacaagccattgaggaggctgccagctcctcctcagcaggccccaacctaggtcagtctggagccacagaccccatccctcctgaaggttgctggaaggcccagcacctccacacccaggcactaacagcactttctcccagcacttcgggactcacccccaccagcagttgctctcctcccagctccacctctgggaagctgagcatgtggtcctggaaatcccttattgagggcccagacagggcatccccaagcagaaaggcaaccatggcaggtgggctagccaacctccaggatttggaaaacacaactccagcccagcctaagaacctgtctcccagggagcaggggaagacacagccacctagtgcccccagactggcccatccatcttatgaggatcccagccagggctggctatgggagtctgagtgtgcacaagcagtgaaagaggatccagccctgagcatcacccaagtgcctgatgcctcaggtgacagaaggcaggacgttccatgccgaggctgccccctcacccagaagtctgagcccagcctcaggaggggccaagaaccagggggccatcaaaagcatcgggatttggcattggttccagatgagcttttaaagcaaacatagcagttgtttgccatttcttgcactcagacctgtgtaatatatgctcctggaaaccatc

SEQ ID NO: 153850 - DNA, 2528 bp, Homo sapiens
  Payload ID: 10246
  Gene Symbol: MAST2
  Gene Name: microtubule associated serine/threonine kinase 2
  ENST ID: ENST00000372008
  CDS Start-End: 168-2528
attcatttgggatctggaacttgtcactgtcccactgctgcctcgtgggctcttaggtcttttgtggggggatgggaggggtgttctgaagatcatgtttttgaagaaaagtactttaatttttgccaatctctaccctttgccgaggagctgaagtaaaccagcacatgttttcacccacatctgctccagccctcttcctcactaaagtcccatttagtgctgattgtgctttggctacttctcctcttgccattttcctgaacccacgagcccacagcagtcctggcactccttgttccagccgcccactgccgtggagttgtcggacaagtaaccgcaagagcttgattgtgacctctagcacatcacctacactaccacggccacactcaccactccatggccacacaggtaacagtcctttggacagcccccggaatttctctccaaatgcacctgctcacttttcttttgttcctgcccgtaggactgatgggcggcgctggtctttggcctctttgccctcttcaggatatggaactaacactcctagctccactgtctcatcatcatgctcctcacaggaaaagctgcatcagttgcctttccagcctacagctgatgagctgcactttttgacgaagcatttcagcacagagagcgtaccagatgaggaaggacggcagtccccagccatgcggcctcgctcccggagcctcagtcccggacgatccccagtatcctttgacagtgaaataataatgatgaatcatgtttacaaagaaagattcccaaaggccaccgcacaaatggaagagcgactagcagagtttatttcctccaacactccagacagcgtgctgcccttggcagatggagccctgagctttattcatcatcaggtgattgagatggcccgagactgcctggataaatctcggagtggcctcattacatcacaatacttctacgaacttcaagataatttggagaaacttttacaagatgctcatgagcgctcagagagctcagaagtggcttttgtgatgcagctggtgaaaaagctgatgattatcattgcccgcccagcacgtctcctggaatgcctggagtttgaccctgaagagttctaccaccttttagaagcagctgagggccacgccaaagagggacaagggattaaatgtgacattccccgctacatcgttagccagctgggcctcacccgggatcccctagaagaaatggcccagttgagcagctgtgacagtcctgacactccagagacagatgattctattgagggccatggggcatctctgccatctaaaaagacaccctctgaagaggacttcgagaccattaagctcatcagcaatggcgcctatggggctgtatttctggtgcggcacaagtccacccggcagcgctttgccatgaagaagatcaacaagcagaacctgatcctacggaaccagatccagcaggccttcgtggagcgtgacatactgactttcgctgagaacccctttgtggtcagcatgttctgctcctttgataccaagcgccacttgtgcatggtgatggagtacgttgaagggggagactgtgccactctgctgaagaatattggggccctgcctgtggacatggtgcgtctatactttgcggaaactgtgctggccctggagtacttacacaactatggcatcgtgcaccgtgacctcaagcctgacaacctcctaattacatccatggggcacatcaagctcacggactttggactgtccaaaattggcctcatgagtctgacaacgaacttgtatgagggtcatattgaaaaggatgcccgggaattcctggacaagcaggtatgcgggaccccagaatacattgcgcctgaggtgatcctgcgccagggctatgggaagccagtggactggtgggccatgggcattatcctgtatgagttcctggtgggctgcgtccctttttttggagatactccggaggagctctttgggcaggtgatcagtgatgagattgtgtggcctgagggtgatgaggcactgcccccagacgcccaggacctcacctccaaactgctccaccagaaccctctggagagacttggcacaggcagtgcctatgaggtgaagcagcacccattctttactggtctggactggacaggacttctccgccagaaggctgaatttattcctcagttggagtcagaggatgatactagctattttgacacccgctcagagcgataccaccacatggactcggaggatgaggaagaagtgagtgaggatggctgccttgagatccgccagttctcttcctgctctccaaggttcaacaaggtgtacagcagcatggagcggctctcactgctcgaggagcgccggacaccacccccgaccaagcgcagcctgagtgaggagaaggaggaccattcagatggcctggcagggctcaaaggccgagaccggagctgggtgattggctcccctgag

SEQ ID NO: 153851 - DNA, 4047 bp, Homo sapiens
  Payload ID: 10246
  Gene Symbol: MAST2
  Gene Name: microtubule associated serine/threonine kinase 2
  ENST ID: ENST00000372009
  CDS Start-End: 38-2413
gagcgtaccagatgaggaaggacggcagtccccagccatgcggcctcgctcccggagcctcagtcccggacgatccccagtatcctttgacagtgaaataataatgatgaatcatgtttacaaagaaagattcccaaaggctcatgagcgctcagagagctcagaagtggcttttgtgatgcagctggtgaaaaagctgatgattatcattgcccgcccagcacgtctcctggaatgcctggagtttgaccctgaagagttctaccaccttttagaagcagctgagggccacgccaaagagggacaagggattaaatgtgacattccccgctacatcgttagccagctgggcctcacccgggatcccctagaagaaatggcccagttgagcagctgtgacagtcctgacactccagagacagatgattctattgagggccatggggcatctctgccatctaaaaagacaccctctgaagaggacttcgagaccattaagctcatcagcaatggcgcctatggggctgtatttctggtgcggcacaagtccacccggcagcgctttgccatgaagaagatcaacaagcagaacctgatcctacggaaccagatccagcaggccttcgtggagcgtgacatactgactttcgctgagaacccctttgtggtcagcatgttctgctcctttgataccaagcgccacttgtgcatggtgatggagtacgttgaagggggagactgtgccactctgctgaagaatattggggccctgcctgtggacatggtgcgtctatactttgcggaaactgtgctggccctggagtacttacacaactatggcatcgtgcaccgtgacctcaagcctgacaacctcctaattacatccatggggcacatcaagctcacggactttggactgtccaaaattggcctcatgagtctgacaacgaacttgtatgagggtcatattgaaaaggatgcccgggaattcctggacaagcaggtatgcgggaccccagaatacattgcgcctgaggtgatcctgcgccagggctatgggaagccagtggactggtgggccatgggcattatcctgtatgagttcctggtgggctgcgtccctttttttggagatactccggaggagctctttgggcaggtgatcagtgatgagattgtgtggcctgagggtgatgaggcactgcccccagacgcccaggacctcacctccaaactgctccaccagaaccctctggagagacttggcacaggcagtgcctatgaggtgaagcagcacccattctttactggtctggactggacaggacttctccgccagaaggctgaatttattcctcagttggagtcagaggatgatactagctattttgacacccgctcagagcgataccaccacatggactcggaggatgaggaagaagtgagtgaggatggctgccttgagatccgccagttctcttcctgctctccaaggttcaacaaggtgtacagcagcatggagcggctctcactgctcgaggagcgccggacaccacccccgaccaagcgcagcctgagtgaggagaaggaggaccattcagatggcctggcagggctcaaaggccgagaccggagctgggtgattggctcccctgagatattacggaagcggctgtcggtgtctgagtcatcccacacagagagtgactcaagccctccaatgacagtgcgacgccgctgctcaggcctcctggatgcgcctcggttcccggagggccctgaggaggccagcagcaccctcaggaggcaaccacaggagggtatatgggtcctgacacccccatctggagagggggtatctgggcctgtcactgaacactcaggggagcagcggccaaagctggatgaggaagctgttggccggagcagtggttccagtccagctatggagacccgaggccgtgggacctcacagctggctgagggagccacagccaaggccatcagtgacctggctgtgcgtagggcccgccaccggctgctctctggggactcaacagagaagcgcactgctcgccctgtcaacaaagtgatcaagtccgcctcagccacagccctctcactcctcattccttcggaacaccacacctgctccccgttggccagccccatgtccccacattctcagtcgtccaacccatcatcccgggactcttctccaagaagtatggcttcaccctgcgggccattcgcgtctacatgggtgactccgatgtctacaccgtgcaccatatggtgtggcacgtggaggatggaggtccggccagtgaggcagggcttcgtcaaggtgacctcatcacccatgtcaatggggaacctgtgcatggcctggtgcacacggaggtggagctgatcctgaagagtggaaacaaggtggccatttcaacaactcccctggagaacacatccattaaagtggggccagctcggaagggcagctacaaggccaagatggcccgaaggagcaagaggagccgcggcaaggatgggcaagaaagcagaaaaaggagctccctgttccgcaagatcaccaagcaagcatccctgctccacaccagccgcagcctttcttcccttaaccgctccttgtcatcaggggagagtgggccaggctctcccacacacagccacagcctttccccccgatctcccactcaaggctaccgggtgacccccgatgctgtgcattcaggcaactctcacggcccaagagtgcggagccaccccgttcaccactactcaagagggtgcagtcggctgagaaactggcagcagcacttgccgcctctgagaagaagctagccacttctcgcaagcacagccttgacctgccccactctgaactaaagaaggaactgccgcccagggaagtgagccctctggaggtagttggagccaggagtgtgctgtctggcaagggggccctgccagggaagggggtgctgcagcctgctccctcacgggccctaggcaccctccggcaggaccgagccgaacgacgggagtcgctgcagaagcaagaagccattcgtgaggtggactcctcagaggacgacaccgaggaagggcctgagaacagccagggtgcacaggagctgagcttggcacctcacccagaagtgagccagagtgtggcccctaaaggagcaggagagagtggggaagaggatcctttcccgtccagagaccctaggagcctgggcccaatggtcccaagcctattgacagggatcacactggggcctcccagaatggaaagtcccagtggtccccacaggaggctcgggagcccacaagccattgaggaggctgccagctcctcctcagcaggccccaacctaggtcagtctggagccacagaccccatccctcctgaaggttgctggaaggcccagcacctccacacccaggcactaacagcactttctcccagcacttcgggactcacccccaccagcagttgctctcctcccagctccacctctgggaagctgagcatgtggtcctggaaatcccttattgagggcccagacagggcatccccaagcagaaaggcaaccatggcaggtgggctagccaacctccaggatttggaaaacacaactccagcccagcctaagaacctgtctcccagggagcaggggaagacacagccacctagtgcccccagactggcccatccatcttatgaggatcccagccagggctggctatgggagtctgagtgtgcacaagcagtgaaagaggatccagccctgagcatcacccaagtgcctgatgcctcaggtgacagaaggcaggacgttccatgccgaggctgccccctcacccagaagtctgagcccagcctcaggaggggccaagaaccagggggccatcaaaagcatcgggatttggcattggttccagatgagcttttaaagcaaacatagcagttgtttgccatttcttgcactcagacctgtgtaatatatgctcctggaaacc

SEQ ID NO: 153852 - DNA, 5896 bp, Homo sapiens
  Payload ID: 10247
  Gene Symbol: MAST3
  Gene Name: microtubule associated serine/threonine kinase 3
  Uniprot ID: O60307
  ENST ID: ENST00000262811
  CDS Start-End: 1-3930
atggacgagtcgagcctcctgcggcgccgcgggctccagaaggagctgagcctgccacgccgaggacgtggctgccgcagcgggaaccgcaagagcttggtggtaggaacgccctccccgaccctctcccggcccctgtcgccattgtcggtcccaacggcaggcagcagccccttggatagtcctcggaatttctcggctgcctctgccctaaatttcccctttgcccggagggcagacggcagaagatggtccctcgcgtctctcccatcttccggctatggaaccaacacacccagctccaccctctcgtcaagctcatcctcccgggaacgtctccaccagcttcccttccagccgacgccggacgagctgcacttcctgtccaagcacttccgcagctcagagaatgtgcttgatgaggaaggcggccggtcaccccgcctccgaccccgctctcgcagtctcagcccgggccgtgcaacggggaccttcgacaatgagattgtcatgatgaatcacgtgtaccgggagaggttccccaaggccacagcacagatggagggccgtctgcaggagttcctgacggcctacgcgcccggcgcccggctggcgctggctgatggcgtcttgggcttcatccaccaccagatcgtcgagctggcccgagactgcttggccaagtctggcgagaacctcgtcacctcccgctacttcctagagatgcaggagaagctggagcggcttctgcaggatgcccatgagcgttcggacagtgaggaggtcagcttcatcgtccagcttgtccggaaactgctgatcatcatctcacggccagctcggctgctggagtgtctggagtttgaccctgaggaattttaccacctgctggaggcggctgagggccatgcgcgggagggccaaggcattaagactgaccttccacagtacatcattgggcagctgggcctggccaaggaccccctggaggagatggtgccactgagtcacctcgaagaagaacagcccccagcacctgagtccccagagagccgcgccctggtcggccagtcacggaggaagccatgcgaaagcgactttgagaccatcaaactcattagcaacggagcctatggggccgtctacctggtgcggcaccgtgacacacggcagcgctttgccatcaagaagatcaacaaacagaacttgatcctgcgtaaccagatccagcaggtctttgtggagcgtgacattctcacctttgccgagaacccctttgtggtcagcatgttctgctcctttgagacccggcgccacctatgtatggtcatggaatacgtggaaggcggcgactgcgccacgctcctgaagaacatgggcccgctgcccgtggacatggcccgcctgtacttcgccgagacggtgttggcgctggagtacctgcataactatggcatcgtgcaccgtgacctcaaaccagacaatctgctcatcacctcgcttggccacatcaagctcacggacttcggcctgtccaagatcggcctcatgagcatggccaccaacctctatgagggccacatcgagaaggacgcccgagagttcatcgacaagcaggtgtgtgggacgccggagtacatagcccccgaggtgatcttccgccagggctatgggaagccagtggactggtgggccatgggcgtcgtcctctatgagtttctggtgggctgcgtgcctttctttggagatacccccgaggaactcttcggtcaggtggtcagcgatgagatcatgtggccagagggagatgaggcccttccagcagacgcccaggacctcatcaccaggttgctccggcagagcccgctggaccgtctgggcactggtggcacccacgaagtgaagcagcacccctttttcctggccctggactgggcagggcttctccgacacaaagccgagttcgtgccccagctcgaagctgaggatgataccagctactttgacacacgttcggaacgttaccgccatctgggctccgaggacgacgagaccaatgatgaagaatcgtccacagagatcccccagttctcctcctgctcccaccggttcagcaaggtctacagcagctctgagttcctggccgtccagcccactcctaccttcgctgaaaggagcttcagtgaagaccgggaggaggggtgggagcgcagcgaagtggactatggccgccggctgagtgctgacatccggctgaggtcctggacatcctctggatcctcctgtcagtcatcttcgtcccagcccgagcggggtcccagcccatctctcctgaataccatcagcctggacacaatgcccaagtttgccttctcatcagaggatgagggggtaggcccaggccctgcaggccccaagaggcccgtcttcattctaggggagcctgaccccccaccagcggccaccccagtgatgcccaagccctcgagcctttctgccgacacagctgctctcagccacgcccgcctacggagcaatagcatcggcgcccgacactccacaccaaggcctctggatgccggccggggccgccgccttgggggcccaagagacccagcccctgagaagtccagagcctcctccagcggtggcagtggtggcggcagtgggggccgcgtgcccaagtcagcctctgtctctgccctgtccctcatcatcacggcagatgatggcagcggcggccccctcatgagccccctttccccgcgctctctgtcctcgaacccgtcgtcccgtgactcttcgccgagccgagacccgtcccccgtgtgtggcagcctgcggccccccatcgttatccacagctctggcaagaagtacggcttcagcctgcgggcgatccgcgtctacatgggtgatagcgacgtctacactgtgcaccacgtcgtctggagtgtggaggacggaagccccgcccaggaggcgggcctgcgggctggggacctcatcacccacatcaacggggagtcagtgctggggctggtgcacatggacgtcgtggagctgctgctgaagagcggcaacaagatatccctgcggaccacagccctggagaacacctccatcaaggtgggccccgcccggaagaatgtggccaagggccgcatggcacgcaggagcaagaggagccgtcggcgggagacccaggatcggcggaagtcacttttcaagaagatctccaagcagacctccgtgctgcacaccagccgcagcttctcctccggactccaccactcactgtcatccagtgagagcctccccggctcgcccacccacagcctctcccccagccccaccactccctgccgaagcccagcccctgatgtcccagcagataccactgcatccccacccagcgcatccccgagctccagcagccccgcctccccagctgctgctggccacacccgccccagctccctgcacggcctggctgccaagcttgggccaccccgccccaagactggccgccgcaagtccaccagcagcatcccgccctccccgctggcctgcccgcccatctccgcgcccccaccccgctcgccctcgcccctgcccgggcacccgcccgcacctgcccgatccccgcggctgcgccggggccagtcagctgacaagctgggcacaggggagcggctggatggggaggcggggcggcgcactcgtgggccagaggccgagctcgtggtcatgcggcggctgcacctgtccgagcgccgagactccttcaagaagcaggaggccgtgcaggaggttagcttcgatgagccgcaggaggaggccactgggctgcccacctcagtgccacagatcgccgtggagggcgaggaagccgtgccagtagctctcgggcccaccggaagagactgatcccctgccaggtctctccctggcatcaaagttacgcgttttcttgtgcaatgttttttccgtaaagtcatgcctggatggggactgagccaccagcctgacacccagaaggcgagaagccatctcggtccttgctggaaggtggagacatcgcttgtgttctggtgtcaatcggggctggatggggcaagaatgggggacaagggtggctttgtaaatagcagcaaatccctgcaactaatttattactttttttttctttttttttttttttttttgagacagagtctcactctgttgcccgggctggagtgcagcggcgtgatctcagctcactgcaacctccgcctcccaagttcaagcgattgtcctgcctcagcttcccaagtggctgggattacaggcgcccaccactatgcccagctaattttttgtatttttagtacagacggggtttcaccatgttggtcaggctggtctcgaactcctgacctcatgatttgcctgcctttgcctcccaaagtgctgggattacaggcgtgagccactgggcccagcctaatttattactttttataagcgatagccgtactgagccgccccctgaaggcggctgccaggtcttgccccaggcacctgggactctgtttgcaggccctgccctctgggctgagaaggatgcactttggacaagtcatctgtgtttgtgttttccagtttttctgtactttttaagtgttttgtgttacctggtctcattcccctccccacacctacccatttgaggggatggagttgaagtcacctggtcacctgtaccggcccagttcggctacaacctggagtgtccgtaaacaattcctctcacccacaaaacaatgtaatcccagcgatggactggattctgaaggccacttcccaccatcatagctgccatgcccaggcagtgcctgctctatatatagagtctgcctccaatcctgctggcttcagcctggagaagggatatgggagctggagctttgatggatgaataggtgttcaccggatctgggcagaggggtcatccgctccccaggtgggcactgataaaggaaggtacaggcctcacctggaactgccaaggcagcctccagaaatgctcggctgtctcggggcacgctccagtatgccagtcctgcgggattacgtccagctacttccagaaacactcagtgtcccctcccctcaggctctgccttggcctggccttgtccagtctaccctggacaagatgccgtgtgtttgaggcccagcagagtaagcccttggccgtgatgtgtctgaaacacctgttaggggttccctccatatgtcagagcctctctgggatgaagttcaagccagaaaacccagtcgaggctcaagtttgaatttcagcttcactgtgtggctctgggaaaatggctttcccactctgtgcctcagtttccttgtgtttacaagactaatcccattgactgtttattaagcacctactgtgtgccaagcgcttttacgtggcttctccctcagccagccttgagaaggctggaggtggtgtcatcacctccattttacagacaaagcagctgagaccccagcgaggggcggagacctgtcccacgatcacccagcaggagtcgtggcagaacggagcatcagccagaccctgttgtgggcgttgtcatcaagggagcttgaatggagggtctggtgtcagatacagccgactccagccccagctcatcccccatgatgctgtgtgacccactgggcactctggtgagggagctttccagacatcaacagcccactctgcttccctttctgagtcccctgtccagcactgcctagtgttggagggtagaccaaggctgtgcatgattcaccccctccttccatcctggagctggcagtgaataaaagcccgtatttacaaagatga

SEQ ID NO: 153853 - DNA, 354 bp, Homo sapiens
  Payload ID: 10247
  Gene Symbol: MAST3
  Gene Name: microtubule associated serine/threonine kinase 3
  ENST ID: ENST00000609494
  CDS Start-End: 1-261
tttgacacacgttcggaacgttaccgccatctgggctccgaggacgacgagaccaatgatgaagaatcgtccacagagatcccccagttctcctcctgctcccaccggttcagcaaggtctacagcagctctgagttcctggccgtccagcccactcctaccttcgctgaaaggagcttcagtgaagaccgggaggaggggtgggagcgcagcgaagtggactatggccgccggctgagtgctgacatccggggagcctgaccccccaccagcggccaccccagtgatgcccaagccctcgagcctttctgccgacacagctgctctcagccacgcccgcctacggagcaatag

SEQ ID NO: 153854 - DNA, 7664 bp, Homo sapiens
  Payload ID: 10248
  Gene Symbol: MAST4
  Gene Name: microtubule associated serine/threonine kinase family member 4
  Uniprot ID: O15021
  ENST ID: ENST00000261569
  CDS Start-End: 375-7664
aaacagatgacaaagtacctccgactgaatcccacagacagcgctttgagcagaacgcacggctcaactcatgtaattactgtttatagctggccgagcctgactaggagagggcagacccgagaggaaatcagtttcccggacctttgagaggaggctgtgtgttaattaaaggctaggacgggacgggtacttctcagacatgctccaagttgttcttgagatcacagttcccatcacattttctctggagggagtgagtagataattgggattttttttttatttttggccttgtctttcttccttttttttacctctccccattttagtcatatggccttgaacccacagtgaattgaagagagaaagaaatggatatgtctgaccccaatttttggactgtgctctcaaactttactttgcctcatttgaggagtgggaacaggcttcggcgaacacaaagttgccgaacaagcaaccggaaaagcttaataggcaatgggcagtcaccagcattgcctcgaccacactcacctctctctgctcatgcaggaaatagccctcaagatagtccaagaaatttctcccccagtgcctcagcccatttttcatttgcacggaggactgatggacgccgctggtcgttggcttctctcccttcctctggctatgggacaaacacacccagctctacggtctcttcatcctgttcctcccaggagaagttgcatcagttaccataccaaccaacaccagacgagttacacttcttatcaaaacatttctgtaccaccgaaagcatcgccactgagaacagatgcaggaacacgccgatgcgcccccgttcccgaagtctgagccctggacgttctcccgcctgctgtgaccatgaaataattatgatgaaccatgtctacaaagaaaggttcccaaaggctacagctcagatggaagaacgtctaaaggaaattatcaccagctactctcctgacaacgttctacccttagcagatggagtgcttagtttcactcaccaccagattattgaactggctcgagattgcttggataaatcccaccagggcctcatcacctcacgatacttccttgaattacagcacaaattagataagttgctacaggaggctcatgatcgttcagaaagtggagaattggcatttattaaacaactagttcgaaagatcctaattgttattgcccgccctgctcggttattagagtgcctggaatttgatccggaagaattttactacctattggaagcagcagaaggccatgccaaagaaggacagggtattaaaaccgacattcccaggtacatcattagccaactgggactcaataaggatcccttggaagaaatggctcatttgggaaactacgatagtgggacagcagaaacaccagaaacagatgaatcagtgagtagctctaatgcctccctgaaacttcgaaggaaacctcgggaaagtgattttgaaacgattaaattgattagcaatggagcctatggggcagtctactttgttcggcataaagaatcccggcagaggtttgccatgaagaagattaataaacagaacctcatccttcgaaaccagatccagcaggcctttgtggagcgggatatcctgacttttgcagaaaacccctttgttgtcagcatgtattgctcctttgaaacaaggcgccacttgtgcatggtcatggaatatgtggaagggggagactgtgctactttaatgaaaaacatgggtcctctccctgttgatatggccagaatgtactttgctgagacggtcttggccttggaatatttacataattatggaattgtacacagggatttgaaaccagacaacttgttggttacctccatggggcacataaagctgacagattttggattatctaaggtgggactaatgagcatgactaccaacctttacgagggtcatattgagaaggatgctagagagttcctggataaacaggtctgtggcacacctgaatacattgcaccagaagtgattctgaggcagggttatggaaagccggtggactggtgggccatggggattatcctctatgaatttctggttggatgcgtgccattctttggggatactccagaggagctatttggacaagtcatcagtgatgagatcaactggcctgagaaggatgaggcacccccacctgatgcccaggatctgattaccttactcctcaggcagaatcccctggagaggctgggaacaggtggtgcatatgaagtcaaacagcatcgattcttccgttctttagactggaacagtttgctgagacagaaggcagaatttattccccaactggaatctgaggatgacacaagttattttgatactcggtctgagaagtatcatcatatggaaacggaggaagaagatgacacaaatgatgaagactttaatgtggaaataaggcagttttcttcatgttcacacaggttttcaaaagttttcagcagtatagatcgaatcactcagaattcagcagaagagaaggaagactctgtggacaaaaccaaaagcaccaccttgccatccacagaaacactgagctggagttcagaatattctgaaatgcaacagctatcaacatccaactcttcagatactgaaagcaacagacataaactcagttctggcctacttcccaaactggctatttcaacagagggagagcaagatgaagctgcctcctgccctggagacccccatgaggagccaggaaagccagcccttcctcctgaagagtgtgcccaggaggagcctgaggtcaccaccccagccagcaccatcagcagctccaccctgtcagttggcagtttttcagagcacttggatcagataaatggacgaagcgagtgtgtggacagtacagataattcctcaaagccatccagtgaacccgcttctcacatggctcggcagcgattagaaagcacagaaaaaaagaaaatctcggggaaagtcacaaagtccctctctgccagtgctctttccctcatgatcccaggagatatgtttgctgtttcccctctgggaagtccaatgtctccccattccctgtcctcggacccttcttcttcacgagattcctctcccagccgagattcctcagcagcttctgccagtccacatcagccgattgtgatccacagttcggggaagaactacggctttaccatccgagccatccgggtgtatgtgggagacagtgacatctatacagtgcaccatatcgtctggaatgtagaagaaggaagtccggcatgccaggcaggactgaaggctggagatcttatcactcacatcaatggagaaccagtgcatggacttgtccacacagaagttatagaactcctactgaagagtgggaataaggtgtcaatcactactaccccatttgaaaacacatcaatcaaaactggaccagccaggagaaacagctataagagccggatggtgaggcggagcaagaaatccaagaagaaagaaagtctcgaaaggaggagatctcttttcaaaaagctagccaagcagccttctcctttactccacaccagccgaagtttctcctgcttgaacagatccctgtcatcgggtgagagcctcccaggttcccccactcatagcttgtctccccggtctccaacaccaagctaccgctccacccctgacttcccatctggtactaattcctcccagagcagctcccctagttctagtgcccccaattccccagcagggtccgggcacatccggcccagcactctccacggtcttgcacccaaactcggcgggcagcggtaccggtccggaaggcgaaagtccgccggcaacatcccactgtccccgctggcccggacgccctctccaaccccgcaacccacctccccgcagcggtcaccatcccctcttctgggacactcactgggcaattccaagatcgcgcaagcctttcccagcaagatgcactccccgcccaccatcgtcagacacatcgtgaggcccaagagtgcggagccccccaggtccccgctgctcaagcgcgtgcagtccgaggagaagctgtcgccctcttacggcagtgacaagaagcacctgtgctcccgcaagcacagcctggaggtgacccaagaggaggtgcagcgggagcagtcccagcgggaggcgccgctgcagagcctggatgagaacgtgtgcgacgtgccgccgctcagccgcgcccggccagtggagcaaggctgcctgaaacgcccagtctcccggaaggtgggccgccaggagtctgtggacgacctggaccgcgacaagctgaaggccaaggtggtggtgaagaaagcagacggcttcccagagaaacaggaatcccaccagaaatcccatggacccgggagtgatttggaaaactttgctctgtttaagctggaagagagagagaagaaagtctatccgaaggctgtggaaaggtcaagtacttttgaaaacaaagcgtctatgcaggaggcgccaccgctgggcagcctgctgaaggatgctcttcacaagcaggccagcgtgcgcgccagcgagggtgcgatgtcggatggccgggtgcctgcggagcaccgccagggtggcggggacttcagacgggcccccgctcctggcaccctccaggatggtctctgccactccctcgacaggggcatctctgggaagggggaaggcacggagaagtcctcccaggccaaggagcttctccgatgtgaaaagttagacagcaagctggccaacatcgattacctccgaaagaaaatgtcacttgaggacaaagaggacaacctctgccctgtgctgaagcccaagatgacagctggctcccacgaatgcctgccagggaacccagtccgacccacgggtgggcagcaggagcccccgccggcttctgagagccgagcttttgtcagcagcacccatgcagctcagatgagtgccgtctcttttgttcccctcaaggccttaacaggccgggtggacagtggaacggagaagcctggcttggttgctcctgagtcccctgttaggaagagcccctccgagtataagctggaaggtaggtctgtctcatgcctgaagccgatcgagggcactctggacattgctctcctgtccggacctcaggcctccaagacagaactgccttccccagagtctgcacagagccccagcccaagtggtgacgtgagggcctctgtgccaccagttctccccagcagcagtgggaaaaagaacgataccaccagtgcaagagagctttctccttccagcttaaagatgaataaatcctacctgctggagccttggttcctgccccccagccgaggtctccagaattcaccagcagtttccctgcctgacccagagttcaagagggacaggaaaggtccccatcctactgccaggagccctggaacagtcatggaaagcaatccccaacagagagagggcagctcccctaaacaccaagaccacaccactgaccccaagcttctgacctgcctggggcagaacctccacagccctgacctggccaggccacgctgcccgctcccacctgaagcttccccctcaagggagaagccaggcctgagggaatcgtctgaaagaggccctcccacagccagaagcgagcgctctgctgcgagggctgacacatgcagagagccctccatggaactgtgctttccagaaactgcgaaaaccagtgacaactccaaaaatctcctctctgtgggaaggacccacccagatttctatacacagacccaggccatggagaaagcatgggcgccgggtgggaaaacgaaccacaaagatggcccaggtgaggcgaggcccccgcccagagacaactcctctctgcactcagctggaattccctgtgagaaggagctgggcaaggtgaggcgtggcgtggaacccaagcccgaagcgcttcttgccaggcggtctctgcagccacctggaattgagagtgagaagagtgaaaagctctccagtttcccatctttgcagaaagatggtgccaaggaacctgaaaggaaggagcagcctctacaaaggcatcccagcagcatccctccgccccctctgacggccaaagacctgtccagcccggctgccaggcagcattgcagttccccaagccacgcttctggcagagagccgggggccaagcccagcactgcagagcccagctcgagcccccaggaccctcccaagcctgttgctgcgcacagtgaaagcagcagccacaagccccggcctggccctgacccgggccctccaaagactaagcaccccgaccggtccctctcctctcagaaaccaagtgtcggggccacaaagggcaaagagcctgccactcagtccctcggtggctctagcagagaggggaagggccacagtaagagtgggccggatgtgtttcctgctaccccaggctcccagaacaaagccagcgatgggattggccagggagaaggtgggccctctgtcccactgcacactgacagggctcctctagacgccaagccacaacccaccagtggtgggcggcccctggaggtgctggagaagcctgtgcatttgccaaggccgggacacccagggcctagtgagccagcggaccagaaactgtccgctgttggtgaaaagcaaaccctgtctccaaagcaccccaaaccatccactgtgaaagattgccccaccctgtgcaaacagacagacaacagacagacagacaaaagcccgagtcagccggccgccaacaccgacagaagggcggaagggaagaaatgcactgaagcactttatgctccagcagagggcgacaagctcgaggccggcctttcctttgtgcatagcgagaaccggttgaaaggcgcggagcggccagccgcgggggtggggaagggcttccctgaggccagagggaaagggcccggtccccagaagccaccgacggaggcagacaagcccaatggcatgaaacggtccccctcagccactgggcagagttctttccgatccacggccctcccggaaaagtctctgagctgctcctccagcttccctgaaaccagggccggagttagagaggcctctgcagccagcagcgacacctcttctgccaaggccgccgggggcatgctggagcttccagcccccagcaacagggaccataggaaggctcagcctgccggggagggccgaacccacatgacaaagagtgactccctgccctccttccgggtctccaccctgcctctggagtcacaccaccccgacccaaacaccatgggcggggccagccaccgggacagggctctctcggtgactgccaccgtaggggaaaccaaagggaaggaccctgccccagcccagcctcccccagctaggaaacagaacgtgggcagagacgtgaccaagccatccccagccccaaacactgaccgccccatctctctttctaatgagaaggactttgtggtacggcagaggcgggggaaagagagtttgcgtagcagccctcacaaaaaggccttgtaa

SEQ ID NO: 153855 - DNA, 7713 bp, Homo sapiens
  Payload ID: 10248
  Gene Symbol: MAST4
  Gene Name: microtubule associated serine/threonine kinase family member 4
  ENST ID: ENST00000405643
  CDS Start-End: 379-7713
ttatttttttgccccagtctgcagggtgaaaaggacttttcatttcactgaggtgaaaagtgggtctgtgagtagagcgactttctttaaaaaaaaaaaaaaaaatcagaaaccaattacttgatatgcagagctgcaagcctcgttcctttaacaaaatcagtgcagtgtgcactgccgttaacctgaggaaagcagctgacatctcttgattacggctagaggtggaaggacccaaacttgcagcctccccctccccctcgagagagtgttagtccagtcctttagagaggttcggtttggctctctgtcatcaccgggacgctggcagggagtgtgtgtcatggttacaatagagtgtgctaacatataacaaccatgaaagcccagcgggaaaggctacagattccggggctgaccttggatctcactcccaggagcctgagtccaaccccatccagcccaggcagtccttgtagtcctctcttggcctttcacttttggagttgccgaacaagcaaccggaaaagcttaataggcaatgggcagtcaccagcattgcctcgaccacactcacctctctctgctcatgcaggaaatagccctcaagatagtccaagaaatttctcccccagtgcctcagcccatttttcatttgcacggagaaatgacaggactgatggacgccgctggtcgttggcttctctcccttcctctggctatgggacaaacacacccagctctacggtctcttcatcctgttcctcccaggagaagttgcatcagttaccataccaaccaacaccagacgagttacacttcttatcaaaacatttctgtaccaccgaaagcatcgccactgagaacagatgcaggaacacgccgatgcgcccccgttcccgaagtctgagccctggacgttctcccgcctgctgtgaccatgaaataattatgatgaaccatgtctacaaagaaaggttcccaaaggctacagctcagatggaagaacgtctaaaggaaattatcaccagctactctcctgacaacgttctacccttagcagatggagtgcttagtttcactcaccaccagattattgaactggctcgagattgcttggataaatcccaccagggcctcatcacctcacgatacttccttgaattacagcacaaattagataagttgctacaggaggctcatgatcgttcagaaagtggagaattggcatttattaaacaactagttcgaaagatcctaattgttattgcccgccctgctcggttattagagtgcctggaatttgatccggaagaattttactacctattggaagcagcagaaggccatgccaaagaaggacagggtattaaaaccgacattcccaggtacatcattagccaactgggactcaataaggatcccttggaagaaatggctcatttgggaaactacgatagtgggacagcagaaacaccagaaacagatgaatcagtgagtagctctaatgcctccctgaaacttcgaaggaaacctcgggaaagtgattttgaaacgattaaattgattagcaatggagcctatggggcagtctactttgttcggcataaagaatcccggcagaggtttgccatgaagaagattaataaacagaacctcatccttcgaaaccagatccagcaggcctttgtggagcgggatatcctgacttttgcagaaaacccctttgttgtcagcatgtattgctcctttgaaacaaggcgccacttgtgcatggtcatggaatatgtggaagggggagactgtgctactttaatgaaaaacatgggtcctctccctgttgatatggccagaatgtactttgctgagacggtcttggccttggaatatttacataattatggaattgtacacagggatttgaaaccagacaacttgttggttacctccatggggcacataaagctgacagattttggattatctaaggtgggactaatgagcatgactaccaacctttacgagggtcatattgagaaggatgctagagagttcctggataaacaggtctgtggcacacctgaatacattgcaccagaagtgattctgaggcagggttatggaaagccggtggactggtgggccatggggattatcctctatgaatttctggttggatgcgtgccattctttggggatactccagaggagctatttggacaagtcatcagtgatgagatcaactggcctgagaaggatgaggcacccccacctgatgcccaggatctgattaccttactcctcaggcagaatcccctggagaggctgggaacaggtggtgcatatgaagtcaaacagcatcgattcttccgttctttagactggaacagtttgctgagacagaaggcagaatttattccccaactggaatctgaggatgacacaagttattttgatactcggtctgagaagtatcatcatatggaaacggaggaagaagatgacacaaatgatgaagactttaatgtggaaataaggcagttttcttcatgttcacacaggttttcaaaagttttcagcagtatagatcgaatcactcagaattcagcagaagagaaggaagactctgtggacaaaaccaaaagcaccaccttgccatccacagaaacactgagctggagttcagaatattctgaaatgcaacagctatcaacatccaactcttcagatactgaaagcaacagacataaactcagttctggcctacttcccaaactggctatttcaacagagggagagcaagatgaagctgcctcctgccctggagacccccatgaggagccaggaaagccagcccttcctcctgaagagtgtgcccaggaggagcctgaggtcaccaccccagccagcaccatcagcagctccaccctgtcagttggcagtttttcagagcacttggatcagataaatggacgaagcgagtgtgtggacagtacagataattcctcaaagccatccagtgaacccgcttctcacatggctcggcagcgattagaaagcacagaaaaaaagaaaatctcggggaaagtcacaaagtccctctctgccagtgctctttccctcatgatcccaggagatatgtttgctgtttcccctctgggaagtccaatgtctccccattccctgtcctcggacccttcttcttcacgagattcctctcccagccgagattcctcagcagcttctgccagtccacatcagccgattgtgatccacagttcggggaagaactacggctttaccatccgagccatccgggtgtatgtgggagacagtgacatctatacagtgcaccatatcgtctggaatgtagaagaaggaagtccggcatgccaggcaggactgaaggctggagatcttatcactcacatcaatggagaaccagtgcatggacttgtccacacagaagttatagaactcctactgaagagtgggaataaggtgtcaatcactactaccccatttgaaaacacatcaatcaaaactggaccagccaggagaaacagctataagagccggatggtgaggcggagcaagaaatccaagaagaaagaaagtctcgaaaggaggagatctcttttcaaaaagctagccaagcagccttctcctttactccacaccagccgaagtttctcctgcttgaacagatccctgtcatcgggtgagagcctcccaggttcccccactcatagcttgtctccccggtctccaacaccaagctaccgctccacccctgacttcccatctggtactaattcctcccagagcagctcccctagttctagtgcccccaattccccagcagggtccgggcacatccggcccagcactctccacggtcttgcacccaaactcggcgggcagcggtaccggtccggaaggcgaaagtccgccggcaacatcccactgtccccgctggcccggacgccctctccaaccccgcaacccacctccccgcagcggtcaccatcccctcttctgggacactcactgggcaattccaagatcgcgcaagcctttcccagcaagatgcactccccgcccaccatcgtcagacacatcgtgaggcccaagagtgcggagccccccaggtccccgctgctcaagcgcgtgcagtccgaggagaagctgtcgccctcttacggcagtgacaagaagcacctgtgctcccgcaagcacagcctggaggtgacccaagaggaggtgcagcgggagcagtcccagcgggaggcgccgctgcagagcctggatgagaacgtgtgcgacgtgccgccgctcagccgcgcccggccagtggagcaaggctgcctgaaacgcccagtctcccggaaggtgggccgccaggagtctgtggacgacctggaccgcgacaagctgaaggccaaggtggtggtgaagaaagcagacggcttcccagagaaacaggaatcccaccagaaatcccatggacccgggagtgatttggaaaactttgctctgtttaagctggaagagagagagaagaaagtctatccgaaggctgtggaaaggtcaagtacttttgaaaacaaagcgtctatgcaggaggcgccaccgctgggcagcctgctgaaggatgctcttcacaagcaggccagcgtgcgcgccagcgagggtgcgatgtcggatggccgggtgcctgcggagcaccgccagggtggcggggacttcagacgggcccccgctcctggcaccctccaggatggtctctgccactccctcgacaggggcatctctgggaagggggaaggcacggagaagtcctcccaggccaaggagcttctccgatgtgaaaagttagacagcaagctggccaacatcgattacctccgaaagaaaatgtcacttgaggacaaagaggacaacctctgccctgtgctgaagcccaagatgacagctggctcccacgaatgcctgccagggaacccagtccgacccacgggtgggcagcaggagcccccgccggcttctgagagccgagcttttgtcagcagcacccatgcagctcagatgagtgccgtctcttttgttcccctcaaggccttaacaggccgggtggacagtggaacggagaagcctggcttggttgctcctgagtcccctgttaggaagagcccctccgagtataagctggaaggtaggtctgtctcatgcctgaagccgatcgagggcactctggacattgctctcctgtccggacctcaggcctccaagacagaactgccttccccagagtctgcacagagccccagcccaagtggtgacgtgagggcctctgtgccaccagttctccccagcagcagtgggaaaaagaacgataccaccagtgcaagagagctttctccttccagcttaaagatgaataaatcctacctgctggagccttggttcctgccccccagccgaggtctccagaattcaccagcagtttccctgcctgacccagagttcaagagggacaggaaaggtccccatcctactgccaggagccctggaacagtcatggaaagcaatccccaacagagagagggcagctcccctaaacaccaagaccacaccactgaccccaagcttctgacctgcctggggcagaacctccacagccctgacctggccaggccacgctgcccgctcccacctgaagcttccccctcaagggagaagccaggcctgagggaatcgtctgaaagaggccctcccacagccagaagcgagcgctctgctgcgagggctgacacatgcagagagccctccatggaactgtgctttccagaaactgcgaaaaccagtgacaactccaaaaatctcctctctgtgggaaggacccacccagatttctatacacagacccaggccatggagaaagcatgggcgccgggtgggaaaacgaaccacaaagatggcccaggtgaggcgaggcccccgcccagagacaactcctctctgcactcagctggaattccctgtgagaaggagctgggcaaggtgaggcgtggcgtggaacccaagcccgaagcgcttcttgccaggcggtctctgcagccacctggaattgagagtgagaagagtgaaaagctctccagtttcccatctttgcagaaagatggtgccaaggaacctgaaaggaaggagcagcctctacaaaggcatcccagcagcatccctccgccccctctgacggccaaagacctgtccagcccggctgccaggcagcattgcagttccccaagccacgcttctggcagagagccgggggccaagcccagcactgcagagcccagctcgagcccccaggaccctcccaagcctgttgctgcgcacagtgaaagcagcagccacaagccccggcctggccctgacccgggccctccaaagactaagcaccccgaccggtccctctcctctcagaaaccaagtgtcggggccacaaagggcaaagagcctgccactcagtccctcggtggctctagcagagaggggaagggccacagtaagagtgggccggatgtgtttcctgctaccccaggctcccagaacaaagccagcgatgggattggccagggagaaggtgggccctctgtcccactgcacactgacagggctcctctagacgccaagccacaacccaccagtggtgggcggcccctggaggtgctggagaagcctgtgcatttgccaaggccgggacacccagggcctagtgagccagcggaccagaaactgtccgctgttggtgaaaagcaaaccctgtctccaaagcaccccaaaccatccactgtgaaagattgccccaccctgtgcaaacagacagacaacagacagacagacaaaagcccgagtcagccggccgccaacaccgacagaagggcggaagggaagaaatgcactgaagcactttatgctccagcagagggcgacaagctcgaggccggcctttcctttgtgcatagcgagaaccggttgaaaggcgcggagcggccagccgcgggggtggggaagggcttccctgaggccagagggaaagggcccggtccccagaagccaccgacggaggcagacaagcccaatggcatgaaacggtccccctcagccactgggcagagttctttccgatccacggccctcccggaaaagtctctgagctgctcctccagcttccctgaaaccagggccggagttagagaggcctctgcagccagcagcgacacctcttctgccaaggccgccgggggcatgctggagcttccagcccccagcaacagggaccataggaaggctcagcctgccggggagggccgaacccacatgacaaagagtgactccctgccctccttccgggtctccaccctgcctctggagtcacaccaccccgacccaaacaccatgggcggggccagccaccgggacagggctctctcggtgactgccaccgtaggggaaaccaaagggaaggaccctgccccagcccagcctcccccagctaggaaacagaacgtgggcagagacgtgaccaagccatccccagccccaaacactgaccgccccatctctctttctaatgagaaggactttgtggtacggcagaggcgggggaaagagagtttgcgtagcagccctcacaaaaaggccttgtaa

SEQ ID NO: 153856 - DNA, 7586 bp, Homo sapiens
  Payload ID: 10248
  Gene Symbol: MAST4
  Gene Name: microtubule associated serine/threonine kinase family member 4
  Uniprot ID: O15021
  ENST ID: ENST00000403666
  CDS Start-End: 69-7373
gtgctgaagtagaggtagtacagcatggctagactgttgtgagaggctcagagaaagcagagggtgagatggatgagtccagcattctaagacgaagagggctccagaaggagctgagtctccccagaagaggaagtttgatagattcccagaagtggaattgcttggtcaaacgttgccgaacaagcaaccggaaaagcttaataggcaatgggcagtcaccagcattgcctcgaccacactcacctctctctgctcatgcaggaaatagccctcaagatagtccaagaaatttctcccccagtgcctcagcccatttttcatttgcacggaggactgatggacgccgctggtcgttggcttctctcccttcctctggctatgggacaaacacacccagctctacggtctcttcatcctgttcctcccaggagaagttgcatcagttaccataccaaccaacaccagacgagttacacttcttatcaaaacatttctgtaccaccgaaagcatcgccactgagaacagatgcaggaacacgccgatgcgcccccgttcccgaagtctgagccctggacgttctcccgcctgctgtgaccatgaaataattatgatgaaccatgtctacaaagaaaggttcccaaaggctacagctcagatggaagaacgtctaaaggaaattatcaccagctactctcctgacaacgttctacccttagcagatggagtgcttagtttcactcaccaccagattattgaactggctcgagattgcttggataaatcccaccagggcctcatcacctcacgatacttccttgaattacagcacaaattagataagttgctacaggaggctcatgatcgttcagaaagtggagaattggcatttattaaacaactagttcgaaagatcctaattgttattgcccgccctgctcggttattagagtgcctggaatttgatccggaagaattttactacctattggaagcagcagaaggccatgccaaagaaggacagggtattaaaaccgacattcccaggtacatcattagccaactgggactcaataaggatcccttggaagaaatggctcatttgggaaactacgatagtgggacagcagaaacaccagaaacagatgaatcagtgagtagctctaatgcctccctgaaacttcgaaggaaacctcgggaaagtgattttgaaacgattaaattgattagcaatggagcctatggggcagtctactttgttcggcataaagaatcccggcagaggtttgccatgaagaagattaataaacagaacctcatccttcgaaaccagatccagcaggcctttgtggagcgggatatcctgacttttgcagaaaacccctttgttgtcagcatgtattgctcctttgaaacaaggcgccacttgtgcatggtcatggaatatgtggaagggggagactgtgctactttaatgaaaaacatgggtcctctccctgttgatatggccagaatgtactttgctgagacggtcttggccttggaatatttacataattatggaattgtacacagggatttgaaaccagacaacttgttggttacctccatggggcacataaagctgacagattttggattatctaaggtgggactaatgagcatgactaccaacctttacgagggtcatattgagaaggatgctagagagttcctggataaacaggtctgtggcacacctgaatacattgcaccagaagtgattctgaggcagggttatggaaagccggtggactggtgggccatggggattatcctctatgaatttctggttggatgcgtgccattctttggggatactccagaggagctatttggacaagtcatcagtgatgagatcaactggcctgagaaggatgaggcacccccacctgatgcccaggatctgattaccttactcctcaggcagaatcccctggagaggctgggaacaggtggtgcatatgaagtcaaacagcatcgattcttccgttctttagactggaacagtttgctgagacagaaggcagaatttattccccaactggaatctgaggatgacacaagttattttgatactcggtctgagaagtatcatcatatggaaacggaggaagaagatgacacaaatgatgaagactttaatgtggaaataaggcagttttcttcatgttcacacaggttttcaaaagttttcagcagtatagatcgaatcactcagaattcagcagaagagaaggaagactctgtggacaaaaccaaaagcaccaccttgccatccacagaaacactgagctggagttcagaatattctgaaatgcaacagctatcaacatccaactcttcagatactgaaagcaacagacataaactcagttctggcctacttcccaaactggctatttcaacagagggagagcaagatgaagctgcctcctgccctggagacccccatgaggagccaggaaagccagcccttcctcctgaagagtgtgcccaggaggagcctgaggtcaccaccccagccagcaccatcagcagctccaccctgtcagttggcagtttttcagagcacttggatcagataaatggacgaagcgagtgtgtggacagtacagataattcctcaaagccatccagtgaacccgcttctcacatggctcggcagcgattagaaagcacagaaaaaaagaaaatctcggggaaagtcacaaagtccctctctgccagtgctctttccctcatgatcccaggagatatgtttgctgtttcccctctgggaagtccaatgtctccccattccctgtcctcggacccttcttcttcacgagattcctctcccagccgagattcctcagcagcttctgccagtccacatcagccgattgtgatccacagttcggggaagaactacggctttaccatccgagccatccgggtgtatgtgggagacagtgacatctatacagtgcaccatatcgtctggaatgtagaagaaggaagtccggcatgccaggcaggactgaaggctggagatcttatcactcacatcaatggagaaccagtgcatggacttgtccacacagaagttatagaactcctactgaagagtgggaataaggtgtcaatcactactaccccatttgaaaacacatcaatcaaaactggaccagccaggagaaacagctataagagccggatggtgaggcggagcaagaaatccaagaagaaagaaagtctcgaaaggaggagatctcttttcaaaaagctagccaagcagccttctcctttactccacaccagccgaagtttctcctgcttgaacagatccctgtcatcgggtgagagcctcccaggttcccccactcatagcttgtctccccggtctccaacaccaagctaccgctccacccctgacttcccatctggtactaattcctcccagagcagctcccctagttctagtgcccccaattccccagcagggtccgggcacatccggcccagcactctccacggtcttgcacccaaactcggcgggcagcggtaccggtccggaaggcgaaagtccgccggcaacatcccactgtccccgctggcccggacgccctctccaaccccgcaacccacctccccgcagcggtcaccatcccctcttctgggacactcactgggcaattccaagatcgcgcaagcctttcccagcaagatgcactccccgcccaccatcgtcagacacatcgtgaggcccaagagtgcggagccccccaggtccccgctgctcaagcgcgtgcagtccgaggagaagctgtcgccctcttacggcagtgacaagaagcacctgtgctcccgcaagcacagcctggaggtgacccaagaggaggtgcagcgggagcagtcccagcgggaggcgccgctgcagagcctggatgagaacgtgtgcgacgtgccgccgctcagccgcgcccggccagtggagcaaggctgcctgaaacgcccagtctcccggaaggtgggccgccaggagtctgtggacgacctggaccgcgacaagctgaaggccaaggtggtggtgaagaaagcagacggcttcccagagaaacaggaatcccaccagaaatcccatggacccgggagtgatttggaaaactttgctctgtttaagctggaagagagagagaagaaagtctatccgaaggctgtggaaaggtcaagtacttttgaaaacaaagcgtctatgcaggaggcgccaccgctgggcagcctgctgaaggatgctcttcacaagcaggccagcgtgcgcgccagcgagggtgcgatgtcggatggccgggtgcctgcggagcaccgccagggtggcggggacttcagacgggcccccgctcctggcaccctccaggatggtctctgccactccctcgacaggggcatctctgggaagggggaaggcacggagaagtcctcccaggccaaggagcttctccgatgtgaaaagttagacagcaagctggccaacatcgattacctccgaaagaaaatgtcacttgaggacaaagaggacaacctctgccctgtgctgaagcccaagatgacagctggctcccacgaatgcctgccagggaacccagtccgacccacgggtgggcagcaggagcccccgccggcttctgagagccgagcttttgtcagcagcacccatgcagctcagatgagtgccgtctcttttgttcccctcaaggccttaacaggccgggtggacagtggaacggagaagcctggcttggttgctcctgagtcccctgttaggaagagcccctccgagtataagctggaaggtaggtctgtctcatgcctgaagccgatcgagggcactctggacattgctctcctgtccggacctcaggcctccaagacagaactgccttccccagagtctgcacagagccccagcccaagtggtgacgtgagggcctctgtgccaccagttctccccagcagcagtgggaaaaagaacgataccaccagtgcaagagagctttctccttccagcttaaagatgaataaatcctacctgctggagccttggttcctgccccccagccgaggtctccagaattcaccagcagtttccctgcctgacccagagttcaagagggacaggaaaggtccccatcctactgccaggagccctggaacagtcatggaaagcaatccccaacagagagagggcagctcccctaaacaccaagaccacaccactgaccccaagcttctgacctgcctggggcagaacctccacagccctgacctggccaggccacgctgcccgctcccacctgaagcttccccctcaagggagaagccaggcctgagggaatcgtctgaaagaggccctcccacagccagaagcgagcgctctgctgcgagggctgacacatgcagagagccctccatggaactgtgctttccagaaactgcgaaaaccagtgacaactccaaaaatctcctctctgtgggaaggacccacccagatttctatacacagacccaggccatggagaaagcatgggcgccgggtgggaaaacgaaccacaaagatggcccaggtgaggcgaggcccccgcccagagacaactcctctctgcactcagctggaattccctgtgagaaggagctgggcaaggtgaggcgtggcgtggaacccaagcccgaagcgcttcttgccaggcggtctctgcagccacctggaattgagagtgagaagagtgaaaagctctccagtttcccatctttgcagaaagatggtgccaaggaacctgaaaggaaggagcagcctctacaaaggcatcccagcagcatccctccgccccctctgacggccaaagacctgtccagcccggctgccaggcagcattgcagttccccaagccacgcttctggcagagagccgggggccaagcccagcactgcagagcccagctcgagcccccaggaccctcccaagcctgttgctgcgcacagtgaaagcagcagccacaagccccggcctggccctgacccgggccctccaaagactaagcaccccgaccggtccctctcctctcagaaaccaagtgtcggggccacaaagggcaaagagcctgccactcagtccctcggtggctctagcagagaggggaagggccacagtaagagtgggccggatgtgtttcctgctaccccaggctcccagaacaaagccagcgatgggattggccagggagaaggtgggccctctgtcccactgcacactgacagggctcctctagacgccaagccacaacccaccagtggtgggcggcccctggaggtgctggagaagcctgtgcatttgccaaggccgggacacccagggcctagtgagccagcggaccagaaactgtccgctgttggtgaaaagcaaaccctgtctccaaagcaccccaaaccatccactgtgaaagattgccccaccctgtgcaaacagacagacaacagacagacagacaaaagcccgagtcagccggccgccaacaccgacagaagggcggaagggaagaaatgcactgaagcactttatgctccagcagagggcgacaagctcgaggccggcctttcctttgtgcatagcgagaaccggttgaaaggcgcggagcggccagccgcgggggtggggaagggcttccctgaggccagagggaaagggcccggtccccagaagccaccgacggaggcagacaagcccaatggcatgaaacggtccccctcagccactgggcagagttctttccgatccacggccctcccggaaaagtctctgagctgctcctccagcttccctgaaaccagggccggagttagagaggcctctgcagccagcagcgacacctcttctgccaaggccgccgggggcatgctggagcttccagcccccagcaacagggaccataggaaggctcagcctgccggggagggccgaacccacatgacaaagagtgactccctgccctccttccgggtctccaccctgcctctggagtcacaccaccccgacccaaacaccatgggcggggccagccaccgggacagggctctctcggtgactgccaccgtaggggaaaccaaagggaaggaccctgccccagcccagcctcccccagctaggaaacagaacgtgggcagagacgtgaccaagccatccccagccccaaacactgaccgccccatctctctttctaatgagaaggactttgtggtacggcagaggcgggggaaagagagtttgcgtagcagccctcacaaaaaggccttgtaacggggagggcccaggggcaggactgtggagacccgtcctgaacgggcgactgtgtcttgactacctttcaaaaccagcactgtgtgggaatgtccgccaggcagagctcggagcctcattgagacaggggagagagaaagacaaagaggggaccttcttccagatgccttcccagttgtaaccggtaaaactgttaccagatagtgtttgtac

SEQ ID NO: 153857 - DNA, 717 bp, Homo sapiens
  Payload ID: 10248
  Gene Symbol: MAST4
  Gene Name: microtubule associated serine/threonine kinase family member 4
  ENST ID: ENST00000406039
  CDS Start-End: 1-717
atgggggagaaagtttcggaggcgccagagccggtgccccgcggctgcagtggccacggcagccggactccagcctctgcgctggtcgccgcgtcctctccgggtgcttcctcggccgagtcctcctcgggctcagaaactctgtcggaggaaggggagcccggcggcttctccagagagcatcagccgccgccgccgccgccgttgggaggcaccctgggcgcccgggcgcccgccgcgtgggctccggcaagcgtgctgctggagcgcggagtccttgcgctgccgccgccgcttcccggaggagctgtgccgcccgcgccccggggcagcagcgcgtcccaggaggagcaggacgaggagcttgaccacatattatcccctccacccatgccgtttcggaaatgcagcaacccagatgtggcttctggccctggaaaatcactgaagtataaaagacagctgagtgaggatggaagacagctaaggcgagggagcctgggaggagccctgactgggaggtaccttcttccaaacccggtggcgggacaggcctggccggcctctgcagagacgtccaacctcgtgcgcatgcgcagccaggccctgggccagtcggcgccctcgctcaccgccagcctgaaggagctgagtctccccagaagaggaagtttccctgtgtgtccaaatgctgggagaacatcaccccttggatga

SEQ ID NO: 153858 - DNA, 1066 bp, Homo sapiens
  Payload ID: 10248
  Gene Symbol: MAST4
  Gene Name: microtubule associated serine/threonine kinase family member 4
  Uniprot ID: O15021
  ENST ID: ENST00000406374
  CDS Start-End: 277-1029
gcagcgcgggagcacagtggagcgcagatcgcggacccgagcgggcatgtccccgcgcgcgggagcctccgtttgcggccgggcccgggcggctgtgaacttagcagcgggctcctgcggccccgtcactgccatgtagtcgctggcggggctccctgcagcccgggagcggcagtgccagtgagcctgagcccaggagcccgcgtcttccccgggaggcgctgagtgcgcgccgcgcccccgccgctcgggaggcactttgggccagacagggaaatgggggagaaagtttcggaggcgccagagccggtgccccgcggctgcagtggccacggcagccggactccagcctctgcgctggtcgccgcgtcctctccgggtgcttcctcggccgagtcctcctcgggctcagaaactctgtcggaggaaggggagcccggcggcttctccagagagcatcagccgccgccgccgccgccgttgggaggcaccctgggcgcccgggcgcccgccgcgtgggctccggcaagcgtgctgctggagcgcggagtccttgcgctgccgccgccgcttcccggaggagctgtgccgcccgcgccccggggcagcagcgcgtcccaggaggagcaggacgaggagcttgaccacatattatcccctccacccatgccgtttcggaaatgcagcaacccagatgtggcttctggccctggaaaatcactgaagtataaaagacagctgagtgaggatggaagacagctaaggcgagggagcctgggaggagccctgactgggaggtaccttcttccaaacccggtggcgggacaggcctggccggcctctgcagagacgtccaacctcgtgcgcatgcgcagccaggccctgggccagtcggcgccctcgctcaccgccagcctgaaggagctgagtctccccagaagaggaagtttgatagattcccagaagtggaattgcttggtcaaacgccctgtgtgtccaaatgctgggagaacatcaccccttggatgaattgccaccacattaaataaaacatatccaaagctca

SEQ ID NO: 153859 - DNA, 559 bp, Homo sapiens
  Payload ID: 10248
  Gene Symbol: MAST4
  Gene Name: microtubule associated serine/threonine kinase family member 4
  ENST ID: ENST00000407621
  CDS Start-End: 352-522
gaaaaggacttttcatttcactgaggtgaaaagtgggtctgtgagtagagcgactttctttaaaaaaaaaaaaaaaaatcagaaaccaattacttgatatgcagagctgcaagcctcgttcctttaacaaaatcagtgcagtgtgcactgccgttaacctgaggaaagcagctgacatctcttgattacggctagaggtggaaggacccaaacttgcagcctccccctccccctcgagagagtgttagtccagtcctttagagaggttcggtttggctctctgtcatcaccgggacgctggcagggagtgtgtgtcatggttacaatagagtgtgctaacatataacaaccatgaaagcccagcgggaaaggctacagattccggggctgaccttggatctcactcccaggagcctgagtccaaccccatccagcccaggcagtccttgtagtcctctcttggcctttcacttttggagccctgtgtgtccaaatgctgggagaacatcaccccttggatgaattgccaccacattaaataaaacatatccaaagctca

SEQ ID NO: 153860 - DNA, 10711 bp, Homo sapiens
  Payload ID: 10248
  Gene Symbol: MAST4
  Gene Name: microtubule associated serine/threonine kinase family member 4
  ENST ID: ENST00000403625
  CDS Start-End: 296-8167
cagtacccgcggctcgggtgcagcgcgggagcacagtggagcgcagatcgcggacccgagcgggcatgtccccgcgcgcgggagcctccgtttgcggccgggcccgggcggctgtgaacttagcagcgggctcctgcggccccgtcactgccatgtagtcgctggcggggctccctgcagcccgggagcggcagtgccagtgagcctgagcccaggagcccgcgtcttccccgggaggcgctgagtgcgcgccgcgcccccgccgctcgggaggcactttgggccagacagggaaatgggggagaaagtttcggaggcgccagagccggtgccccgcggctgcagtggccacggcagccggactccagcctctgcgctggtcgccgcgtcctctccgggtgcttcctcggccgagtcctcctcgggctcagaaactctgtcggaggaaggggagcccggcggcttctccagagagcatcagccgccgccgccgccgccgttgggaggcaccctgggcgcccgggcgcccgccgcgtgggctccggcaagcgtgctgctggagcgcggagtccttgcgctgccgccgccgcttcccggaggagctgtgccgcccgcgccccggggcagcagcgcgtcccaggaggagcaggacgaggagcttgaccacatattatcccctccacccatgccgtttcggaaatgcagcaacccagatgtggcttctggccctggaaaatcactgaagtataaaagacagctgagtgaggatggaagacagctaaggcgagggagcctgggaggagccctgactgggaggtaccttcttccaaacccggtggcgggacaggcctggccggcctctgcagagacgtccaacctcgtgcgcatgcgcagccaggccctgggccagtcggcgccctcgctcaccgccagcctgaaggagctgagtctccccagaagaggaagtttttgccgaacaagcaaccggaaaagcttaataggcaatgggcagtcaccagcattgcctcgaccacactcacctctctctgctcatgcaggaaatagccctcaagatagtccaagaaatttctcccccagtgcctcagcccatttttcatttgcacggaggactgatggacgccgctggtcgttggcttctctcccttcctctggctatgggacaaacacacccagctctacggtctcttcatcctgttcctcccaggagaagttgcatcagttaccataccaaccaacaccagacgagttacacttcttatcaaaacatttctgtaccaccgaaagcatcgccactgagaacagatgcaggaacacgccgatgcgcccccgttcccgaagtctgagccctggacgttctcccgcctgctgtgaccatgaaataattatgatgaaccatgtctacaaagaaaggttcccaaaggctacagctcagatggaagaacgtctaaaggaaattatcaccagctactctcctgacaacgttctacccttagcagatggagtgcttagtttcactcaccaccagattattgaactggctcgagattgcttggataaatcccaccagggcctcatcacctcacgatacttccttgaattacagcacaaattagataagttgctacaggaggctcatgatcgttcagaaagtggagaattggcatttattaaacaactagttcgaaagatcctaattgttattgcccgccctgctcggttattagagtgcctggaatttgatccggaagaattttactacctattggaagcagcagaaggccatgccaaagaaggacagggtattaaaaccgacattcccaggtacatcattagccaactgggactcaataaggatcccttggaagaaatggctcatttgggaaactacgatagtgggacagcagaaacaccagaaacagatgaatcagtgagtagctctaatgcctccctgaaacttcgaaggaaacctcgggaaagtgattttgaaacgattaaattgattagcaatggagcctatggggcagtctactttgttcggcataaagaatcccggcagaggtttgccatgaagaagattaataaacagaacctcatccttcgaaaccagatccagcaggcctttgtggagcgggatatcctgacttttgcagaaaacccctttgttgtcagcatgtattgctcctttgaaacaaggcgccacttgtgcatggtcatggaatatgtggaagggggagactgtgctactttaatgaaaaacatgggtcctctccctgttgatatggccagaatgtactttgctgagacggtcttggccttggaatatttacataattatggaattgtacacagggatttgaaaccagacaacttgttggttacctccatggggcacataaagctgacagattttggattatctaaggtgggactaatgagcatgactaccaacctttacgagggtcatattgagaaggatgctagagagttcctggataaacaggtctgtggcacacctgaatacattgcaccagaagtgattctgaggcagggttatggaaagccggtggactggtgggccatggggattatcctctatgaatttctggttggatgcgtgccattctttggggatactccagaggagctatttggacaagtcatcagtgatgagatcaactggcctgagaaggatgaggcacccccacctgatgcccaggatctgattaccttactcctcaggcagaatcccctggagaggctgggaacaggtggtgcatatgaagtcaaacagcatcgattcttccgttctttagactggaacagtttgctgagacagaaggcagaatttattccccaactggaatctgaggatgacacaagttattttgatactcggtctgagaagtatcatcatatggaaacggaggaagaagatgacacaaatgatgaagactttaatgtggaaataaggcagttttcttcatgttcacacaggttttcaaaagttttcagcagtatagatcgaatcactcagaattcagcagaagagaaggaagactctgtggacaaaaccaaaagcaccaccttgccatccacagaaacactgagctggagttcagaatattctgaaatgcaacagctatcaacatccaactcttcagatactgaaagcaacagacataaactcagttctggcctacttcccaaactggctatttcaacagagggagagcaagatgaagctgcctcctgccctggagacccccatgaggagccaggaaagccagcccttcctcctgaagagtgtgcccaggaggagcctgaggtcaccaccccagccagcaccatcagcagctccaccctgtcagttggcagtttttcagagcacttggatcagataaatggacgaagcgagtgtgtggacagtacagataattcctcaaagccatccagtgaacccgcttctcacatggctcggcagcgattagaaagcacagaaaaaaagaaaatctcggggaaagtcacaaagtccctctctgccagtgctctttccctcatgatcccaggagatatgtttgctgtttcccctctgggaagtccaatgtctccccattccctgtcctcggacccttcttcttcacgagattcctctcccagccgagattcctcagcagcttctgccagtccacatcagccgattgtgatccacagttcggggaagaactacggctttaccatccgagccatccgggtgtatgtgggagacagtgacatctatacagtgcaccatatcgtctggaatgtagaagaaggaagtccggcatgccaggcaggactgaaggctggagatcttatcactcacatcaatggagaaccagtgcatggacttgtccacacagaagttatagaactcctactgaagagtgggaataaggtgtcaatcactactaccccatttgaaaacacatcaatcaaaactggaccagccaggagaaacagctataagagccggatggtgaggcggagcaagaaatccaagaagaaagaaagtctcgaaaggaggagatctcttttcaaaaagctagccaagcagccttctcctttactccacaccagccgaagtttctcctgcttgaacagatccctgtcatcgggtgagagcctcccaggttcccccactcatagcttgtctccccggtctccaacaccaagctaccgctccacccctgacttcccatctggtactaattcctcccagagcagctcccctagttctagtgcccccaattccccagcagggtccgggcacatccggcccagcactctccacggtcttgcacccaaactcggcgggcagcggtaccggtccggaaggcgaaagtccgccggcaacatcccactgtccccgctggcccggacgccctctccaaccccgcaacccacctccccgcagcggtcaccatcccctcttctgggacactcactgggcaattccaagatcgcgcaagcctttcccagcaagatgcactccccgcccaccatcgtcagacacatcgtgaggcccaagagtgcggagccccccaggtccccgctgctcaagcgcgtgcagtccgaggagaagctgtcgccctcttacggcagtgacaagaagcacctgtgctcccgcaagcacagcctggaggtgacccaagaggaggtgcagcgggagcagtcccagcgggaggcgccgctgcagagcctggatgagaacgtgtgcgacgtgccgccgctcagccgcgcccggccagtggagcaaggctgcctgaaacgcccagtctcccggaaggtgggccgccaggagtctgtggacgacctggaccgcgacaagctgaaggccaaggtggtggtgaagaaagcagacggcttcccagagaaacaggaatcccaccagaaatcccatggacccgggagtgatttggaaaactttgctctgtttaagctggaagagagagagaagaaagtctatccgaaggctgtggaaaggtcaagtacttttgaaaacaaagcgtctatgcaggaggcgccaccgctgggcagcctgctgaaggatgctcttcacaagcaggccagcgtgcgcgccagcgagggtgcgatgtcggatggccgggtgcctgcggagcaccgccagggtggcggggacttcagacgggcccccgctcctggcaccctccaggatggtctctgccactccctcgacaggggcatctctgggaagggggaaggcacggagaagtcctcccaggccaaggagcttctccgatgtgaaaagttagacagcaagctggccaacatcgattacctccgaaagaaaatgtcacttgaggacaaagaggacaacctctgccctgtgctgaagcccaagatgacagctggctcccacgaatgcctgccagggaacccagtccgacccacgggtgggcagcaggagcccccgccggcttctgagagccgagcttttgtcagcagcacccatgcagctcagatgagtgccgtctcttttgttcccctcaaggccttaacaggccgggtggacagtggaacggagaagcctggcttggttgctcctgagtcccctgttaggaagagcccctccgagtataagctggaaggtaggtctgtctcatgcctgaagccgatcgagggcactctggacattgctctcctgtccggacctcaggcctccaagacagaactgccttccccagagtctgcacagagccccagcccaagtggtgacgtgagggcctctgtgccaccagttctccccagcagcagtgggaaaaagaacgataccaccagtgcaagagagctttctccttccagcttaaagatgaataaatcctacctgctggagccttggttcctgccccccagccgaggtctccagaattcaccagcagtttccctgcctgacccagagttcaagagggacaggaaaggtccccatcctactgccaggagccctggaacagtcatggaaagcaatccccaacagagagagggcagctcccctaaacaccaagaccacaccactgaccccaagcttctgacctgcctggggcagaacctccacagccctgacctggccaggccacgctgcccgctcccacctgaagcttccccctcaagggagaagccaggcctgagggaatcgtctgaaagaggccctcccacagccagaagcgagcgctctgctgcgagggctgacacatgcagagagccctccatggaactgtgctttccagaaactgcgaaaaccagtgacaactccaaaaatctcctctctgtgggaaggacccacccagatttctatacacagacccaggccatggagaaagcatgggcgccgggtgggaaaacgaaccacaaagatggcccaggtgaggcgaggcccccgcccagagacaactcctctctgcactcagctggaattccctgtgagaaggagctgggcaaggtgaggcgtggcgtggaacccaagcccgaagcgcttcttgccaggcggtctctgcagccacctggaattgagagtgagaagagtgaaaagctctccagtttcccatctttgcagaaagatggtgccaaggaacctgaaaggaaggagcagcctctacaaaggcatcccagcagcatccctccgccccctctgacggccaaagacctgtccagcccggctgccaggcagcattgcagttccccaagccacgcttctggcagagagccgggggccaagcccagcactgcagagcccagctcgagcccccaggaccctcccaagcctgttgctgcgcacagtgaaagcagcagccacaagccccggcctggccctgacccgggccctccaaagactaagcaccccgaccggtccctctcctctcagaaaccaagtgtcggggccacaaagggcaaagagcctgccactcagtccctcggtggctctagcagagaggggaagggccacagtaagagtgggccggatgtgtttcctgctaccccaggctcccagaacaaagccagcgatgggattggccagggagaaggtgggccctctgtcccactgcacactgacagggctcctctagacgccaagccacaacccaccagtggtgggcggcccctggaggtgctggagaagcctgtgcatttgccaaggccgggacacccagggcctagtgagccagcggaccagaaactgtccgctgttggtgaaaagcaaaccctgtctccaaagcaccccaaaccatccactgtgaaagattgccccaccctgtgcaaacagacagacaacagacagacagacaaaagcccgagtcagccggccgccaacaccgacagaagggcggaagggaagaaatgcactgaagcactttatgctccagcagagggcgacaagctcgaggccggcctttcctttgtgcatagcgagaaccggttgaaaggcgcggagcggccagccgcgggggtggggaagggcttccctgaggccagagggaaagggcccggtccccagaagccaccgacggaggcagacaagcccaatggcatgaaacggtccccctcagccactgggcagagttctttccgatccacggccctcccggaaaagtctctgagctgctcctccagcttccctgaaaccagggccggagttagagaggcctctgcagccagcagcgacacctcttctgccaaggccgccgggggcatgctggagcttccagcccccagcaacagggaccataggaaggctcagcctgccggggagggccgaacccacatgacaaagagtgactccctgccctccttccgggtctccaccctgcctctggagtcacaccaccccgacccaaacaccatgggcggggccagccaccgggacagggctctctcggtgactgccaccgtaggggaaaccaaagggaaggaccctgccccagcccagcctcccccagctaggaaacagaacgtgggcagagacgtgaccaagccatccccagccccaaacactgaccgccccatctctctttctaatgagaaggactttgtggtacggcagaggcgggggaaagagagtttgcgtagcagccctcacaaaaaggccttgtaacggggagggcccaggggcaggactgtggagacccgtcctgaacgggcgactgtgtcttgactacctttcaaaaccagcactgtgtgggaatgtccgccaggcagagctcggagcctcattgagacaggggagagagaaagacaaagaggggaccttcttccagatgccttcccagttgtaaccggtaaaactgttaccagatagtgtttgtacaaaaaaaaaaaaaaaaaaaaaaaaaaaaattacctttacagttgagggttgttgaggaaaatgattttctttgtaaatatatagcatcgtgtttggtttgggatgtagagtctatacctggctgctgattgcgtcgtttactacagctttttttaaataagatttttgctttaccatttatcataatgtagtaatgaagcaaaatggtcaaaactgggtgtgtgtgaacagagatacacccatattcgtgtatatacacatccacctacatgttttggtctgtggtttaagagactatttcaaggttccatttttataagctaaaacattctaagttaagatggaagaaagccctaaacacagtagattctgagtttttatgtgtattttaaccagagtttctgatagtactgtatctggctacctatatttccagatctaaagcaagaactactctaagtactgcatttggaatcctcctccattaggaatggccaggacaagtggagctagccattttcattacacggccatcccaatggacactggatccctggtccaactgtctaaaaggccagttgttcctttctgtggatgtggatgtctggccttcacctgaggtagagcggggactataaacacacatcaactttctttctgtttgctttcttttccttcttttcaaactcttaaactcaggcctttatgctgtgagtgactagtccaagaagcacacattttgtagtagtcctgcaccagccctgctcttgaataaaaaggaaaattactggctgcacccaaatcttctagtacttgagtaataagcatcaggcattggaagaggttttaaatttgcttttttgaggaaaagaactgggggtggattttggcatcgtagcatatcgattaaagaataatcaggacatcagatacattttaatacatagctggggccttatgttgtagatgaagcttgctgtttttagcaagttcctgggtttcacattcatttctgctgcatctagtagctccacacatttcataacctgatctctttatttgtatgcaaaaaatactgtcttaatacagagcagcatttttgtaacaaagagactcgctggagctatttggtgcttgaatgtgaccatcctttttacttttgctaagccttatttaaattttgtataccgtggaatatgtagaatttgtcaaatcattttagtgctgaaggtttttgatttcttgtttttgtttctgttgttgcagtttctttggtggcttgttttgtattgtaagatggcacttgctgatataaatactaaggcactaagagaaaatacagataagtatttataagttgcttgggaaccatagcagaattttttgtttggttttgtaagagaaaaaaaattaccaataaataactgatctagcacccaaactctcttgggggatgtcttagtatcttcacgctataaaattgttcatctaagcacagcatcatcttatggccttatggattgtaaatcttctagtgaggctataaactccactctgaaaacaaaggcataacttaaccgactgctcagttgtccttcgttgtaaaatgaattggctttgggaaaaaggaaaaaaacaaacaaaaaaagaaaaagaaaaaagcctcctccttgcccctaatttttttttcccatatggttttagccattccccatcactatattgtgaagctgtaaaaatatatatatatactttacaagagtttactaatggatttcaaaactggtctcaacgtttataatacatatctgtgtttggcagttgtcataacccaatcctacattcagccatcgggacaagtctgtcggggaggtagttcatggtttacaagcctttgctttttaactgtccaatttcctttaaagcacaactagctatttgtttacaaatgatatttttatgtatattttgtatagtgtatcatcatttttgccaaatatgtttttcattataaatgagtaaagagtacttaaggttgcattcatgtattacatgtttgttgttgtaaacctctccaatcagctggtagaaattctcctcattgtgttctatttggtcagtctctgtgtgattgtaggatgtgctccttggtagtactcccagctgtagatttaccagcttaaaagtttgttaggatctgtgcaataaagtgtttgcagtcttattttctctaagaaattccttatggacgtcataattgttgtatattgaacaaaatatttatacttatgcagttgcataacattgaaataaaaatttagcatgaaaaga

SEQ ID NO: 153861 - DNA, 582 bp, Homo sapiens
  Payload ID: 10248
  Gene Symbol: MAST4
  Gene Name: microtubule associated serine/threonine kinase family member 4
  ENST ID: ENST00000436277
  CDS Start-End: 80-582
agacagcgctttgagcagaacgcacggctcaactcattcatatggccttgaacccacagtgaattgaagagagaaagaaatggatatgtctgaccccaatttttggactgtgctctcaaactttactttgcctcatttgaggagtgggaacaggcttcggcgaacacaaagttgccgaacaagcaaccggaaaagcttaataggcaatgggcagtcaccagcattgcctcgaccacactcacctctctctgctcatgcaggaaatagccctcaagatagtccaagaaatttctcccccagtgcctcagcccatttttcatttgcacggaggactgatggacgccgctggtcgttggcttctctcccttcctctggctatgggacaaacacacccagctctacggtctcttcatcctgttcctcccaggagaagttgcatcagttaccataccaaccaacaccagacgagttacacttcttatcaaaacatttctgtaccaccgaaagcatcgccactgagaacagatgcaggaacacgccgatgcgcccccgttcccgaagtctgagccctggacgttctcc

SEQ ID NO: 153862 - DNA, 280 bp, Homo sapiens
  Payload ID: 10248
  Gene Symbol: MAST4
  Gene Name: microtubule associated serine/threonine kinase family member 4
  ENST ID: ENST00000434115
  CDS Start-End: 1-243
aacctcgtgcgcatgcgcagccaggccctgggccagtcggcgccctcgctcaccgccagcctgaaggagctgagtctccccagaagaggaagtttgatagattcccagaagtggaattgcttggtcaaacggagcctgagtccaaccccatccagcccaggcagtccttgtagtcctctcttggcctttcacttttggagccctgtgtgtccaaatgctgggagaacatcaccccttggatgaattgccaccacattaaataaaacatatccaaagctca

SEQ ID NO: 153863 - DNA, 289 bp, Homo sapiens
  Payload ID: 10248
  Gene Symbol: MAST4
  Gene Name: microtubule associated serine/threonine kinase family member 4
  ENST ID: ENST00000411628
  CDS Start-End: 1-200
tcaccgccagcctggaagggcagcctccgaagagccatttcaactcagcccgacatcgccagagactagtggacccagctgcttcaaaaaaggagctgagtctccccagaagaggaagtttgtgcagaagcagtgattgtgactgggtaatagacaagagaagtgagagaaactgctttctaggcaagatgctgttatgagattgtcagccctgtgtgtccaaatgctgggagaacatcaccccttggatgaattgccaccacattaaataaaacatatccaaagctca

SEQ ID NO: 153864 - DNA, 1045 bp, Homo sapiens
  Payload ID: 10248
  Gene Symbol: MAST4
  Gene Name: microtubule associated serine/threonine kinase family member 4
  ENST ID: ENST00000447738
  CDS Start-End: 243-743
agtttcccggacctttgagaggaggctgtgtgttaattaaaggctaggacgggacgggtacttctcagacatgctccaagttgttcttgagatcacagttcccatcacattttctctggagggagtgagtagataattgggattttttttttatttttggccttgtctttcttccttttttttacctctccccattttagtcatatggccttgaacccacagtgaattgaagagagaaagaaatggatatgtctgaccccaatttttggactgtgctctcaaactttactttgcctcatttgaggagtgggaacaggcttcggcgaacacaaagttgccgaacaagcaaccggaaaagcttaataggcaatgggcagtcaccagcattgcctcgaccacactcacctctctctgctcatgcaggaaatagccctcaagatagtccaagaaatttctcccccagtgcctcagcccatttttcatttgcacggaggactgatggacgccgctggtcgttggcttctctcccttcctctggctatgggacaaacacacccagctctacggtctcttcatcctgttcctcccaggagaagttgcatcagttaccataccaaccaacaccagacgagttacacttcttatcaaaacatttctgtaccaccgaaagcatcgccactgagaacagatgcaggaacacgccgatgcgcccccgttcccgaagtctgagtttaaaagggtaatttgctttgcttgcagccctggacgttctcccgcctgctgtgaccatgaaataattatgatgaaccatgtctacaaagaaaggttcccaaaggctacagctcagatggaagaacgtctaaaggaaattatcaccagctactctcctgacaacgttctacccttagcagatggagtgcttagtttcactcaccaccagattattgaactggctcgagattgcttggataaatcccaccagggcctcatcacctcacgatacttccttgaattacagcacaaattagataagttgctacaggag

SEQ ID NO: 153865 - DNA, 5273 bp, Homo sapiens
  Payload ID: 10248
  Gene Symbol: MAST4
  Gene Name: microtubule associated serine/threonine kinase family member 4
  ENST ID: ENST00000443808
  CDS Start-End: 1-5041
gtatcatcatatggaaacggaggaagaagatgacacaaatgatgaagactttaatgtggaaataaggcagttttcttcatgttcacacaggttttcaaaagttttcagcagtatagatcgaatcactcagaattcagcagaagagaaggaagactctgtggacaaaaccaaaagcaccaccttgccatccacagaaacactgagctggagttcagaatattctgaaatgcaacagctatcaacatccaactcttcagatactgaaagcaacagacataaactcagttctggcctacttcccaaactggctatttcaacagagggagagcaagatgaagctgcctcctgccctggagacccccatgaggagccaggaaagccagcccttcctcctgaagagtgtgcccaggaggagcctgaggtcaccaccccagccagcaccatcagcagctccaccctgtcagatatgtttgctgtttcccctctgggaagtccaatgtctccccattccctgtcctcggacccttcttcttcacgagattcctctcccagccgagattcctcagcagcttctgccagtccacatcagccgattgtgatccacagttcggggaagaactacggctttaccatccgagccatccgggtgtatgtgggagacagtgacatctatacagtgcaccatatcgtctggaatgtagaagaaggaagtccggcatgccaggcaggactgaaggctggagatcttatcactcacatcaatggagaaccagtgcatggacttgtccacacagaagttatagaactcctactgaagagtgggaataaggtgtcaatcactactaccccatttgaaaacacatcaatcaaaactggaccagccaggagaaacagctataagagccggatggtgaggcggagcaagaaatccaagaagaaagaaagtctcgaaaggaggagatctcttttcaaaaagctagccaagcagccttctcctttactccacaccagccgaagtttctcctgcttgaacagatccctgtcatcgggtgagagcctcccaggttcccccactcatagcttgtctccccggtctccaacaccaagctaccgctccacccctgacttcccatctggtactaattcctcccagagcagctcccctagttctagtgcccccaattccccagcagggtccgggcacatccggcccagcactctccacggtcttgcacccaaactcggcgggcagcggtaccggtccggaaggcgaaagtccgccggcaacatcccactgtccccgctggcccggacgccctctccaaccccgcaacccacctccccgcagcggtcaccatcccctcttctgggacactcactgggcaattccaagatcgcgcaagcctttcccagcaagatgcactccccgcccaccatcgtcagacacatcgtgaggcccaagagtgcggagccccccaggtccccgctgctcaagcgcgtgcagtccgaggagaagctgtcgccctcttacggcagtgacaagaagcacctgtgctcccgcaagcacagcctggaggtgacccaagaggaggtgcagcgggagcagtcccagcgggaggcgccgctgcagagcctggatgagaacgtgtgcgacgtgccgccgctcagccgcgcccggccagtggagcaaggctgcctgaaacgcccagtctcccggaaggtgggccgccaggagtctgtggacgacctggaccgcgacaagctgaaggccaaggtggtggtgaagaaagcagacggcttcccagagaaacaggaatcccaccagaaatcccatggacccgggagtgatttggaaaactttgctctgtttaagctggaagagagagagaagaaagtctatccgaaggctgtggaaaggtcaagtacttttgaaaacaaagcgtctatgcaggaggcgccaccgctgggcagcctgctgaaggatgctcttcacaagcaggccagcgtgcgcgccagcgagggtgcgatgtcggatggccgggtgcctgcggagcaccgccagggtggcggggacttcagacgggcccccgctcctggcaccctccaggatggtctctgccactccctcgacaggggcatctctgggaagggggaaggcacggagaagtcctcccaggccaaggagcttctccgatgtgaaaagttagacagcaagctggccaacatcgattacctccgaaagaaaatgtcacttgaggacaaagaggacaacctctgccctgtgctgaagcccaagatgacagctggctcccacgaatgcctgccagggaacccagtccgacccacgggtgggcagcaggagcccccgccggcttctgagagccgagcttttgtcagcagcacccatgcagctcagatgagtgccgtctcttttgttcccctcaaggccttaacaggccgggtggacagtggaacggagaagcctggcttggttgctcctgagtcccctgttaggaagagcccctccgagtataagctggaaggtaggtctgtctcatgcctgaagccgatcgagggcactctggacattgctctcctgtccggacctcaggcctccaagacagaactgccttccccagagtctgcacagagccccagcccaagtggtgacgtgagggcctctgtgccaccagttctccccagcagcagtgggaaaaagaacgataccaccagtgcaagagagctttctccttccagcttaaagatgaataaatcctacctgctggagccttggttcctgccccccagccgaggtctccagaattcaccagcagtttccctgcctgacccagagttcaagagggacaggaaaggtccccatcctactgccaggagccctggaacagtcatggaaagcaatccccaacagagagagggcagctcccctaaacaccaagaccacaccactgaccccaagcttctgacctgcctggggcagaacctccacagccctgacctggccaggccacgctgcccgctcccacctgaagcttccccctcaagggagaagccaggcctgagggaatcgtctgaaagaggccctcccacagccagaagcgagcgctctgctgcgagggctgacacatgcagagagccctccatggaactgtgctttccagaaactgcgaaaaccagtgacaactccaaaaatctcctctctgtgggaaggacccacccagatttctatacacagacccaggccatggagaaagcatgggcgccgggtgggaaaacgaaccacaaagatggcccaggtgaggcgaggcccccgcccagagacaactcctctctgcactcagctggaattccctgtgagaaggagctgggcaaggtgaggcgtggcgtggaacccaagcccgaagcgcttcttgccaggcggtctctgcagccacctggaattgagagtgagaagagtgaaaagctctccagtttcccatctttgcagaaagatggtgccaaggaacctgaaaggaaggagcagcctctacaaaggcatcccagcagcatccctccgccccctctgacggccaaagacctgtccagcccggctgccaggcagcattgcagttccccaagccacgcttctggcagagagccgggggccaagcccagcactgcagagcccagctcgagcccccaggaccctcccaagcctgttgctgcgcacagtgaaagcagcagccacaagccccggcctggccctgacccgggccctccaaagactaagcaccccgaccggtccctctcctctcagaaaccaagtgtcggggccacaaagggcaaagagcctgccactcagtccctcggtggctctagcagagaggggaagggccacagtaagagtgggccggatgtgtttcctgctaccccaggctcccagaacaaagccagcgatgggattggccagggagaaggtgggccctctgtcccactgcacactgacagggctcctctagacgccaagccacaacccaccagtggtgggcggcccctggaggtgctggagaagcctgtgcatttgccaaggccgggacacccagggcctagtgagccagcggaccagaaactgtccgctgttggtgaaaagcaaaccctgtctccaaagcaccccaaaccatccactgtgaaagattgccccaccctgtgcaaacagacagacaacagacagacagacaaaagcccgagtcagccggccgccaacaccgacagaagggcggaagggaagaaatgcactgaagcactttatgctccagcagagggcgacaagctcgaggccggcctttcctttgtgcatagcgagaaccggttgaaaggcgcggagcggccagccgcgggggtggggaagggcttccctgaggccagagggaaagggcccggtccccagaagccaccgacggaggcagacaagcccaatggcatgaaacggtccccctcagccactgggcagagttctttccgatccacggccctcccggaaaagtctctgagctgctcctccagcttccctgaaaccagggccggagttagagaggcctctgcagccagcagcgacacctcttctgccaaggccgccgggggcatgctggagcttccagcccccagcaacagggaccataggaaggctcagcctgccggggagggccgaacccacatgacaaagagtgactccctgccctccttccgggtctccaccctgcctctggagtcacaccaccccgacccaaacaccatgggcggggccagccaccgggacagggctctctcggtgactgccaccgtaggggaaaccaaagggaaggaccctgccccagcccagcctcccccagctaggaaacagaacgtgggcagagacgtgaccaagccatccccagccccaaacactgaccgccccatctctctttctaatgagaaggactttgtggtacggcagaggcgggggaaagagagtttgcgtagcagccctcacaaaaaggccttgtaacggggagggcccaggggcaggactgtggagacccgtcctgaacgggcgactgtgtcttgactacctttcaaaaccagcactgtgtgggaatgtccgccaggcagagctcggagcctcattgagacaggggagagagaaagacaaagaggggaccttcttccagatgccttcccagttgtaaccggtaaaactgttaccagatagtgtttgtacaaaaaaaaaaaaaaaaaaa

SEQ ID NO: 153866 - DNA, 272 bp, Homo sapiens
  Payload ID: 10248
  Gene Symbol: MAST4
  Gene Name: microtubule associated serine/threonine kinase family member 4
  ENST ID: ENST00000450827
  CDS Start-End: 1-177
ctaagacgaagagggctccagaaggagctgagtctccccagaagaggaagtttgatagattcccagaagtggaattgcttggtcaaacgtctcactcccaggagcctgagtccaaccccatccagcccaggcagtccttgtagtcctctcttggcctttcacttttggagggaatgatctgcactgaattctccctgtgtgtccaaatgctgggagaacatcaccccttggatgaattgccaccacattaaataaaacatatccaaagctca

SEQ ID NO: 153867 - DNA, 507 bp, Homo sapiens
  Payload ID: 10248
  Gene Symbol: MAST4
  Gene Name: microtubule associated serine/threonine kinase family member 4
  ENST ID: ENST00000452953
  CDS Start-End: 1-299
ctccacccatgccgtttcggaaatgcagcaacccagatgtggcttctggccctggaaaatcactgaagtataaaagacagctgagtgaggatggaagacagctaaggcgagggagcctgggaggagccctgactgggaggtaccttcttccaaacccggtggcgggacaggcctggccggcctctgcagagacgtccaacctcgtgcgcatgcgcagccaggccctgggccagtcggcgccctcgctcaccgccagcctgaaggagctgagtctccccagaagaggaagtttcaactgagcgattctctgacagaacatcgtggattgagaggaaataagaatgggtgtgcctgctttaggattacacagtgctggacctttgaggaaggagaagcagagatggatagaattgttgtggcagaactgagcttgtatacttggtcctgtggagggtatctactcttcttccagctgcgtagggtaaataaaggtttttgtaaagcttc

SEQ ID NO: 153868 - DNA, 458 bp, Homo sapiens
  Payload ID: 10248
  Gene Symbol: MAST4
  Gene Name: microtubule associated serine/threonine kinase family member 4
  ENST ID: ENST00000432817
  CDS Start-End: 1-369
ccacccatgccgtttcggaaatgcagcaacccagatgtggcttctggccctggaaaatcactgaagtataaaagacagctgagtgaggatggaagacagctaaggcgagggagcctgggaggagccctgactgggaggtaccttcttccaaacccggtggcgggacaggcctggccggcctctgcagagacgtccaacctcgtgcgcatgcgcagccaggccctgggccagtcggcgccctcgctcaccgccagcctgaaggagctgagtctccccagaagaggaagtttgtgcagaagcagtgattgtgactgggtaatagacaagagaagtgagagaaactgctttctaggcaagatgctgttatgagattgtcagccctgtgtgtccaaatgctgggagaacatcaccccttggatgaattgccaccacattaaataaaacatatccaaagctca

SEQ ID NO: 153869 - DNA, 438 bp, Homo sapiens
  Payload ID: 10248
  Gene Symbol: MAST4
  Gene Name: microtubule associated serine/threonine kinase family member 4
  ENST ID: ENST00000432426
  CDS Start-End: 261-438
acttgatatgcagagctgcaagcctcgttcctttaacaaaatcagtgcagtgtgcactgccgttaacctgaggaaagcagctgacatctcttgattacggctagaggtggaaggacccaaacttgcagcctccccctccccctcgagagagtgttagtccagtcctttagagaggttcggtttggctctctgtcatcaccgggacgctggcagggagtgtgtgtcatggttacaatagagtgtgctaacatataacaaccatgaaagcccagcgggaaaggctacagattccggggctgaccttggattgccgaacaagcaaccggaaaagcttaataggcaatgggcagtcaccagcattgcctcgaccacactcacctctctctgctcatgcaggaaatagccctcaagatagtccaagaaatttctcccccagtg

SEQ ID NO: 153870 - DNA, 1950 bp, Homo sapiens
  Payload ID: 10248
  Gene Symbol: MAST4
  Gene Name: microtubule associated serine/threonine kinase family member 4
  ENST ID: ENST00000490016
  CDS Start-End: 71-1123
gcgtgctgaagtagaggtagtacagcatggctagactgttgtgagaggctcagagaaagcagagggtgagatggatgagtccagcattctaagacgaagagggctccagaaggagctgagtctccccagaagaggaagtttgatagattcccagaagtggaattgcttggtcaaacgttgccgaacaagcaaccggaaaagcttaataggcaatgggcagtcaccagcattgcctcgaccacactcacctctctctgctcatgcaggaaatagccctcaagatagtccaagaaatttctcccccagtgcctcagcccatttttcatttgcacggaggactgatggacgccgctggtcgttggcttctctcccttcctctggctatgggacaaacacacccagctctacggtctcttcatcctgttcctcccaggagaagttgcatcagttaccataccaaccaacaccagacgagttacacttcttatcaaaacatttctgtaccaccgaaagcatcgccactgagaacagatgcaggaacacgccgatgcgcccccgttcccgaagtctgagccctggacgttctcccgcctgctgtgaccatgaaataattatgatgaaccatgtctacaaagaaaggttcccaaaggctacagctcagatggaagaacgtctaaaggaaattatcaccagctactctcctgacaacgttctacccttagcagatggagtgcttagtttcactcaccaccagattattgaactggctcgagattgcttggataaatcccaccagggcctcatcacctcacgatacttccttgaattacagcacaaattagataagttgctacaggaggctcatgatcgttcagaaagtggagaattggcatttattaaacaactagttcgaaagatcctaattgttattgcccgccctgctcggttattagagtgcctggaatttgatccggaagaattttactacctattggaagcagcagaaggccatgccaaagaaggacagggtattaaaaccgacattcccaggtacatcattagccaactgggactcaataaggatcccttggaaggtgagtccctgggttgttcctacctttgactttgcttatgcactgtcgcctcatagaagaaatctaagtggcaagtctttatttttcctcatgttttggctctatctattgataagtccatatttggggactggttgctatttgaaggaaatagccataaaatgggtcctgagacacgaatgagcatgacccattttgtgtctacctagagcgtgggtcaggccttgacatcctagaagcatgtcagcctgagaatgccagagtgtcccagaagggttgcaatttcagtcttcactgagtagtttttctcttgcagagctcagttgggctcttgagagtacttctaatttttaaaatgttgctaaagaaattatcattaattaaactgacatttaaatttaatttggaagtaatgcaattgatggtagattactttaaattgagtacagtattcataggtatattcttgtttacttaaaatataaaacatagtaatatacaggagagaaaaaagaaattttttttaagcttataaaaggatttatgggctgggcgcagtggctcacgcctgtaatcccagcactttgggaggccgaggtgagtggatcacgaggtcaggagttccagaccagcctggccaatatggtgaaaccctgtctctactaaaaatgcagaaattagctgggcatggtgatgtgcacctgtagtccaagctactcgggaggttgaggcagaagaatcgcttgaacccaggaggtggaggttgcagtgaaccgagatcgcaccactgcactccagcctgggcgacagagtgaaactccgactcaaaaaaaaaaaaaaaaaaaagatttatggt

SEQ ID NO: 153871 - DNA, 2968 bp, Homo sapiens
  Payload ID: 10249
  Gene Symbol: MASTL
  Gene Name: microtubule associated serine/threonine kinase-like
  Uniprot ID: Q96GX5
  ENST ID: ENST00000342386
  CDS Start-End: 58-2580
gggagtggctgctcgcggaggggcagtgtctgcggggccgctgtatgctgtccagcgatggatcccaccgcgggaagcaagaaggagcctggaggaggcgcggcgactgaggagggcgtgaataggatcgcagtgccaaaaccgccctccattgaggaattcagcatagtgaagcccattagccggggcgccttcgggaaagtgtatctggggcagaaaggcggcaaattgtatgcagtaaaggttgttaaaaaagcagacatgatcaacaaaaatatgactcatcaggtccaagctgagagagatgcactggcactaagcaaaagcccattcattgtccatttgtattattcactgcagtctgcaaacaatgtctacttggtaatggaatatcttattgggggagatgtcaagtctctcctacatatatatggttattttgatgaagagatggctgtgaaatatatttctgaagtagcactggctctagactaccttcacagacatggaatcatccacagggacttgaaaccggacaatatgcttatttctaatgagggtcatattaaactgacggattttggcctttcaaaagttactttgaatagagatattaatatgatggatatccttacaacaccatcaatggcaaaacctagacaagattattcaagaaccccaggacaagtgttatcgcttatcagctcgttgggatttaacacaccaattgcagaaaaaaatcaagaccctgcaaacatcctttcagcctgtctgtctgaaacatcacagctttctcaaggactcgtatgccctatgtctgtagatcaaaaggacactacgccttattctagcaaattactaaaatcatgtcttgaaacagttgcctccaacccaggaatgcctgtgaagtgtctaacttctaatttactccagtctaggaaaaggctggccacatccagtgccagtagtcaatcccacaccttcatatccagtgtggaatcagaatgccacagcagtcccaaatgggaaaaagattgccaggaaagtgatgaagcattgggcccaacaatgatgagttggaatgcagttgaaaagttatgcgcaaaatctgcaaatgccattgagacgaaaggtttcaataaaaaggatctggagttagctctttctcccattcataacagcagtgcccttcccaccactggacgctcttgtgtaaaccttgctaaaaaatgcttctctggggaagtttcttgggaagcagtagaactggatgtaaataatataaatatggacactgacacaagtcagttaggtttccatcagtcaaatcagtgggctgtggattctggtgggatatctgaagagcaccttgggaaaagaagtttaaaaagaaattttgagttggttgactccagtccttgtaaaaaaattatacagaataaaaaaacttgtgtagagtataagcataacgaaatgacaaattgttatacaaatcaaaatacaggcttaacagttgaagtgcaggaccttaagctatcagtgcacaaaagtcaacaaaatgactgtgctaataaggagaacattgtcaattcttttactgataaacaacaaacaccagaaaaattacctataccaatgatagcaaaaaaccttatgtgtgaactcgatgaagactgtgaaaagaatagtaagagggactacttaagttctagttttctatgttctgatgatgatagagcttctaaaaatatttctatgaactctgattcatcttttcctggaatttctataatggaaagtccattagaaagtcagcccttagattcagatagaagcatcaaagaatcctcttttgaagaatcaaatattgaagatccacttattgtaacaccagattgccaagaaaagacctcaccaaaaggtgtcgagaaccctgctgtacaagagagtaaccaaaaaatgttaggtcctcctttggaggtgctgaaaacgttagcctctaaaagaaatgctgttgcttttcgaagttttaacagtcatattaatgcatccaataactcagaaccatccagaatgaacatgacttctttagatgcaatggatatttcgtgtgcctacagtggttcatatcccatggctataacccctactcaaaaaagaagatcctgtatgccacatcagaccccaaatcagatcaagtcgggaactccataccgaactccgaagagtgtgagaagaggggtggcccccgttgatgatgggcgaattctaggaaccccagactaccttgcacctgagctgttactaggcagggcccatgatatcccttggccagaaggtgaagaaaagttatctgataatgctcaaagtgcagtagaaatacttttaaccattgatgatacaaagagagctggaatgaaagagctaaaacgtcatcctctcttcagtgatgtggactgggaaaatctgcagcatcagactatgcctttcatcccccagccagatgatgaaacagatacctcctattttgaagccaggaatactgctcagcacctgactgtatctggatttagtctgtagcacaaaaattttccttttagtctagccttgtgttatagaatgaacttgcataattatatactccttaatactagattgatctaagggggaaagatcattatttaacctagttcaatgtgcttttaatgtacgttacagctttcacagagttaaaaggctgaaaggaatatagtcagtaatttatcttaacctcaaaactgtatataaatcttcaaagcttttttcatttatttattttgtttattgcactttatgaaaactgaagcatcaataaaattagaggacactattgagagtgagccactagcttgattttctttctcctctgatttcagttcactgttcagtttagcattaaaataataaaataatcatacagttccatttg

SEQ ID NO: 153872 - DNA, 3080 bp, Homo sapiens
  Payload ID: 10249
  Gene Symbol: MASTL
  Gene Name: microtubule associated serine/threonine kinase-like
  Uniprot ID: Q96GX5
  ENST ID: ENST00000375940
  CDS Start-End: 58-2697
gggagtggctgctcgcggaggggcagtgtctgcggggccgctgtatgctgtccagcgatggatcccaccgcgggaagcaagaaggagcctggaggaggcgcggcgactgaggagggcgtgaataggatcgcagtgccaaaaccgccctccattgaggaattcagcatagtgaagcccattagccggggcgccttcgggaaagtgtatctggggcagaaaggcggcaaattgtatgcagtaaaggttgttaaaaaagcagacatgatcaacaaaaatatgactcatcaggtccaagctgagagagatgcactggcactaagcaaaagcccattcattgtccatttgtattattcactgcagtctgcaaacaatgtctacttggtaatggaatatcttattgggggagatgtcaagtctctcctacatatatatggttattttgatgaagagatggctgtgaaatatatttctgaagtagcactggctctagactaccttcacagacatggaatcatccacagggacttgaaaccggacaatatgcttatttctaatgagggtcatattaaactgacggattttggcctttcaaaagttactttgaatagagatattaatatgatggatatccttacaacaccatcaatggcaaaacctagacaagattattcaagaaccccaggacaagtgttatcgcttatcagctcgttgggatttaacacaccaattgcagaaaaaaatcaagaccctgcaaacatcctttcagcctgtctgtctgaaacatcacagctttctcaaggactcgtatgccctatgtctgtagatcaaaaggacactacgccttattctagcaaattactaaaatcatgtcttgaaacagttgcctccaacccaggaatgcctgtgaagtgtctaacttctaatttactccagtctaggaaaaggctggccacatccagtgccagtagtcaatcccacaccttcatatccagtgtggaatcagaatgccacagcagtcccaaatgggaaaaagattgccaggaaagtgatgaagcattgggcccaacaatgatgagttggaatgcagttgaaaagttatgcgcaaaatctgcaaatgccattgagacgaaaggtttcaataaaaaggatctggagttagctctttctcccattcataacagcagtgcccttcccaccactggacgctcttgtgtaaaccttgctaaaaaatgcttctctggggaagtttcttgggaagcagtagaactggatgtaaataatataaatatggacactgacacaagtcagttaggtttccatcagtcaaatcagtgggctgtggattctggtgggatatctgaagagcaccttgggaaaagaagtttaaaaagaaattttgagttggttgactccagtccttgtaaaaaaattatacagaataaaaaaacttgtgtagagtataagcataacgaaatgacaaattgttatacaaatcaaaatacaggcttaacagttgaagtgcaggaccttaagctatcagtgcacaaaagtcaacaaaatgactgtgctaataaggagaacattgtcaattcttttactgataaacaacaaacaccagaaaaattacctataccaatgatagcaaaaaaccttatgtgtgaactcgatgaagactgtgaaaagaatagtaagagggactacttaagttctagttttctatgttctgatgatgatagagcttctaaaaatatttctatgaactctgattcatcttttcctggaatttctataatggaaagtccattagaaagtcagcccttagattcagatagaagcatcaaagaatcctcttttgaagaatcaaatattgaagatccacttattgtaacaccagattgccaagaaaagacctcaccaaaaggtgtcgagaaccctgctgtacaagagagtaaccaaaaaatgttaggtcctcctttggaggtgctgaaaacgttagcctctaaaagaaatgctgttgcttttcgaagttttaacagtcatattaatgcatccaataactcagaaccatccagaatgaacatgacttctttagatgcaatggatatttcgtgtgcctacagtggttcatatcccatggctataacccctactcaaaaaagaagatcctgtatgccacatcagcagaccccaaatcagatcaagtcgggaactccataccgaactccgaagagtgtgagaagaggggtggcccccgttgatgatgggcgaattctaggaaccccagactaccttgcacctgagctgttactaggcagggcccatggtcctgcggtagactggtgggcacttggagtttgcttgtttgaatttctaacaggaattccccctttcaatgatgaaacaccacaacaagtattccagaatattctgaaaagagatatcccttggccagaaggtgaagaaaagttatctgataatgctcaaagtgcagtagaaatacttttaaccattgatgatacaaagagagctggaatgaaagagctaaaacgtcatcctctcttcagtgatgtggactgggaaaatctgcagcatcagactatgcctttcatcccccagccagatgatgaaacagatacctcctattttgaagccaggaatactgctcagcacctgactgtatctggatttagtctgtagcacaaaaattttccttttagtctagccttgtgttatagaatgaacttgcataattatatactccttaatactagattgatctaagggggaaagatcattatttaacctagttcaatgtgcttttaatgtacgttacagctttcacagagttaaaaggctgaaaggaatatagtcagtaatttatcttaacctcaaaactgtatataaatcttcaaagcttttttcatttatttattttgtttattgcactttatgaaaactgaagcatcaataaaattagaggacactattgagagtgagccactagcttgattttctttctcctctgatttcagttcactgttcagtttagcattaaaataataaaataatcatacagttcc

SEQ ID NO: 153873 - DNA, 3623 bp, Homo sapiens
  Payload ID: 10249
  Gene Symbol: MASTL
  Gene Name: microtubule associated serine/threonine kinase-like
  Uniprot ID: Q96GX5
  ENST ID: ENST00000375946
  CDS Start-End: 604-3240
ttttcctcacactaaatcgaaaactctccctgttggtcctgatctgtttcagtcaggcaaattacatcctgggaaaacgtcagatgacaggggaggccactcgcttcctgctcatccagtttcgacactttctgtgctttcattagcttccagacctcagccctggccctcgctttactgtacagtcagaactggtttctacgcctcgcgagggtgggaggtcgtgtatgggaggaggaccgcttcccaccagcctcgttgggaagccaggagaaatctcttcaaatcctgcgattcagagtcaagtcccagtcgtcctttttctggtcggcccagaactgtttgtgcctcctccctcatgaggaatgatgtcagtggggccgcggtcgccgcccacgaagagtgtaaggctgcgaagtcggggctttcccgacgccccctccgtccgcgtctgcgtaggggaggtgacgagggcggggcgcggcggcggggtgacgtcacggccgcgcgcggcgtgggcggagcctcactttgaacccagttggcgggagtggctgctcgcggaggggcagtgtctgcggggccgctgtatgctgtccagcgatggatcccaccgcgggaagcaagaaggagcctggaggaggcgcggcgactgaggagggcgtgaataggatcgcagtgccaaaaccgccctccattgaggaattcagcatagtgaagcccattagccggggcgccttcgggaaagtgtatctggggcagaaaggcggcaaattgtatgcagtaaaggttgttaaaaaagcagacatgatcaacaaaaatatgactcatcaggtccaagctgagagagatgcactggcactaagcaaaagcccattcattgtccatttgtattattcactgcagtctgcaaacaatgtctacttggtaatggaatatcttattgggggagatgtcaagtctctcctacatatatatggttattttgatgaagagatggctgtgaaatatatttctgaagtagcactggctctagactaccttcacagacatggaatcatccacagggacttgaaaccggacaatatgcttatttctaatgagggtcatattaaactgacggattttggcctttcaaaagttactttgaatagagatattaatatgatggatatccttacaacaccatcaatggcaaaacctagacaagattattcaagaaccccaggacaagtgttatcgcttatcagctcgttgggatttaacacaccaattgcagaaaaaaatcaagaccctgcaaacatcctttcagcctgtctgtctgaaacatcacagctttctcaaggactcgtatgccctatgtctgtagatcaaaaggacactacgccttattctagcaaattactaaaatcatgtcttgaaacagttgcctccaacccaggaatgcctgtgaagtgtctaacttctaatttactccagtctaggaaaaggctggccacatccagtgccagtagtcaatcccacaccttcatatccagtgtggaatcagaatgccacagcagtcccaaatgggaaaaagattgccaggaaagtgatgaagcattgggcccaacaatgatgagttggaatgcagttgaaaagttatgcgcaaaatctgcaaatgccattgagacgaaaggtttcaataaaaaggatctggagttagctctttctcccattcataacagcagtgcccttcccaccactggacgctcttgtgtaaaccttgctaaaaaatgcttctctggggaagtttcttgggaagcagtagaactggatgtaaataatataaatatggacactgacacaagtcagttaggtttccatcagtcaaatcagtgggctgtggattctggtgggatatctgaagagcaccttgggaaaagaagtttaaaaagaaattttgagttggttgactccagtccttgtaaaaaaattatacagaataaaaaaacttgtgtagagtataagcataacgaaatgacaaattgttatacaaatcaaaatacaggcttaacagttgaagtgcaggaccttaagctatcagtgcacaaaagtcaacaaaatgactgtgctaataaggagaacattgtcaattcttttactgataaacaacaaacaccagaaaaattacctataccaatgatagcaaaaaaccttatgtgtgaactcgatgaagactgtgaaaagaatagtaagagggactacttaagttctagttttctatgttctgatgatgatagagcttctaaaaatatttctatgaactctgattcatcttttcctggaatttctataatggaaagtccattagaaagtcagcccttagattcagatagaagcatcaaagaatcctcttttgaagaatcaaatattgaagatccacttattgtaacaccagattgccaagaaaagacctcaccaaaaggtgtcgagaaccctgctgtacaagagagtaaccaaaaaatgttaggtcctcctttggaggtgctgaaaacgttagcctctaaaagaaatgctgttgcttttcgaagttttaacagtcatattaatgcatccaataactcagaaccatccagaatgaacatgacttctttagatgcaatggatatttcgtgtgcctacagtggttcatatcccatggctataacccctactcaaaaaagaagatcctgtatgccacatcagaccccaaatcagatcaagtcgggaactccataccgaactccgaagagtgtgagaagaggggtggcccccgttgatgatgggcgaattctaggaaccccagactaccttgcacctgagctgttactaggcagggcccatggtcctgcggtagactggtgggcacttggagtttgcttgtttgaatttctaacaggaattccccctttcaatgatgaaacaccacaacaagtattccagaatattctgaaaagagatatcccttggccagaaggtgaagaaaagttatctgataatgctcaaagtgcagtagaaatacttttaaccattgatgatacaaagagagctggaatgaaagagctaaaacgtcatcctctcttcagtgatgtggactgggaaaatctgcagcatcagactatgcctttcatcccccagccagatgatgaaacagatacctcctattttgaagccaggaatactgctcagcacctgactgtatctggatttagtctgtagcacaaaaattttccttttagtctagccttgtgttatagaatgaacttgcataattatatactccttaatactagattgatctaagggggaaagatcattatttaacctagttcaatgtgcttttaatgtacgttacagctttcacagagttaaaaggctgaaaggaatatagtcagtaatttatcttaacctcaaaactgtatataaatcttcaaagcttttttcatttatttattttgtttattgcactttatgaaaactgaagcatcaataaaattagaggacactattgagagtgagccactagcttgattttctttctcctctgatttcagttcactgttcagtttagcattaaaataataaaataatcatacagttcc

SEQ ID NO: 153874 - DNA, 1622 bp, Homo sapiens
  Payload ID: 10249
  Gene Symbol: MASTL
  Gene Name: microtubule associated serine/threonine kinase-like
  ENST ID: ENST00000477034
  CDS Start-End: 1-1440
gaaagtgatgaagcattgggcccaacaatgatgagttggaatgcagttgaaaagttatgcgcaaaatctgcaaatgccattgagacgaaaggtttcaataaaaaggatctggagttagctctttctcccattcataacagcagtgcccttcccaccactggacgctcttgtgtaaaccttgctaaaaaatgcttctctggggaagtttcttgggaagcagtagaactggatgtaaataatataaatatggacactgacacaagtcagttaggtttccatcagtcaaatcagtgggctgtggattctggtgggatatctgaagagcaccttgggaaaagaagtttaaaaagaaattttgagttggttgactccagtccttgtaaaaaaattatacagaataaaaaaacttgtgtagagtataagcataacgaaatgacaaattgttatacaaatcaaaatacaggcttaacagttgaagtgcaggaccttaagctatcagtgcacaaaagtcaacaaaatgactgtgctaataaggagaacattgtcaattcttttactgataaacaacaaacaccagaaaaattacctataccaatgatagcaaaaaaccttatgtgtgaactcgatgaagactgtgaaaagaatagtaagagggactacttaagttctagttttctatgttctgatgatgatagagcttctaaaaatatttctatgaactctgattcatcttttcctggaatttctataatggaaagtccattagaaagtcagcccttagattcagatagaagcatcaaagaatcctcttttgaagaatcaaatattgaagatccacttattgtaacaccagattgccaagaaaagacctcaccaaaaggtgtcgagaaccctgctgtacaagagagtaaccaaaaaatgttaggtcctcctttggaggtgctgaaaacgttagcctctaaaagaaatgctgttgcttttcgaagttttaacagtcatattaatgcatccaataactcagaaccatccagaatgaacatgacttctttagatgcaatggatatttcgtgtgcctacagtggttcatatcccatggctataacccctactcaaaaaagaagatcctgtatgccacatcagcagaccccaaatcagatcaagtcgggaactccataccgaactccgaagagtgtgagaagaggggtggcccccgttgatgatgggcgaattctaggaaccccagactaccttgcacctgagctgttactaggcagggcccatgagctaaaacgtcatcctctcttcagtgatgtggactgggaaaatctgcagcatcagactatgcctttcatcccccagccagatgatgaaacagatacctcctattttgaagccaggaatactgctcagcacctgactgtatctggatttagtctgtagcacaaaaattttccttttagtctagccttgtgttatagaatgaacttgcataattatatactccttaatactagattgatctaagggggaaagatcattatttaacctagttcaatgtgcttttaatgtacgttacagctttcacagagttaaaaggctgaaaggaatatagtcagtaattt

SEQ ID NO: 153875 - DNA, 6160 bp, Homo sapiens
  Payload ID: 10250
  Gene Symbol: MTUS1
  Gene Name: microtubule associated tumor suppressor 1
  Uniprot ID: Q9ULD2
  ENST ID: ENST00000262102
  CDS Start-End: 226-4038
gtggcgcctcgctactttctgcagcttgtttgcactttttcacgctctagaaaaatctcatcttaattaagggaacaacaaatcatttaatcttcagagcatcttagactgaaaacctttcaactgtgctgaaaaacctagaagacagaccattttgcccaccctctcatttaaaaggaattgaagaagaaataaaatggcagaggtttaaggttactattcaggatgactgatgataattcagatgataaaatagaagatgaattgcaaaccttctttaccagtgataaagatggaaatacacatgcatacaacccgaaatcaccacctacacaaaactcttcagccagcagtgtgaactggaattctgccaacccagatgacatggtggttgattatgaaactgaccctgctgtagttactggtgaaaatatttctttaagccttcagggtgttgaagtatttggtcatgaaaagtcttctagtgatttcattagtaagcaggtgttagatatgcataaagattctatttgtcagtgtcctgcacttgtaggtactgagaagcccaaatatctgcaacacagttgtcattccctagaagcagttgagggccagagtgttgagccatctttgccttttgtgtggaagcctaatgacaatttgaactgtgcaggctactgtgatgccttggagctaaaccaaacatttgacatgacagtggataaagttaactgcacctttatatcacatcatgccatcggaaagagtcagtccttccatactgctggaagcctgccaccaactggtaggagaagtggaagtacatcttctttatcctattccacttggacatcttcccattctgataagacgcatgcaagagaaactacttatgatagagaaagctttgaaaaccctcaagtcacaccatcagaagcccaagacatgacttacacagcattttctgatgtggtgatgcaaagtgaggtttttgtttcagatattggaaatcagtgtgcatgttcttcaggaaaggtcaccagtgagtacacagatggatcacaacaaagactagttggagaaaaggagacacaagcactaacaccagtttctgatggcatggaagtccccaatgattctgcattacaagagttcttttgtttatcccatgatgaatccaatagcgaaccacattcacagagctcatacaggcacaaggaaatgggccaaaatctgagagagacagtgtcctattgtcttattgatgatgaatgccctttaatggtgccagcttttgataagagcgaagctcaagtgctgaacccagagcataaagtcactgagactgaagacacacaaatggtctccaaaggaaaggatttgggaacccaaaatcatacctcagaattgattctaagtagcccgccaggacaaaaggtgggctcgtcatttggactgacttgggatgcaaatgatatggtcattagcacagacaaaacgatgtgcatgtcaacaccagtcctagaacccacaaaagtaaccttttctgtttcaccgattgaagcgacggagaaatgtaagaaagtggagaagggtaatcgagggcttaaaaacataccagactcgaaggaggcacctgtgaacctgtgtaaacccagtttaggaaaatcaacaatcaaaacgaataccccaataggctgcaaagttagaaaaactgaaattataagttacccaagaccaaacttcaagaatgtcaaagcaaaagttatgtctagagcagtgttgcagcccaaagatgctgctttatcaaaggtcacgcccagacctcagcagaccagtgcctcatcaccctcatcagtgaattcaagacaacaaacagtcttgagcagaacaccgagatctgacttgaatgcagacaaaaaagcagaaattctaattaacaagacacataagcagcagtttaataaactcattactagccaggctgtgcatgttacaactcattctaaaaatgcttcacacagggttccaagaacaacatctgccgtgaaatcgaatcaggaagatgttgacaaagccagttcttctaactcagcatgcgagaccgggtccgtttctgcgttgtttcagaagatcaaaggcatactccctgttaaaatggaaagtgcagaatgtttggaaatgacctatgttcccaacattgataggattagccctgaaaagaagggtgaaaaagaaaatgggacatctatggaaaaacaagagctgaaacaagagattatgaatgagacttttgaatatggttctctgtttttgggctctgcttcaaaaacaacgaccacctcaggtaggaatatatccaagcctgactcctgcggtttgaggcaaatagctgctccaaaagccaaagtggggccccctgtttcctgtttgaggcggaacagtgacaatagaaatcccagtgctgatcgagccgtatctcctcagaggatcaggcgtgtgtccagttctggaaagcctacatccttgaaaactgcacagtcgtcatgggtgaatttgcctagaccacttcctaaatccaaagcatctttgaaaagtcctgcgctgcggaggacaggaagcaccccctcaatagccagcacccacagtgagctgagcacttacagcaacaattctggtaatgccgctgtcatcaaatatgaggagaaacctccaaaaccagcatttcagaatggttcctcaggatccttttatttgaagcctttggtatccagggctcatgttcacttgatgaaaactcctccaaaaggtccttcgagaaaaaatttatttacagctcttaatgcagttgaaaagagcaggcaaaagaatcctcgaagcttatgtatccagccacagacagctcccgatgcgctgccccctgagaaaacacttgaattgacgcaatataaaacaaaatgtgaaaaccaaagtggatttatcctgcagctcaagcagcttcttgcctgtggtaataccaagtttgaggcattgacagttgtgattcagcacctgctgtctgagcgggaggaagcactgaaacaacacaaaaccctatctcaagaacttgttaacctccggggagagctagtcactgcttcaaccacctgtgagaaattagaaaaagccaggaatgagttacaaacagtgtatgaagcattcgtccagcagcaccaggctgaaaaaacagaacgagagaatcggcttaaagagttttacaccagggagtatgaaaagcttcgggacacttacattgaagaagcagagaagtacaaaatgcaattgcaagagcagtttgacaacttaaatgctgcgcatgaaacctctaagttggaaattgaagctagccactcagagaaacttgaattgctaaagaaggcctatgaagcctccctttcagaaattaagaaaggccatgaaatagaaaagaaatcgcttgaagatttactttctgagaagcaggaatcgctagagaagcaaatcaatgatctgaagagtgaaaatgatgctttaaatgaaaaattgaaatcagaagaacaaaaaagaagagcaagagaaaaagcaaatttgaaaaatcctcagatcatgtatctagaacaggagttagaaagcctgaaagctgtgttagagatcaagaatgagaaactgcatcaacaggacatcaagttaatgaaaatggagaaactggtggacaacaacacagcattggttgacaaattgaagcgtttccagcaggagaatgaagaattgaaagctcggatggacaagcacatggcaatctcaaggcagctttccacggagcaggctgttctgcaagagtcgctggagaaggagtcgaaagtcaacaagcgactctctatggaaaacgaggagcttctgtggaaactgcacaatggggacctgtgtagccccaagagatcccccacatcctccgccatccctttgcagtcaccaaggaattcgggctccttccctagccccagcatttcacccagatgacacctccccaaagtccacagactctctgaaagcattttgatgcaggtctgcaggactgaccccaaggaggaacgtgggcacaagaggtatatcagcacacgtgtgatcaccgtagggtaactggagcgtcaccaccggcggaatcgcagcttctgagactggaactctggaggaagacttttgcctccgtccaaaagattcctccaaaaaaagatttaaaaaaagatttcggcatcgacacggacgttgttgcacaaagcacttaaagaacgagagcatcttgttcattgcctttttcacctaagcatagggggaaaaactctcagggccctattaagatttataacctttgtaatgttcttcaccacagacaccttcttgtgagttttcagtctgactgtgggggtggggggtgtgaatgaaatggatgtcacagagtgtcatgtgtctgatgcagcctcctctgctgtgtattaaatgtcaaaatctgaatatatctggatatgtactaatcaaataataatcaatcaatcagcatatacatttcagccaaagccatagaagaaaaagcaatagttgcttgaattatgatcatctaccaccaactctgctcagccctgtaacagggtagggagagggtataacaggaagagctttgacttgtccctgtctatacattctctgtatcttttgggggtaacttcttggcagtttttcagtgttcagccatgtcagttgaaactagatttttctgtagattttttacttacccatgtgagcctaacactatcctgtaattcattttctcaggctatgtgtaaatgtagaaccctaatttttctataaaaaaacaaactaactaactaactgtgtaaagaaagaaaaagggaagtaccaatgggtttttccaccttatttttacctttgatctacccttgcagatttaacctgtcttcttccctcccattattctcattttccttttacctttctccaccatccagagccacaaaagcaaaccttctacctcctacctacttttctctgggacaaggataaaggaatatgattttccagagccccagagccagctcatcttccaggtgctgaaaccactttccaaataaactaaagcctggatttgatattacaaattttgggaaatcttagaataaagaacgagaacaaggaagtcattggctagtataattaagaaaggtaggattcagtgcttaccgatgatgcagtacttgatagaagaaaacagtctgggaggatagcgctcatttttcagttaccctttaaggagtccctttgtctttgggaaagtagcagaatggtccgcttctttcccatgagtggaaaatgtggcttgtccaactctcctccaggttgcatttcagtttctttccaaaacttattacctcccctaatcctgagactttggaaaaggtggaaggaagaactgttgctttatctccccctccctgcatgtgtcaacattgtgatgtcagtatttactaatctacattcagtggctgtacaaataacagctgtagtaagaagagattcaggatgctagaggtgaatatttgggtcatttacatgtacactacatagcaagttgatactcatgttgcatgttcttttaaattagtgattttgtgtcttaagtctttaacttccaatacttcatcatgtatgtaaccttccatgtttgcttctgataaatggaaatgtaggttcactgccacttcatgagatatctctgctcacgcttccaagttgttctcaatgacattagccaaagttgggtttgccattcatcccctaggcatggtaaatcttgtgttgttccctgctgtcctccgtattacgtgaccggcaaataaatctcatagcagttaatataaaacatctttggaggatgggagagaacaggagggaagatgggaaacaaaatagagaattcttaagattttgtttaaaccaaatgtttcatgtagaatgcaaaatgttggcacgtcaaaaatatgaatgtgtagacaactgtagttgtgctcagtttgtagtgatgggaagtgtattttactctgatcaaataaataatgctggaatactc

SEQ ID NO: 153876 - DNA, 3731 bp, Homo sapiens
  Payload ID: 10250
  Gene Symbol: MTUS1
  Gene Name: microtubule associated tumor suppressor 1
  Uniprot ID: Q9ULD2
  ENST ID: ENST00000297488
  CDS Start-End: 294-1604
acagtgtgatgtggttcagaggcagcttctagacctgcaggagggagattgtattcagaggaagagcatcattttggcaacatctgaaagtgaaaacggaagccagaaacacttggccagccctgggggatttttttcttctatgcctctctggtggaatgacatttgctgtgtaggcatctttcctctgactgtatttcttggccttgaagagtactgagtttaaaaagacagtatgtgacagtccatggaaattgcctcttctgtgaaatctcgccacctgctccgaagacatgttgttgtctcccaaattctccttatccaccattcacatacgactgacggccaaaggattgcttcgaaaccttcgacttccttcagggtttaggagaagcactgttgttttccacacagttgaaaagagcaggcaaaagaatcctcgaagcttatgtatccagccacagacagctcccgatgcgctgccccctgagaaaacacttgaattgacgcaatataaaacaaaatgtgaaaaccaaagtggatttatcctgcagctcaagcagcttcttgcctgtggtaataccaagtttgaggcattgacagttgtgattcagcacctgctgtctgagcgggaggaagcactgaaacaacacaaaaccctatctcaagaacttgttaacctccggggagagctagtcactgcttcaaccacctgtgagaaattagaaaaagccaggaatgagttacaaacagtgtatgaagcattcgtccagcagcaccaggctgaaaaaacagaacgagagaatcggcttaaagagttttacaccagggagtatgaaaagcttcgggacacttacattgaagaagcagagaagtacaaaatgcaattgcaagagcagtttgacaacttaaatgctgcgcatgaaacctctaagttggaaattgaagctagccactcagagaaacttgaattgctaaagaaggcctatgaagcctccctttcagaaattaagaaaggccatgaaatagaaaagaaatcgcttgaagatttactttctgagaagcaggaatcgctagagaagcaaatcaatgatctgaagagtgaaaatgatgctttaaatgaaaaattgaaatcagaagaacaaaaaagaagagcaagagaaaaagcaaatttgaaaaatcctcagatcatgtatctagaacaggagttagaaagcctgaaagctgtgttagagatcaagaatgagaaactgcatcaacaggacatcaagttaatgaaaatggagaaactggtggacaacaacacagcattggttgacaaattgaagcgtttccagcaggagaatgaagaattgaaagctcggatggacaagcacatggcaatctcaaggcagctttccacggagcaggctgttctgcaagagtcgctggagaaggagtcgaaagtcaacaagcgactctctatggaaaacgaggagcttctgtggaaactgcacaatggggacctgtgtagccccaagagatcccccacatcctccgccatccctttgcagtcaccaaggaattcgggctccttccctagccccagcatttcacccagatgacacctccccaaagtccacagactctctgaaagcattttgatgcaggtctgcaggactgaccccaaggaggaacgtgggcacaagaggtatatcagcacacgtgtgatcaccgtagggtaactggagcgtcaccaccggcggaatcgcagcttctgagactggaactctggaggaagacttttgcctccgtccaaaagattcctccaaaaaaagatttaaaaaaagatttcggcatcgacacggacgttgttgcacaaagcacttaaagaacgagagcatcttgttcattgcctttttcacctaagcatagggggaaaaactctcagggccctattaagatttataacctttgtaatgttcttcaccacagacaccttcttgtgagttttcagtctgactgtgggggtggggggtgtgaatgaaatggatgtcacagagtgtcatgtgtctgatgcagcctcctctgctgtgtattaaatgtcaaaatctgaatatatctggatatgtactaatcaaataataatcaatcaatcagcatatacatttcagccaaagccatagaagaaaaagcaatagttgcttgaattatgatcatctaccaccaactctgctcagccctgtaacagggtagggagagggtataacaggaagagctttgacttgtccctgtctatacattctctgtatcttttgggggtaacttcttggcagtttttcagtgttcagccatgtcagttgaaactagatttttctgtagattttttacttacccatgtgagcctaacactatcctgtaattcattttctcaggctatgtgtaaatgtagaaccctaatttttctataaaaaaacaaactaactaactaactgtgtaaagaaagaaaaagggaagtaccaatgggtttttccaccttatttttacctttgatctacccttgcagatttaacctgtcttcttccctcccattattctcattttccttttacctttctccaccatccagagccacaaaagcaaaccttctacctcctacctacttttctctgggacaaggataaaggaatatgattttccagagccccagagccagctcatcttccaggtgctgaaaccactttccaaataaactaaagcctggatttgatattacaaattttgggaaatcttagaataaagaacgagaacaaggaagtcattggctagtataattaagaaaggtaggattcagtgcttaccgatgatgcagtacttgatagaagaaaacagtctgggaggatagcgctcatttttcagttaccctttaaggagtccctttgtctttgggaaagtagcagaatggtccgcttctttcccatgagtggaaaatgtggcttgtccaactctcctccaggttgcatttcagtttctttccaaaacttattacctcccctaatcctgagactttggaaaaggtggaaggaagaactgttgctttatctccccctccctgcatgtgtcaacattgtgatgtcagtatttactaatctacattcagtggctgtacaaataacagctgtagtaagaagagattcaggatgctagaggtgaatatttgggtcatttacatgtacactacatagcaagttgatactcatgttgcatgttcttttaaattagtgattttgtgtcttaagtctttaacttccaatacttcatcatgtatgtaaccttccatgtttgcttctgataaatggaaatgtaggttcactgccacttcatgagatatctctgctcacgcttccaagttgttctcaatgacattagccaaagttgggtttgccattcatcccctaggcatggtaaatcttgtgttgttccctgctgtcctccgtattacgtgaccggcaaataaatctcatagcagttaatataaaacatctttggaggatgggagagaacaggagggaagatgggaaacaaaatagagaattcttaagattttgtttaaaccaaatgtttcatgtagaatgcaaaatgttggcacgtcaaaaatatgaatgtgtagacaactgtagttgtgctcagtttgtagtgatgggaagtgtattttactctgatcaaataaataatgctggaatactcaagaa

SEQ ID NO: 153877 - DNA, 3996 bp, Homo sapiens
  Payload ID: 10250
  Gene Symbol: MTUS1
  Gene Name: microtubule associated tumor suppressor 1
  Uniprot ID: Q9ULD2
  ENST ID: ENST00000381861
  CDS Start-End: 321-1874
agtactgtgtctgatgctcctaaggaggctgtaaagtgcttttgtccattcctttttgtcttttaacaaaggggtttaccatacacccacagagcctgtctagtggcgatgtgttcctgttgcggattaagcattcaaatcagtgagtctctttcttagtttgatttgctagctggtttaatctgttttgtgtagtgccttggagcttacgcatttttttttttttccctccattcgaattcactaagagcaagcatgagggatatgagagtgaacatggctgcagtttttcctgcttaagcttgctttgatccttttaaatgactgtaccaggaggatttcgcagttgtacagaaactgatatttcttcaaaaatctttatcaattctacactcaccccaccggctggttcagagaggcactatgatgctaccttattgacactgctggtcgtgggatcgtacagcctttgtataattcctttgttagccacgtttactgggaaaaaaactggtaatgccgctgtcatcaaatatgaggagaaacctccaaaaccagcatttcagaatggttcctcaggatccttttatttgaagcctttggtatccagggctcatgttcacttgatgaaaactcctccaaaaggtccttcgagaaaaaatttatttacagctcttaatgcagttgaaaagagcaggcaaaagaatcctcgaagcttatgtatccagccacagacagctcccgatgcgctgccccctgagaaaacacttgaattgacgcaatataaaacaaaatgtgaaaaccaaagtggatttatcctgcagctcaagcagcttcttgcctgtggtaataccaagtttgaggcattgacagttgtgattcagcacctgctgtctgagcgggaggaagcactgaaacaacacaaaaccctatctcaagaacttgttaacctccggggagagctagtcactgcttcaaccacctgtgagaaattagaaaaagccaggaatgagttacaaacagtgtatgaagcattcgtccagcagcaccaggctgaaaaaacagaacgagagaatcggcttaaagagttttacaccagggagtatgaaaagcttcgggacacttacattgaagaagcagagaagtacaaaatgcaattgcaagagcagtttgacaacttaaatgctgcgcatgaaacctctaagttggaaattgaagctagccactcagagaaacttgaattgctaaagaaggcctatgaagcctccctttcagaaattaagaaaggccatgaaatagaaaagaaatcgcttgaagatttactttctgagaagcaggaatcgctagagaagcaaatcaatgatctgaagagtgaaaatgatgctttaaatgaaaaattgaaatcagaagaacaaaaaagaagagcaagagaaaaagcaaatttgaaaaatcctcagatcatgtatctagaacaggagttagaaagcctgaaagctgtgttagagatcaagaatgagaaactgcatcaacaggacatcaagttaatgaaaatggagaaactggtggacaacaacacagcattggttgacaaattgaagcgtttccagcaggagaatgaagaattgaaagctcggatggacaagcacatggcaatctcaaggcagctttccacggagcaggctgttctgcaagagtcgctggagaaggagtcgaaagtcaacaagcgactctctatggaaaacgaggagcttctgtggaaactgcacaatggggacctgtgtagccccaagagatcccccacatcctccgccatccctttgcagtcaccaaggaattcgggctccttccctagccccagcatttcacccagatgacacctccccaaagtccacagactctctgaaagcattttgatgcaggtctgcaggactgaccccaaggaggaacgtgggcacaagaggtatatcagcacacgtgtgatcaccgtagggtaactggagcgtcaccaccggcggaatcgcagcttctgagactggaactctggaggaagacttttgcctccgtccaaaagattcctccaaaaaaagatttaaaaaaagatttcggcatcgacacggacgttgttgcacaaagcacttaaagaacgagagcatcttgttcattgcctttttcacctaagcatagggggaaaaactctcagggccctattaagatttataacctttgtaatgttcttcaccacagacaccttcttgtgagttttcagtctgactgtgggggtggggggtgtgaatgaaatggatgtcacagagtgtcatgtgtctgatgcagcctcctctgctgtgtattaaatgtcaaaatctgaatatatctggatatgtactaatcaaataataatcaatcaatcagcatatacatttcagccaaagccatagaagaaaaagcaatagttgcttgaattatgatcatctaccaccaactctgctcagccctgtaacagggtagggagagggtataacaggaagagctttgacttgtccctgtctatacattctctgtatcttttgggggtaacttcttggcagtttttcagtgttcagccatgtcagttgaaactagatttttctgtagattttttacttacccatgtgagcctaacactatcctgtaattcattttctcaggctatgtgtaaatgtagaaccctaatttttctataaaaaaacaaactaactaactaactgtgtaaagaaagaaaaagggaagtaccaatgggtttttccaccttatttttacctttgatctacccttgcagatttaacctgtcttcttccctcccattattctcattttccttttacctttctccaccatccagagccacaaaagcaaaccttctacctcctacctacttttctctgggacaaggataaaggaatatgattttccagagccccagagccagctcatcttccaggtgctgaaaccactttccaaataaactaaagcctggatttgatattacaaattttgggaaatcttagaataaagaacgagaacaaggaagtcattggctagtataattaagaaaggtaggattcagtgcttaccgatgatgcagtacttgatagaagaaaacagtctgggaggatagcgctcatttttcagttaccctttaaggagtccctttgtctttgggaaagtagcagaatggtccgcttctttcccatgagtggaaaatgtggcttgtccaactctcctccaggttgcatttcagtttctttccaaaacttattacctcccctaatcctgagactttggaaaaggtggaaggaagaactgttgctttatctccccctccctgcatgtgtcaacattgtgatgtcagtatttactaatctacattcagtggctgtacaaataacagctgtagtaagaagagattcaggatgctagaggtgaatatttgggtcatttacatgtacactacatagcaagttgatactcatgttgcatgttcttttaaattagtgattttgtgtcttaagtctttaacttccaatacttcatcatgtatgtaaccttccatgtttgcttctgataaatggaaatgtaggttcactgccacttcatgagatatctctgctcacgcttccaagttgttctcaatgacattagccaaagttgggtttgccattcatcccctaggcatggtaaatcttgtgttgttccctgctgtcctccgtattacgtgaccggcaaataaatctcatagcagttaatataaaacatctttggaggatgggagagaacaggagggaagatgggaaacaaaatagagaattcttaagattttgtttaaaccaaatgtttcatgtagaatgcaaaatgttggcacgtcaaaaatatgaatgtgtagacaactgtagttgtgctcagtttgtagtgatgggaagtgtattttactctgatcaaataaataatgctggaatactc

SEQ ID NO: 153878 - DNA, 6256 bp, Homo sapiens
  Payload ID: 10250
  Gene Symbol: MTUS1
  Gene Name: microtubule associated tumor suppressor 1
  Uniprot ID: Q9ULD2
  ENST ID: ENST00000381869
  CDS Start-End: 475-4125
aaagggggcggcagcgccggcggagcggaggcgggtctcacgtgggccagcgcagagcctgcggaagggacggatgcggatctcgtcgctgtcaccttgaaagtgaccgaggggcttgactgtggactccttacgccgcccacccgggcccggcggtcccagccttctcgcagggccccttctcagcagaagcaagcggggccgagaaagcgggtggaatagggttgctgcaggtcccaaagacccctcgtggcgcctcgctactttctgcagcttgtttgcactttttcacgctctagaaaaatctcatcttaattaagggaacaacaaatcatttaatcttcagagcatcttagactgaaaacctttcaactgtgctgaaaaacctagaagacagaccattttgcccaccctctcatttaaaaggaattgaagaagaaataaaatggcagaggtttaaggttactattcaggatgactgatgataattcagatgataaaatagaagatgaattgcaaaccttctttaccagtgataaagatggaaatacacatgcatacaacccgaaatcaccacctacacaaaactcttcagccagcagtgtgaactggaattctgccaacccagatgacatggtggttgattatgaaactgaccctgctgtagttactggtgaaaatatttctttaagccttcagggtgttgaagtatttggtcatgaaaagtcttctagtgatttcattagtaagcaggtgttagatatgcataaagattctatttgtcagtgtcctgcacttgtaggtactgagaagcccaaatatctgcaacacagttgtcattccctagaagcagttgagggccagagtgttgagccatctttgccttttgtgtggaagcctaatgacaatttgaactgtgcaggctactgtgatgccttggagctaaaccaaacatttgacatgacagtggataaagttaactgcacctttatatcacatcatgccatcggaaagagtcagtccttccatactgctggaagcctgccaccaactggtaggagaagtggaagtacatcttctttatcctattccacttggacatcttcccattctgataagacgcatgcaagagaaactacttatgatagagaaagctttgaaaaccctcaagtcacaccatcagaagcccaagacatgacttacacagcattttctgatgtggtgatgcaaagtgaggtttttgtttcagatattggaaatcagtgtgcatgttcttcaggaaaggtcaccagtgagtacacagatggatcacaacaaagactagttggagaaaaggagacacaagcactaacaccagtttctgatggcatggaagtccccaatgattctgcattacaagagttcttttgtttatcccatgatgaatccaatagcgaaccacattcacagagctcatacaggcacaaggaaatgggccaaaatctgagagagacagtgtcctattgtcttattgatgatgaatgccctttaatggtgccagcttttgataagagcgaagctcaagtgctgaacccagagcataaagtcactgagactgaagacacacaaatggtctccaaaggaaaggatttgggaacccaaaatcatacctcagaattgattctaagtagcccgccaggacaaaaggtgggctcgtcatttggactgacttgggatgcaaatgatatggtcattagcacagacaaaacgatgtgcatgtcaacaccagtcctagaacccacaaaagtaaccttttctgtttcaccgattgaagcgacggagaaatgtaagaaagtggagaagggtaatcgagggcttaaaaacataccagactcgaaggaggcacctgtgaacctgtgtaaacccagtttaggaaaatcaacaatcaaaacgaataccccaataggctgcaaagttagaaaaactgaaattataagttacccaagaccaaacttcaagaatgtcaaagcaaaagttatgtctagagcagtgttgcagcccaaagatgctgctttatcaaaggtcacgcccagacctcagcagaccagtgcctcatcaccctcatcagtgaattcaagacaacaaacagtcttgagcagaacaccgagatctgacttgaatgcagacaaaaaagcagaaattctaattaacaagacacataagcagcagtttaataaactcattactagccaggctgtgcatgttacaactcattctaaaaatgcttcacacagggttccaagaacaacatctgccgtgaaatcgaatcaggaagatgttgacaaagccagttcttctaactcagcatgcgagaccgggtccgtttctgcgttgtttcagaagatcaaaggcatactccctgttaaaatggaaagtgcagaatgtttggaaatgacctatgttcccaacattgataggattagccctgaaaagaagggtgaaaaagaaaatgggacatctatggaaaaacaagagctgaaacaagagattatgaatgagacttttgaatatggttctctgtttttgggctctgcttcaaaaacaacgaccacctcaggtaggaatatatccaagcctgactcctgcggtttgaggcaaatagctgctccaaaagccaaagtggggccccctgtttcctgtttgaggcggaacagtgacaatagaaatcccagtgctgatcgagccgtatctcctcagaggatcaggcgtgtgtccagttctgctggtaatgccgctgtcatcaaatatgaggagaaacctccaaaaccagcatttcagaatggttcctcaggatccttttatttgaagcctttggtatccagggctcatgttcacttgatgaaaactcctccaaaaggtccttcgagaaaaaatttatttacagctcttaatgcagttgaaaagagcaggcaaaagaatcctcgaagcttatgtatccagccacagacagctcccgatgcgctgccccctgagaaaacacttgaattgacgcaatataaaacaaaatgtgaaaaccaaagtggatttatcctgcagctcaagcagcttcttgcctgtggtaataccaagtttgaggcattgacagttgtgattcagcacctgctgtctgagcgggaggaagcactgaaacaacacaaaaccctatctcaagaacttgttaacctccggggagagctagtcactgcttcaaccacctgtgagaaattagaaaaagccaggaatgagttacaaacagtgtatgaagcattcgtccagcagcaccaggctgaaaaaacagaacgagagaatcggcttaaagagttttacaccagggagtatgaaaagcttcgggacacttacattgaagaagcagagaagtacaaaatgcaattgcaagagcagtttgacaacttaaatgctgcgcatgaaacctctaagttggaaattgaagctagccactcagagaaacttgaattgctaaagaaggcctatgaagcctccctttcagaaattaagaaaggccatgaaatagaaaagaaatcgcttgaagatttactttctgagaagcaggaatcgctagagaagcaaatcaatgatctgaagagtgaaaatgatgctttaaatgaaaaattgaaatcagaagaacaaaaaagaagagcaagagaaaaagcaaatttgaaaaatcctcagatcatgtatctagaacaggagttagaaagcctgaaagctgtgttagagatcaagaatgagaaactgcatcaacaggacatcaagttaatgaaaatggagaaactggtggacaacaacacagcattggttgacaaattgaagcgtttccagcaggagaatgaagaattgaaagctcggatggacaagcacatggcaatctcaaggcagctttccacggagcaggctgttctgcaagagtcgctggagaaggagtcgaaagtcaacaagcgactctctatggaaaacgaggagcttctgtggaaactgcacaatggggacctgtgtagccccaagagatcccccacatcctccgccatccctttgcagtcaccaaggaattcgggctccttccctagccccagcatttcacccagatgacacctccccaaagtccacagactctctgaaagcattttgatgcaggtctgcaggactgaccccaaggaggaacgtgggcacaagaggtatatcagcacacgtgtgatcaccgtagggtaactggagcgtcaccaccggcggaatcgcagcttctgagactggaactctggaggaagacttttgcctccgtccaaaagattcctccaaaaaaagatttaaaaaaagatttcggcatcgacacggacgttgttgcacaaagcacttaaagaacgagagcatcttgttcattgcctttttcacctaagcatagggggaaaaactctcagggccctattaagatttataacctttgtaatgttcttcaccacagacaccttcttgtgagttttcagtctgactgtgggggtggggggtgtgaatgaaatggatgtcacagagtgtcatgtgtctgatgcagcctcctctgctgtgtattaaatgtcaaaatctgaatatatctggatatgtactaatcaaataataatcaatcaatcagcatatacatttcagccaaagccatagaagaaaaagcaatagttgcttgaattatgatcatctaccaccaactctgctcagccctgtaacagggtagggagagggtataacaggaagagctttgacttgtccctgtctatacattctctgtatcttttgggggtaacttcttggcagtttttcagtgttcagccatgtcagttgaaactagatttttctgtagattttttacttacccatgtgagcctaacactatcctgtaattcattttctcaggctatgtgtaaatgtagaaccctaatttttctataaaaaaacaaactaactaactaactgtgtaaagaaagaaaaagggaagtaccaatgggtttttccaccttatttttacctttgatctacccttgcagatttaacctgtcttcttccctcccattattctcattttccttttacctttctccaccatccagagccacaaaagcaaaccttctacctcctacctacttttctctgggacaaggataaaggaatatgattttccagagccccagagccagctcatcttccaggtgctgaaaccactttccaaataaactaaagcctggatttgatattacaaattttgggaaatcttagaataaagaacgagaacaaggaagtcattggctagtataattaagaaaggtaggattcagtgcttaccgatgatgcagtacttgatagaagaaaacagtctgggaggatagcgctcatttttcagttaccctttaaggagtccctttgtctttgggaaagtagcagaatggtccgcttctttcccatgagtggaaaatgtggcttgtccaactctcctccaggttgcatttcagtttctttccaaaacttattacctcccctaatcctgagactttggaaaaggtggaaggaagaactgttgctttatctccccctccctgcatgtgtcaacattgtgatgtcagtatttactaatctacattcagtggctgtacaaataacagctgtagtaagaagagattcaggatgctagaggtgaatatttgggtcatttacatgtacactacatagcaagttgatactcatgttgcatgttcttttaaattagtgattttgtgtcttaagtctttaacttccaatacttcatcatgtatgtaaccttccatgtttgcttctgataaatggaaatgtaggttcactgccacttcatgagatatctctgctcacgcttccaagttgttctcaatgacattagccaaagttgggtttgccattcatcccctaggcatggtaaatcttgtgttgttccctgctgtcctccgtattacgtgaccggcaaataaatctcatagcagttaatataaaacatctttggaggatgggagagaacaggagggaagatgggaaacaaaatagagaattcttaagattttgtttaaaccaaatgtttcatgtagaatgcaaaatgttggcacgtcaaaaatatgaatgtgtagacaactgtagttgtgctcagtttgtagtgatgggaagtgtattttactctgatcaaataaataatgctggaatactcaagaattgc

SEQ ID NO: 153879 - DNA, 4089 bp, Homo sapiens
  Payload ID: 10250
  Gene Symbol: MTUS1
  Gene Name: microtubule associated tumor suppressor 1
  Uniprot ID: Q9ULD2
  ENST ID: ENST00000519263
  CDS Start-End: 175-3825
aaacattttatttcttccagggaacaacaaatcatttaatcttcagagcatcttagactgaaaacctttcaactgtgctgaaaaacctagaagacagaccattttgcccaccctctcatttaaaaggaattgaagaagaaataaaatggcagaggtttaaggttactattcaggatgactgatgataattcagatgataaaatagaagatgaattgcaaaccttctttaccagtgataaagatggaaatacacatgcatacaacccgaaatcaccacctacacaaaactcttcagccagcagtgtgaactggaattctgccaacccagatgacatggtggttgattatgaaactgaccctgctgtagttactggtgaaaatatttctttaagccttcagggtgttgaagtatttggtcatgaaaagtcttctagtgatttcattagtaagcaggtgttagatatgcataaagattctatttgtcagtgtcctgcacttgtaggtactgagaagcccaaatatctgcaacacagttgtcattccctagaagcagttgagggccagagtgttgagccatctttgccttttgtgtggaagcctaatgacaatttgaactgtgcaggctactgtgatgccttggagctaaaccaaacatttgacatgacagtggataaagttaactgcacctttatatcacatcatgccatcggaaagagtcagtccttccatactgctggaagcctgccaccaactggtaggagaagtggaagtacatcttctttatcctattccacttggacatcttcccattctgataagacgcatgcaagagaaactacttatgatagagaaagctttgaaaaccctcaagtcacaccatcagaagcccaagacatgacttacacagcattttctgatgtggtgatgcaaagtgaggtttttgtttcagatattggaaatcagtgtgcatgttcttcaggaaaggtcaccagtgagtacacagatggatcacaacaaagactagttggagaaaaggagacacaagcactaacaccagtttctgatggcatggaagtccccaatgattctgcattacaagagttcttttgtttatcccatgatgaatccaatagcgaaccacattcacagagctcatacaggcacaaggaaatgggccaaaatctgagagagacagtgtcctattgtcttattgatgatgaatgccctttaatggtgccagcttttgataagagcgaagctcaagtgctgaacccagagcataaagtcactgagactgaagacacacaaatggtctccaaaggaaaggatttgggaacccaaaatcatacctcagaattgattctaagtagcccgccaggacaaaaggtgggctcgtcatttggactgacttgggatgcaaatgatatggtcattagcacagacaaaacgatgtgcatgtcaacaccagtcctagaacccacaaaagtaaccttttctgtttcaccgattgaagcgacggagaaatgtaagaaagtggagaagggtaatcgagggcttaaaaacataccagactcgaaggaggcacctgtgaacctgtgtaaacccagtttaggaaaatcaacaatcaaaacgaataccccaataggctgcaaagttagaaaaactgaaattataagttacccaagaccaaacttcaagaatgtcaaagcaaaagttatgtctagagcagtgttgcagcccaaagatgctgctttatcaaaggtcacgcccagacctcagcagaccagtgcctcatcaccctcatcagtgaattcaagacaacaaacagtcttgagcagaacaccgagatctgacttgaatgcagacaaaaaagcagaaattctaattaacaagacacataagcagcagtttaataaactcattactagccaggctgtgcatgttacaactcattctaaaaatgcttcacacagggttccaagaacaacatctgccgtgaaatcgaatcaggaagatgttgacaaagccagttcttctaactcagcatgcgagaccgggtccgtttctgcgttgtttcagaagatcaaaggcatactccctgttaaaatggaaagtgcagaatgtttggaaatgacctatgttcccaacattgataggattagccctgaaaagaagggtgaaaaagaaaatgggacatctatggaaaaacaagagctgaaacaagagattatgaatgagacttttgaatatggttctctgtttttgggctctgcttcaaaaacaacgaccacctcaggtaggaatatatccaagcctgactcctgcggtttgaggcaaatagctgctccaaaagccaaagtggggccccctgtttcctgtttgaggcggaacagtgacaatagaaatcccagtgctgatcgagccgtatctcctcagaggatcaggcgtgtgtccagttctgctggtaatgccgctgtcatcaaatatgaggagaaacctccaaaaccagcatttcagaatggttcctcaggatccttttatttgaagcctttggtatccagggctcatgttcacttgatgaaaactcctccaaaaggtccttcgagaaaaaatttatttacagctcttaatgcagttgaaaagagcaggcaaaagaatcctcgaagcttatgtatccagccacagacagctcccgatgcgctgccccctgagaaaacacttgaattgacgcaatataaaacaaaatgtgaaaaccaaagtggatttatcctgcagctcaagcagcttcttgcctgtggtaataccaagtttgaggcattgacagttgtgattcagcacctgctgtctgagcgggaggaagcactgaaacaacacaaaaccctatctcaagaacttgttaacctccggggagagctagtcactgcttcaaccacctgtgagaaattagaaaaagccaggaatgagttacaaacagtgtatgaagcattcgtccagcagcaccaggctgaaaaaacagaacgagagaatcggcttaaagagttttacaccagggagtatgaaaagcttcgggacacttacattgaagaagcagagaagtacaaaatgcaattgcaagagcagtttgacaacttaaatgctgcgcatgaaacctctaagttggaaattgaagctagccactcagagaaacttgaattgctaaagaaggcctatgaagcctccctttcagaaattaagaaaggccatgaaatagaaaagaaatcgcttgaagatttactttctgagaagcaggaatcgctagagaagcaaatcaatgatctgaagagtgaaaatgatgctttaaatgaaaaattgaaatcagaagaacaaaaaagaagagcaagagaaaaagcaaatttgaaaaatcctcagatcatgtatctagaacaggagttagaaagcctgaaagctgtgttagagatcaagaatgagaaactgcatcaacaggacatcaagttaatgaaaatggagaaactggtggacaacaacacagcattggttgacaaattgaagcgtttccagcaggagaatgaagaattgaaagctcggatggacaagcacatggcaatctcaaggcagctttccacggagcaggctgttctgcaagagtcgctggagaaggagtcgaaagtcaacaagcgactctctatggaaaacgaggagcttctgtggaaactgcacaatggggacctgtgtagccccaagagatcccccacatcctccgccatccctttgcagtcaccaaggaattcgggctccttccctagccccagcatttcacccagatgacacctccccaaagtccacagactctctgaaagcattttgatgcaggtctgcaggactgaccccaaggaggaacgtgggcacaagaggtatatcagcacacgtgtgatcaccgtagggtaactggagcgtcaccaccggcggaatcgcagcttctgagactggaactctggaggaagacttttgcctccgtccaaaagattcctccaaaaaaagatttaaaaaaagatttcggcatcgacacggacgttgttgcacaaagcactt

SEQ ID NO: 153880 - DNA, 5205 bp, Homo sapiens
  Payload ID: 10250
  Gene Symbol: MTUS1
  Gene Name: microtubule associated tumor suppressor 1
  ENST ID: ENST00000520196
  CDS Start-End: 1-1517
gttcttcaggaaaggtcaccagtgagtacacagatggatcacaacaaagactagttggagaaaaggagacacaagcactaacaccagtttctgatggcatggaagtccccaatgattctgcattacaagagttcttttgtttatcccatgatgaatccaatagcgaaccacattcacagagctcatacaggcacaaggaaatgggccaaaatctgagagagacagtgtcctattgtcttattgatgatgaatgccctttaatggtgccagcttttgataagagcgaagctcaagtgctgaacccagagcataaagtcactgagactgaagacacacaaatggtctccaaaggaaaggatttgggaacccaaaatcatacctcagaattgattctaagtagcccgccaggacaaaaggtgggctcgtcatttggactgacttgggatgcaaatgatatggtcattagcacagacaaaacgatgtgcatgtcaacaccagtcctagaacccacaaaagtaaccttttctgtttcaccgattgaagcgacggagaaatgtaagaaagtggagaagggtaatcgagggcttaaaaacataccagactcgaaggaggcacctgtgaacctgtgtaaacccagtttaggaaaatcaacaatcaaaacgaataccccaataggctgcaaagttagaaaaactgaaattataagttacccaagaccaaacttcaagaatgtcaaagcaaaagttatgtctagagcagtgttgcagcccaaagatgctgctttatcaaaggtcacgcccagacctcagcagaccagtgcctcatcaccctcatcagtgaattcaagacaacaaacagtcttgagcagaacaccgagatctgacttgaatgcagacaaaaaagcagaaattctaattaacaagacacataagcagcagtttaataaactcattactagccaggctgtgcatgttacaactcattctaaaaatgcttcacacagggttccaagaacaacatctgccgtgaaatcgaatcaggaagatgttgacaaagccagttcttctaactcagcatgcgagaccgggtccgtttctgcgttgtttcagaagatcaaaggcatactccctgttaaaatggaaagtgcagaatgtttggaaatgacctatgttcccaacattgataggattagccctgaaaagaagggtgaaaaagaaaatgggacatctatggaaaaacaagagctgaaacaagagattatgaatgagacttttgaatatggttctctgtttttgggctctgcttcaaaaacaacgaccacctcaggtaggaatatatccaagcctgactcctgcggtttgaggcaaatagctgctccaaaagccaaagtggggccccctgtttcctgtttgaggcggaacagtgacaatagaaatcccagtgctgatcgagccgtatctcctcagaggatcaggcgtgtgtccagttctgttttgccaaaagctgctttctcatgattattctgattgatcatctccttcagagaacatgtgaaagcctacatccttgaaaactgcacagtcgtcatgggtgaatttgcctagaccacttcctaaatccaaagcatctttgaaaagtcctgcgctgcggaggacaggaagcaccccctcaatagccagcacccacagtgagctgagcacttacagcaacaattctggtaatgccgctgtcatcaaatatgaggagaaacctccaaaaccagcatttcagaatggttcctcaggatccttttatttgaagcctttggtatccagggctcatgttcacttgatgaaaactcctccaaaaggtccttcgagaaaaaatttatttacagctcttaatgcagttgaaaagagcaggcaaaagaatcctcgaagcttatgtatccagccacagacagctcccgatgcgctgccccctgagaaaacacttgaattgacgcaatataaaacaaaatgtgaaaaccaaagtggatttatcctgcagctcaagcagcttcttgcctgtggtaataccaagtttgaggcattgacagttgtgattcagcacctgctgtctgagcgggaggaagcactgaaacaacacaaaaccctatctcaagaacttgttaacctccggggagagctagtcactgcttcaaccacctgtgagaaattagaaaaagccaggaatgagttacaaacagtgtatgaagcattcgtccagcagcaccaggctgaaaaaacagaacgagagaatcggcttaaagagttttacaccagggagtatgaaaagcttcgggacacttacattgaagaagcagagaagtacaaaatgcaattgcaagagcagtttgacaacttaaatgctgcgcatgaaacctctaagttggaaattgaagctagccactcagagaaacttgaattgctaaagaaggcctatgaagcctccctttcagaaattaagaaaggccatgaaatagaaaagaaatcgcttgaagatttactttctgagaagcaggaatcgctagagaagcaaatcaatgatctgaagagtgaaaatgatgctttaaatgaaaaattgaaatcagaagaacaaaaaagaagagcaagagaaaaagcaaatttgaaaaatcctcagatcatgtatctagaacaggagttagaaagcctgaaagctgtgttagagatcaagaatgagaaactgcatcaacaggacatcaagttaatgaaaatggagaaactggtggacaacaacacagcattggttgacaaattgaagcgtttccagcaggagaatgaagaattgaaagctcggatggacaagcacatggcaatctcaaggcagctttccacggagcaggctgttctgcaagagtcgctggagaaggagtcgaaagtcaacaagcgactctctatggaaaacgaggagcttctgtggaaactgcacaatggggacctgtgtagccccaagagatcccccacatcctccgccatccctttgcagtcaccaaggaattcgggctccttccctagccccagcatttcacccagatgacacctccccaaagtccacagactctctgaaagcattttgatgcaggtctgcaggactgaccccaaggaggaacgtgggcacaagaggtatatcagcacacgtgtgatcaccgtagggtaactggagcgtcaccaccggcggaatcgcagcttctgagactggaactctggaggaagacttttgcctccgtccaaaagattcctccaaaaaaagatttaaaaaaagatttcggcatcgacacggacgttgttgcacaaagcacttaaagaacgagagcatcttgttcattgcctttttcacctaagcatagggggaaaaactctcagggccctattaagatttataacctttgtaatgttcttcaccacagacaccttcttgtgagttttcagtctgactgtgggggtggggggtgtgaatgaaatggatgtcacagagtgtcatgtgtctgatgcagcctcctctgctgtgtattaaatgtcaaaatctgaatatatctggatatgtactaatcaaataataatcaatcaatcagcatatacatttcagccaaagccatagaagaaaaagcaatagttgcttgaattatgatcatctaccaccaactctgctcagccctgtaacagggtagggagagggtataacaggaagagctttgacttgtccctgtctatacattctctgtatcttttgggggtaacttcttggcagtttttcagtgttcagccatgtcagttgaaactagatttttctgtagattttttacttacccatgtgagcctaacactatcctgtaattcattttctcaggctatgtgtaaatgtagaaccctaatttttctataaaaaaacaaactaactaactaactgtgtaaagaaagaaaaagggaagtaccaatgggtttttccaccttatttttacctttgatctacccttgcagatttaacctgtcttcttccctcccattattctcattttccttttacctttctccaccatccagagccacaaaagcaaaccttctacctcctacctacttttctctgggacaaggataaaggaatatgattttccagagccccagagccagctcatcttccaggtgctgaaaccactttccaaataaactaaagcctggatttgatattacaaattttgggaaatcttagaataaagaacgagaacaaggaagtcattggctagtataattaagaaaggtaggattcagtgcttaccgatgatgcagtacttgatagaagaaaacagtctgggaggatagcgctcatttttcagttaccctttaaggagtccctttgtctttgggaaagtagcagaatggtccgcttctttcccatgagtggaaaatgtggcttgtccaactctcctccaggttgcatttcagtttctttccaaaacttattacctcccctaatcctgagactttggaaaaggtggaaggaagaactgttgctttatctccccctccctgcatgtgtcaacattgtgatgtcagtatttactaatctacattcagtggctgtacaaataacagctgtagtaagaagagattcaggatgctagaggtgaatatttgggtcatttacatgtacactacatagcaagttgatactcatgttgcatgttcttttaaattagtgattttgtgtcttaagtctttaacttccaatacttcatcatgtatgtaaccttccatgtttgcttctgataaatggaaatgtaggttcactgccacttcatgagatatctctgctcacgcttccaagttgttctcaatgacattagccaaagttgggtttgccattcatcccctaggcatggtaaatcttgtgttgttccctgctgtcctccgtattacgtgaccggcaaataaatctcatagcagttaatataaaacatctttggaggatgggagagaacaggagggaagatgggaaacaaaatagagaattcttaagattttgtttaaaccaaatgtttcatgtagaatgcaaaatgttggcacgtcaaaaatatgaatgtgtagacaactgtagttgtgctcagtttgtagtgatgggaagtgtattttactctgatcaaataaataatgctggaatactcaagaa

SEQ ID NO: 153881 - DNA, 3650 bp, Homo sapiens
  Payload ID: 10250
  Gene Symbol: MTUS1
  Gene Name: microtubule associated tumor suppressor 1
  Uniprot ID: Q9ULD2
  ENST ID: ENST00000544260
  CDS Start-End: 272-1519
tatgagagtaagtagctgcataccctggcacttcaggaatactgggatatgtgacttgcaattaaacaggattgttaccagctttactgttggaattttgaaggtgtggcacaaaatcaggcttgcatgtaagagggaactctgaatttgaaaagctggtaatgccgctgtcatcaaatatgaggagaaacctccaaaaccagcatttcagaatggttcctcaggatccttttatttgaagcctttggtatccagggctcatgttcacttgatgaaaactcctccaaaaggtccttcgagaaaaaatttatttacagctcttaatgcagttgaaaagagcaggcaaaagaatcctcgaagcttatgtatccagccacagacagctcccgatgcgctgccccctgagaaaacacttgaattgacgcaatataaaacaaaatgtgaaaaccaaagtggatttatcctgcagctcaagcagcttcttgcctgtggtaataccaagtttgaggcattgacagttgtgattcagcacctgctgtctgagcgggaggaagcactgaaacaacacaaaaccctatctcaagaacttgttaacctccggggagagctagtcactgcttcaaccacctgtgagaaattagaaaaagccaggaatgagttacaaacagtgtatgaagcattcgtccagcagcaccaggctgaaaaaacagaacgagagaatcggcttaaagagttttacaccagggagtatgaaaagcttcgggacacttacattgaagaagcagagaagtacaaaatgcaattgcaagagcagtttgacaacttaaatgctgcgcatgaaacctctaagttggaaattgaagctagccactcagagaaacttgaattgctaaagaaggcctatgaagcctccctttcagaaattaagaaaggccatgaaatagaaaagaaatcgcttgaagatttactttctgagaagcaggaatcgctagagaagcaaatcaatgatctgaagagtgaaaatgatgctttaaatgaaaaattgaaatcagaagaacaaaaaagaagagcaagagaaaaagcaaatttgaaaaatcctcagatcatgtatctagaacaggagttagaaagcctgaaagctgtgttagagatcaagaatgagaaactgcatcaacaggacatcaagttaatgaaaatggagaaactggtggacaacaacacagcattggttgacaaattgaagcgtttccagcaggagaatgaagaattgaaagctcggatggacaagcacatggcaatctcaaggcagctttccacggagcaggctgttctgcaagagtcgctggagaaggagtcgaaagtcaacaagcgactctctatggaaaacgaggagcttctgtggaaactgcacaatggggacctgtgtagccccaagagatcccccacatcctccgccatccctttgcagtcaccaaggaattcgggctccttccctagccccagcatttcacccagatgacacctccccaaagtccacagactctctgaaagcattttgatgcaggtctgcaggactgaccccaaggaggaacgtgggcacaagaggtatatcagcacacgtgtgatcaccgtagggtaactggagcgtcaccaccggcggaatcgcagcttctgagactggaactctggaggaagacttttgcctccgtccaaaagattcctccaaaaaaagatttaaaaaaagatttcggcatcgacacggacgttgttgcacaaagcacttaaagaacgagagcatcttgttcattgcctttttcacctaagcatagggggaaaaactctcagggccctattaagatttataacctttgtaatgttcttcaccacagacaccttcttgtgagttttcagtctgactgtgggggtggggggtgtgaatgaaatggatgtcacagagtgtcatgtgtctgatgcagcctcctctgctgtgtattaaatgtcaaaatctgaatatatctggatatgtactaatcaaataataatcaatcaatcagcatatacatttcagccaaagccatagaagaaaaagcaatagttgcttgaattatgatcatctaccaccaactctgctcagccctgtaacagggtagggagagggtataacaggaagagctttgacttgtccctgtctatacattctctgtatcttttgggggtaacttcttggcagtttttcagtgttcagccatgtcagttgaaactagatttttctgtagattttttacttacccatgtgagcctaacactatcctgtaattcattttctcaggctatgtgtaaatgtagaaccctaatttttctataaaaaaacaaactaactaactaactgtgtaaagaaagaaaaagggaagtaccaatgggtttttccaccttatttttacctttgatctacccttgcagatttaacctgtcttcttccctcccattattctcattttccttttacctttctccaccatccagagccacaaaagcaaaccttctacctcctacctacttttctctgggacaaggataaaggaatatgattttccagagccccagagccagctcatcttccaggtgctgaaaccactttccaaataaactaaagcctggatttgatattacaaattttgggaaatcttagaataaagaacgagaacaaggaagtcattggctagtataattaagaaaggtaggattcagtgcttaccgatgatgcagtacttgatagaagaaaacagtctgggaggatagcgctcatttttcagttaccctttaaggagtccctttgtctttgggaaagtagcagaatggtccgcttctttcccatgagtggaaaatgtggcttgtccaactctcctccaggttgcatttcagtttctttccaaaacttattacctcccctaatcctgagactttggaaaaggtggaaggaagaactgttgctttatctccccctccctgcatgtgtcaacattgtgatgtcagtatttactaatctacattcagtggctgtacaaataacagctgtagtaagaagagattcaggatgctagaggtgaatatttgggtcatttacatgtacactacatagcaagttgatactcatgttgcatgttcttttaaattagtgattttgtgtcttaagtctttaacttccaatacttcatcatgtatgtaaccttccatgtttgcttctgataaatggaaatgtaggttcactgccacttcatgagatatctctgctcacgcttccaagttgttctcaatgacattagccaaagttgggtttgccattcatcccctaggcatggtaaatcttgtgttgttccctgctgtcctccgtattacgtgaccggcaaataaatctcatagcagttaatataaaacatctttggaggatgggagagaacaggagggaagatgggaaacaaaatagagaattcttaagattttgtttaaaccaaatgtttcatgtagaatgcaaaatgttggcacgtcaaaaatatgaatgtgtagacaactgtagttgtgctcagtttgtagtgatgggaagtgtattttactctgatcaaataaataatgctggaatactcaagaattgc

SEQ ID NO: 153882 - DNA, 567 bp, Homo sapiens
  Payload ID: 10250
  Gene Symbol: MTUS1
  Gene Name: microtubule associated tumor suppressor 1
  ENST ID: ENST00000519066
  CDS Start-End: 166-291
gcacacggtaacctgcaggacatgaagtaagacgcccgagggccaatggcgcgcctcctgctagagctttgaatgtagacagacccgactggtgggtggcgcggccacctgtatgcttcttgcacagtgcgaggggtggggggacttggagacagaagctggaaaatgggctgccccagcagcaaactgtgcctctattctccatgtgcagcaacaaggcgggaggaagcactgaaacaacacaaaaccctatctcaagaacttgttaacctccggggagagctagcttgaccttcagttcacagaattcctggcactgatctgactaagcctagcagaacttctgatgagcaaaatatttctcttgctgaagagagggacagagttatttttgtaattgtgtgaattcctgttaaataatgttgtcatttttttttctgaagcacttttcatatgagaatagtgaaagtttcccctcttgataaacagtaaatccgttgtacttccaagggttggtttgtgagtagtgagtatgaagttgaaaggatgctgtccatgaaggcaact

SEQ ID NO: 153883 - DNA, 1193 bp, Homo sapiens
  Payload ID: 10250
  Gene Symbol: MTUS1
  Gene Name: microtubule associated tumor suppressor 1
  ENST ID: ENST00000634613
  CDS Start-End: 165-1193
cacacggtaacctgcaggacatgaagtaagacgcccgagggccaatggcgcgcctcctgctagagctttgaatgtagacagacccgactggtgggtggcgcggccacctgtatgcttcttgcacagtgcgaggggtggggggacttggagacagaagctggaaaatgggctgccccagcagcaaactgtgcctctattctccatgtgcagcaacaaggcgggaggaagcactgaaacaacacaaaaccctatctcaagaacttgttaacctccggggagagctagtcactgcttcaaccacctgtgagaaattagaaaaagccaggaatgagttacaaacagtgtatgaagcattcgtccagcagcaccaggctgaaaaaacagaacgagagaatcggcttaaagagttttacaccagggagtatgaaaagcttcgggacacttacattgaagaagcagagaagtacaaaatgcaattgcaagagcagtttgacaacttaaatgctgcgcatgaaacctctaagttggaaattgaagctagccactcagagaaacttgaattgctaaagaaggcctatgaagcctccctttcagaaattaagaaaggccatgaaatagaaaagaaatcgcttgaagatttactttctgagaagcaggaatcgctagagaagcaaatcaatgatctgaagagtgaaaatgatgctttaaatgaaaaattgaaatcagaagaacaaaaaagaagagcaagagaaaaagcaaatttgaaaaatcctcagatcatgtatctagaacaggagttagaaagcctgaaagctgtgttagagatcaagaatgagaaactgcatcaacaggacatcaagttaatgaaaatggagaaactggtggacaacaacacagcattggttgacaaattgaagcgtttccagcaggagaatgaagaattgaaagctcggatggacaagcacatggcaatctcaaggcagctttccacggagcaggctgttctgcaagagtcgctggagaaggagtcgaaagtcaacaagcgactctctatggaaaacgaggagcttctgtggaaactgcacaatggggacctgtgtagccccaagagatcccccacatcctccgccatccctttgcagtcaccaaggaattcgggctccttccctagccccagcatttcacccagatga

SEQ ID NO: 153884 - DNA, 1793 bp, Homo sapiens
  Payload ID: 10251
  Gene Symbol: MTUS2
  Gene Name: microtubule associated tumor suppressor candidate 2
  Uniprot ID: Q5JR59
  ENST ID: ENST00000380808
  CDS Start-End: 217-1263
agatctgatcgctgctgccctgctctcctcctcctctcattcctctgcctcctggattcctgaagtttaggagaaataaggtagccaagggaaccacatggaagttgtgacagctcccagcggcgcgcccctttcgtgtgtgccggtacctcggcttaggagttgcccgctgacaccttgaatgaaggaggtccccttgccagccagcctgccgggatgggccattgctgctgcaagccttataactgccttcagtgcctggacaagacgaatgaaagtgcccttgtgaaagaaaaagagctgtcaatcgaacttgcaaacatcagggatgaagttgccttccatacagcaaagtgcgagaaactacaaaaggagaaggaggagctggagaggcggttcgaggacgaggtgaagaggctgggctggcagcagcaggccgagctccaggagctggaggagcggctgcagctgcaattcgaggcggaaatggcgcgcctgcaggaggagcacggtgaccagctgctgagcatccggtgtcaacaccaggagcaggtggaagatctcaccgccagccatgatgctgctctcctagagatggaaaataaccacacagttgccatcacaatcctgcaggatgaccacgaccacaaagtccaagaattgatgtccactcatgagcttgaaaagaaagaattggaagaaaattttgaaaaactgcggctgtcattgcaggaccaggtggacacgctgaccttccagagccagtctctgcgggacagagcccgccgcttcgaagaggccttgaggaagaacacagaggagcagctggagattgcattggctccttatcagcacttggaagaagacatgaagagtctgaagcaggtattagaaatgaagaatcagcaaatacacgagcaagaaaagaagattcttgagctggaaaagctggcagaaaagaacattatcctagaagaaaagatccaggttctccaacagcagaacgaagacctcaaagcaaggattgaccaaaacacagttgtcaccagacagctgtcggaggaaaatgctaacctccaggaatatgttgagaaggaaacccaggagaagaagagattgagccgaaccaatgaagagctgctttggaagctccaaactggggacccgaccagtccgattaaactctcgcccacatctcccgtttaccgcggctcctcctcggggccctcctctccggccagagtcagcacaacacccagatgacgccactacacggcctgcgggagctccggcttctcgtcctccggtctccaccctgagggagcaccgacccggtgccgccggagctggccctgtgcgcatgctcagtagctgcgaatgcatcctaggcgcgtcctcctctgatccccgtgtaagactgccctggtgtcggcacttaggaatgtgtaaatggtaaagtctgatgtgcaaacgttttaccatagttagagccaaaagaaagacacttgcaattgttcttgagcaatgaactttcactgcagaatttcaggttagttacaaaaagctcagttttcaatatacattgaataatcattgtgtactgcaccgatatgtgtgtatatttagatatacgtatatacacatgctgcggttctgaatttcattttttataacatgaagtgctgacatattttagtgaaggtcagcagttttctaacttgtgcctaagaattattgggaaatgaaaatgcatttctatctagcttcccaggaatatttctacccaaaataga

SEQ ID NO: 153885 - DNA, 6938 bp, Homo sapiens
  Payload ID: 10251
  Gene Symbol: MTUS2
  Gene Name: microtubule associated tumor suppressor candidate 2
  ENST ID: ENST00000431530
  CDS Start-End: 59-4198
atttcctcttaatctgattgcagcttgaaggcagcccatttccattaagtaggactgcatggcaagcagccccaccaaagggttgacaatgagcgtcccagtggctcctaagaaatcatgttacactcagttgcgggacaacagaaatgcagcaagaaataataatgaaagcatcttaagtctgggagatacgaatgccaatcaaatcatgttggaggtcagctcctctcatgacgagtccaagacatgtgacctgggagatgaaattggaaatacaaattcaagtgagccagaaaaccgtacccatttccataaggaatttcaccaacttcagggctttgggaaaggctctcaggctggctctgccagcctgaaagattttagactttcttcaaccattcagagggaactcaatgaagagcacacagtggagagaggcacagatagcctgcagaccacgcggagtattcagggaccaagtctgtcgagttggaggaatgtgatgagtgaggccagtctagacgttttggctaaaagggatgctgaaattccccggcatgttcccaaggataaactggcaaagacccttgacaatgaggaactgaggaggcattctttggaaagagcaagcagctctgtagctgcagtcgggagcctgactccgcagcatccacagcctctatccctcgactcccgggaagcacggggtcagatacctgggggtggggaggggccacagaagacattgccagaccacgctgtcccggcagctttccctgcaactgacagtacctcagagggaaagagtgtgcgtcatcctaaaccatctacctcagaaagcaagcagagcactccctcagagacccaaacagtgggggcacatgtactgcaggtgtgcagtgagcacacatcacattccgcccatccagagcctgctctgaatttgactttggcatcgaaggaaatcccaagtaaactggaagcacaattaggtcagggaaagggagaggccaagctggatctgaaatatgttcctcccaggagagttgaacaggagggaaaggcagcccaggaagggtatctgggatgccacaaggaagagaatctgtcagccttggagggaagggatccatgtggggaagcacacccggaagccaccgatgcacttggccatctgctgaacagtgacctccaccaccttggggtgggaagaggcaactgtgaagagaagagaggagtcaacccaggggagcaggattctctccacaccacccccaaacagggctctgcttccttaggaggggctgataatcagcccactggcaaaatttcaccatgtgcaggtgagaagttgggtgaaaggacatccagcagcttttcaccaggtgacagtcatgtggcttttattcctaataatctgactgacagcaagcccttggatgtcattgaggaggaaaggcggttgggcagtgggaataaggacagtgttatggttttggtgttcaatccttctgttggagagaacaagacggaggtgcctgagcccctggaccctcaaagtggccgctcagaagcacgggaaagcaaagaggtcaccacatctgttgctgaaaacaggaaccttctagagaatgcagataagattgaaagcacctcagcaagagcagattcagttctcaatattccagcacccctccacccagagacaactgtgaacatgacctaccagcctacaacacccagtagcagttttcaggatgttagcgtgttcggtatggatgcggggtcccccttggtagttccaccccctactgatagtgcacgcttgttgaacacgtcccccaaagtgcctgacaagaacacttgccccagtgggatccccaagcctgtcttcacacattccaaggacacaccttcctcgcaggagggaatggagaactatcaggttgaaaaaacagaggagaggacagaaactaagcccatcattatgcccaagcccaagcatgtgaggcccaagatcatcacctacatcaggaggaatccccaggccctgggccaggtggacgcctcgctggttccagtggggcttccatatgccccgcccacatgtaccatgcctcttccccacgaagagaaggcagcaggtggtgacctgaagccatctgccaacctctatgagaaattcaagccagacctgcagaagccaagggtcttcagttccggattgatggtgtctggaatcaagcccccgggacatcctttcagtcaaatgagtgaaaagtttttgcaggaggttacagaccaccctggaaaagaagagttttgttctcctccctatgctcattatgaagtccctccaactttctatcggtcagccatgctccttaagccccagctaggattgggtgcaatgtcccgtttaccatctgcaaagagcaggattctgattgcaagtcagaggtcttcagcgagcgccatccacccaccaggacccataacaacagccaccagtctctacagttccgatccttcagcagatttaaagaaagcttccagttcaaatgctgcaaaatccaatctcccgaaatctggtctccgtcctcccggatactcacgtctcccggcagccaaactggcggcatttggctttgtccggagctccagcgtctcctcagtctccagcacccagtccggggacagtgcacagccagagcagggccggccagccacccgttcaacctttgggaatgaagaacagccagttctgaaggcatctctgccttctaaggacacacccaagggggccggccgggtggcccctccagcatcctccagtgtgacagcaccccgcaggagtttacttccagcgccaaaatccacttccacacccgctggaacaaagaaagatgctcagaaagatcaagatacgaataaacctgctgtttcatctcctaagagagtagcagcttcaaccaccaagcttcattcaccaggatacccaaagcagaggactgcggcagctcgaaatgggtttccgcccaagccggacccgcaggcccgtgaggctgagcggcagctggtgctgcggctgaaggagcggtgtgagcagcagaccagacagctgggcgttgcgcaaggggagctgaagagggccatctgcggctttgatgccctcgccgtggccacgcagcatttctttagaaagaatgaaagtgcccttgtgaaagaaaaagagctgtcaatcgaacttgcaaacatcagggatgaagttgccttccatacagcaaagtgcgagaaactacaaaaggagaaggaggagctggagaggcggttcgaggacgaggtgaagaggctgggctggcagcagcaggccgagctccaggagctggaggagcggctgcagctgcaattcgaggcggaaatggcgcgcctgcaggaggagcacggtgaccagctgctgagcatccggtgtcaacaccaggagcaggtggaagatctcaccgccagccatgatgctgctctcctagagatggaaaataaccacacagttgccatcacaatcctgcaggatgaccacgaccacaaagtccaagaattgatgtccactcatgagcttgaaaagaaagaattggaagaaaattttgaaaaactgcggctgtcattgcaggaccaggtggacacgctgaccttccagagccagtctctgcgggacagagcccgccgcttcgaagaggccttgaggaagaacacagaggagcagctggagattgcattggctccttatcagcacttggaagaagacatgaagagtctgaagcaggtattagaaatgaagaatcagcaaatacacgagcaagaaaagaagattcttgagctggaaaagctggcagaaaagaacattatcctagaagaaaagatccaggttctccaacagcagaacgaagacctcaaagcaaggattgaccaaaacacagttgtcaccagacagctgtcggaggaaaatgctaacctccaggaatatgttgagaaggaaacccaggagaagaagagattgagccgaaccaatgaagagctgctttggaagctccaaactggggacccgaccagtccgattaaactctcgcccacatctcccgtttaccgcggctcctcctcggggccctcctctccggccagagtcagcacaacacccagatgacgccactacacggcctgcgggagctccggcttctcgtcctccggtctccaccctgagggagcaccgacccggtgccgccggagctggccctgtgcgcatgctcagtagctgcgaatgcatcctaggcgcgtcctcctctgatccccgtgtaagactgccctggtgtcggcacttaggaatgtgtaaatggtaaagtctgatgtgcaaacgttttaccatagttagagccaaaagaaagacacttgcaattgttcttgagcaatgaactttcactgcagaatttcaggttagttacaaaaagctcagttttcaatatacattgaataatcattgtgtactgcaccgatatgtgtgtatatttagatatacgtatatacacatgctgcggttctgaatttcattttttataacatgaagtgctgacatattttagtgaaggtcagcagttttctaacttgtgcctaagaattattgggaaatgaaaatgcatttctatctagcttcccaggaatatttctacccaaaatagaaaaaggaaaaaaaaaaagatacagagaagaagcgcctttcaactcaccaccaagtggtactctctttaacacgaacaccagctatttgtgaacggtaactgcctttggaacaatcagcttctcagtcaacatgatgtgagatcactattattccattcgcaagttttaattattgatactcctgtcatgagcggataagggagagcagtgggaaaccctaagggggtttagcagttttgcagatgttacccatgacagtgactcatctctgatagtcttgtaaacacaagttttgcttttttcctaaatggcatctcagactcggtcattaagctattgttgcaccctccggaaaacatggcagagcatgacctttgagtaagagtgaggatgaccttgcagatgactgtgcccattcgcgctccatcctcatgaaggaaattgctgccaaggtctgtattttgaccaggcacagagggggaacatcactccagctttccatgtggttcactctgatgcgatgctgtaaatgatcaactctttgaaataggaccctcaggcccccatttcctagcagccccccttcagtttggttctacaactcaaccccttcactgcacattgagatggctcaggggttctagcaggggcttccagaaaaaaaaaacaccatttctgtcccgggggaccagttctgagctgtgctagatcatcacacgaccacccagaaacccacttgcacttcctgctggatgatcaggcaacgctgctgctgaccgtgctcccatcttagacccagaaggttctcccaaacagaggagcccagtgaaacagccagccagggggcaccagctcctggactggcatctgtctctaaaatggtagaattaggatatgaacagtactcatgtagtggtgtggaagattaggagcatgatacacaaaaggaagaagtagttttaacagatatggtgatgatgatgatgcccttgtttcctgtatgtgacaaagaccctgcactttctccctgagacccccccaaaattgtcctgagcacaggcctgtctttgagcgtgcccaaggcgagaagaaccatgagggggtcctgcaggggccggagccatggaacggggaagaaaacagcccgcggacggggtcggcttgtccagggcacgcctgctcggcacacgtgttgccaacgtgaaggcagacatggtccctggccctaggatgagtccacgctgggcttccgggcctcaggtgcatctccagccaacctccaagggtcttgctccttctggggacgtacacagtaaatccacatggaaacaccaccatttctctttgctttagtggctctgcatgatactgtgatattgagttgggcattccattagagtagatcttgccacattgactaaatacacaagtatttattctagtagcaggcacaacctgcaaacacaaattcagttacagcttagctgtccgaattaggaaccgcttacatagccgcacctgctaaatgcagttacacagcaatactgacttccgtgtgatgctagaacgtggtacagtgtattaggctgctgtggtcagagttgtagcatcgttagcactaagtaattcctcattaggtggacttcggtgagagctttgccctaacctgccctgaccttgggtacttgagctaatttccacgtggccctggcttcgtggtttgtttgttttttttcttttgttacggacacccatcatgtatggctcctcatctgagccatcaccgctcccgaaacacatggggcggcagctgctgtgcctccttctcaattcttccacccccccacaccatcagaattcggatttctctccacgtggcgtctgcctctgtccccttccaggctggagcgacgtttccacgttcggatgctgcagcctctgcacctgcctcagacagacccaccagataccacctgtctcttcgtggcatttgggagatgcgtgggcggcctgccccccgaccgccgcccctgcccaccacatgctgggacaaggttctggctggatgtcagaatggatgggggtgggggcagccctggccgtgattagttgaatgaatggggtcacaacatcccttttcctgcccctacagtttgtgttgcatatttgtgtttaaagcctattaaaataaacttgagggactttctgcg

SEQ ID NO: 153886 - DNA, 1165 bp, Homo sapiens
  Payload ID: 10251
  Gene Symbol: MTUS2
  Gene Name: microtubule associated tumor suppressor candidate 2
  Uniprot ID: Q5JR59
  ENST ID: ENST00000542829
  CDS Start-End: 338-1114
agccaagggaaccacatggaagttgtgacagctcccagcggcgcgcccctttcgtgtgtgccggtacctcggcttaggagttgcccgctgacaccttgaatgaaggaggtccccttgccagccagcctgccgggatgggccattgctgctgcaagccttataactgccttcagtgcctggacaagacgccttccatacagcaaagtgcgagaaactacaaaaggagaaggaggagctggagaggcggttcgaggacgaggtgaagaggctgggctggcagcagcaggccgagctccaggagctggaggagcggctgcagctgcaattcgaggcggaaatggcgcgcctgcaggaggagcacggtgaccagctgctgagcatccggtgtcaacaccaggagcaggtggaagatctcaccgccagccatgatgctgctctcctagagatggaaaataaccacacagttgccatcacaatcctgcaggatgaccacgaccacaaagtccaagaattgatgtccactcatgagcttgaaaagaaagaattggaagaaaattttgaaaaactgcggctgtcattgcaggaccaggtggacacgctgaccttccagagccagtctctgcgggacagagcccgccgcttcgaagaggccttgaggaagaacacagaggagcagctggagattgcattggctccttatcagcacttggaagaagacatgaagagtctgaagcaggtattagaaatgaagaatcagcaaatacacgagcaagaaaagaagattcttgagctggaaaagctggcagaaaagaacattatcctagaagaaaagatccaggttctccaacagcagaacgaagacctcaaagcaaggattgaccaaaacacagttgtcaccagacagctgtcggaggaaaatgctaacctccaggaatatgttgagaaggaaacccaggagaagaagagattgagccgaaccaatgaagagctgctttggaagctccaaactggggacccgaccagtccgattaaactctcgcccacatctcccgtttaccgcggctcctcctcggggccctcctctccggccagagtcagcacaacacccagatgacgccactacacggcctgcgggagctccggcttctcgtcctccggtctccac

SEQ ID NO: 153887 - DNA, 7430 bp, Homo sapiens
  Payload ID: 10251
  Gene Symbol: MTUS2
  Gene Name: microtubule associated tumor suppressor candidate 2
  ENST ID: ENST00000612955
  CDS Start-End: 550-4689
agcgagcgccggcggctccaggtgcgggggcgcccctcgcgctccacctgcgccgccgccgccggctctcagggcaagtttatctccccccttctgcggaaacccttgaccgcttagcggagtacagacctgtcggtaaatagaaaactcgagctggagaggaggaggaagcagcgtggcggaacccggcccgagatgagcgtctccgtgagggcagtggtggcctcttggacattacatctttcttggctctttttgacccaggtttccacagctggattgtttactagggccaattgtcaccaatggcagtaaaactcattttctggggaatagggtctcatggactgattggctctcattcagcaggaacctaacagataagtcttcctgctgtatatcaagacaatgcttggttttcaagctgttctgagaatgattaaagcagtgtcgcaaggtgacattgtcaggggagaacaagcagcttgagaatttcctcttaatctgattgcagcttgaaggcagcccatttccattaagtaggactgcatggcaagcagccccaccaaagggttgacaatgagcgtcccagtggctcctaagaaatcatgttacactcagttgcgggacaacagaaatgcagcaagaaataataatgaaagcatcttaagtctgggagatacgaatgccaatcaaatcatgttggaggtcagctcctctcatgacgagtccaagacatgtgacctgggagatgaaattggaaatacaaattcaagtgagccagaaaaccgtacccatttccataaggaatttcaccaacttcagggctttgggaaaggctctcaggctggctctgccagcctgaaagattttagactttcttcaaccattcagagggaactcaatgaagagcacacagtggagagaggcacagatagcctgcagaccacgcggagtattcagggaccaagtctgtcgagttggaggaatgtgatgagtgaggccagtctagacgttttggctaaaagggatgctgaaattccccggcatgttcccaaggataaactggcaaagacccttgacaatgaggaactgaggaggcattctttggaaagagcaagcagctctgtagctgcagtcgggagcctgactccgcagcatccacagcctctatccctcgactcccgggaagcacggggtcagatacctgggggtggggaggggccacagaagacattgccagaccacgctgtcccggcagctttccctgcaactgacagtacctcagagggaaagagtgtgcgtcatcctaaaccatctacctcagaaagcaagcagagcactccctcagagacccaaacagtgggggcacatgtactgcaggtgtgcagtgagcacacatcacattccgcccatccagagcctgctctgaatttgactttggcatcgaaggaaatcccaagtaaactggaagcacaattaggtcagggaaagggagaggccaagctggatctgaaatatgttcctcccaggagagttgaacaggagggaaaggcagcccaggaagggtatctgggatgccacaaggaagagaatctgtcagccttggagggaagggatccatgtggggaagcacacccggaagccaccgatgcacttggccatctgctgaacagtgacctccaccaccttggggtgggaagaggcaactgtgaagagaagagaggagtcaacccaggggagcaggattctctccacaccacccccaaacagggctctgcttccttaggaggggctgataatcagcccactggcaaaatttcaccatgtgcaggtgagaagttgggtgaaaggacatccagcagcttttcaccaggtgacagtcatgtggcttttattcctaataatctgactgacagcaagcccttggatgtcattgaggaggaaaggcggttgggcagtgggaataaggacagtgttatggttttggtgttcaatccttctgttggagagaacaagacggaggtgcctgagcccctggaccctcaaagtggccgctcagaagcacgggaaagcaaagaggtcaccacatctgttgctgaaaacaggaaccttctagagaatgcagataagattgaaagcacctcagcaagagcagattcagttctcaatattccagcacccctccacccagagacaactgtgaacatgacctaccagcctacaacacccagtagcagttttcaggatgttagcgtgttcggtatggatgcggggtcccccttggtagttccaccccctactgatagtgcacgcttgttgaacacgtcccccaaagtgcctgacaagaacacttgccccagtgggatccccaagcctgtcttcacacattccaaggacacaccttcctcgcaggagggaatggagaactatcaggttgaaaaaacagaggagaggacagaaactaagcccatcattatgcccaagcccaagcatgtgaggcccaagatcatcacctacatcaggaggaatccccaggccctgggccaggtggacgcctcgctggttccagtggggcttccatatgccccgcccacatgtaccatgcctcttccccacgaagagaaggcagcaggtggtgacctgaagccatctgccaacctctatgagaaattcaagccagacctgcagaagccaagggtcttcagttccggattgatggtgtctggaatcaagcccccgggacatcctttcagtcaaatgagtgaaaagtttttgcaggaggttacagaccaccctggaaaagaagagttttgttctcctccctatgctcattatgaagtccctccaactttctatcggtcagccatgctccttaagccccagctaggattgggtgcaatgtcccgtttaccatctgcaaagagcaggattctgattgcaagtcagaggtcttcagcgagcgccatccacccaccaggacccataacaacagccaccagtctctacagttccgatccttcagcagatttaaagaaagcttccagttcaaatgctgcaaaatccaatctcccgaaatctggtctccgtcctcccggatactcacgtctcccggcagccaaactggcggcatttggctttgtccggagctccagcgtctcctcagtctccagcacccagtccggggacagtgcacagccagagcagggccggccagccacccgttcaacctttgggaatgaagaacagccagttctgaaggcatctctgccttctaaggacacacccaagggggccggccgggtggcccctccagcatcctccagtgtgacagcaccccgcaggagtttacttccagcgccaaaatccacttccacacccgctggaacaaagaaagatgctcagaaagatcaagatacgaataaacctgctgtttcatctcctaagagagtagcagcttcaaccaccaagcttcattcaccaggatacccaaagcagaggactgcggcagctcgaaatgggtttccgcccaagccggacccgcaggcccgtgaggctgagcggcagctggtgctgcggctgaaggagcggtgtgagcagcagaccagacagctgggcgttgcgcaaggggagctgaagagggccatctgcggctttgatgccctcgccgtggccacgcagcatttctttagaaagaatgaaagtgcccttgtgaaagaaaaagagctgtcaatcgaacttgcaaacatcagggatgaagttgccttccatacagcaaagtgcgagaaactacaaaaggagaaggaggagctggagaggcggttcgaggacgaggtgaagaggctgggctggcagcagcaggccgagctccaggagctggaggagcggctgcagctgcaattcgaggcggaaatggcgcgcctgcaggaggagcacggtgaccagctgctgagcatccggtgtcaacaccaggagcaggtggaagatctcaccgccagccatgatgctgctctcctagagatggaaaataaccacacagttgccatcacaatcctgcaggatgaccacgaccacaaagtccaagaattgatgtccactcatgagcttgaaaagaaagaattggaagaaaattttgaaaaactgcggctgtcattgcaggaccaggtggacacgctgaccttccagagccagtctctgcgggacagagcccgccgcttcgaagaggccttgaggaagaacacagaggagcagctggagattgcattggctccttatcagcacttggaagaagacatgaagagtctgaagcaggtattagaaatgaagaatcagcaaatacacgagcaagaaaagaagattcttgagctggaaaagctggcagaaaagaacattatcctagaagaaaagatccaggttctccaacagcagaacgaagacctcaaagcaaggattgaccaaaacacagttgtcaccagacagctgtcggaggaaaatgctaacctccaggaatatgttgagaaggaaacccaggagaagaagagattgagccgaaccaatgaagagctgctttggaagctccaaactggggacccgaccagtccgattaaactctcgcccacatctcccgtttaccgcggctcctcctcggggccctcctctccggccagagtcagcacaacacccagatgacgccactacacggcctgcgggagctccggcttctcgtcctccggtctccaccctgagggagcaccgacccggtgccgccggagctggccctgtgcgcatgctcagtagctgcgaatgcatcctaggcgcgtcctcctctgatccccgtgtaagactgccctggtgtcggcacttaggaatgtgtaaatggtaaagtctgatgtgcaaacgttttaccatagttagagccaaaagaaagacacttgcaattgttcttgagcaatgaactttcactgcagaatttcaggttagttacaaaaagctcagttttcaatatacattgaataatcattgtgtactgcaccgatatgtgtgtatatttagatatacgtatatacacatgctgcggttctgaatttcattttttataacatgaagtgctgacatattttagtgaaggtcagcagttttctaacttgtgcctaagaattattgggaaatgaaaatgcatttctatctagcttcccaggaatatttctacccaaaatagaaaaaggaaaaaaaaaaagatacagagaagaagcgcctttcaactcaccaccaagtggtactctctttaacacgaacaccagctatttgtgaacggtaactgcctttggaacaatcagcttctcagtcaacatgatgtgagatcactattattccattcgcaagttttaattattgatactcctgtcatgagcggataagggagagcagtgggaaaccctaagggggtttagcagttttgcagatgttacccatgacagtgactcatctctgatagtcttgtaaacacaagttttgcttttttcctaaatggcatctcagactcggtcattaagctattgttgcaccctccggaaaacatggcagagcatgacctttgagtaagagtgaggatgaccttgcagatgactgtgcccattcgcgctccatcctcatgaaggaaattgctgccaaggtctgtattttgaccaggcacagagggggaacatcactccagctttccatgtggttcactctgatgcgatgctgtaaatgatcaactctttgaaataggaccctcaggcccccatttcctagcagccccccttcagtttggttctacaactcaaccccttcactgcacattgagatggctcaggggttctagcaggggcttccagaaaaaaaaaacaccatttctgtcccgggggaccagttctgagctgtgctagatcatcacacgaccacccagaaacccacttgcacttcctgctggatgatcaggcaacgctgctgctgaccgtgctcccatcttagacccagaaggttctcccaaacagaggagcccagtgaaacagccagccagggggcaccagctcctggactggcatctgtctctaaaatggtagaattaggatatgaacagtactcatgtagtggtgtggaagattaggagcatgatacacaaaaggaagaagtagttttaacagatatggtgatgatgatgatgcccttgtttcctgtatgtgacaaagaccctgcactttctccctgagacccccccaaaattgtcctgagcacaggcctgtctttgagcgtgcccaaggcgagaagaaccatgagggggtcctgcaggggccggagccatggaacggggaagaaaacagcccgcggacggggtcggcttgtccagggcacgcctgctcggcacacgtgttgccaacgtgaaggcagacatggtccctggccctaggatgagtccacgctgggcttccgggcctcaggtgcatctccagccaacctccaagggtcttgctccttctggggacgtacacagtaaatccacatggaaacaccaccatttctctttgctttagtggctctgcatgatactgtgatattgagttgggcattccattagagtagatcttgccacattgactaaatacacaagtatttattctagtagcaggcacaacctgcaaacacaaattcagttacagcttagctgtccgaattaggaaccgcttacatagccgcacctgctaaatgcagttacacagcaatactgacttccgtgtgatgctagaacgtggtacagtgtattaggctgctgtggtcagagttgtagcatcgttagcactaagtaattcctcattaggtggacttcggtgagagctttgccctaacctgccctgaccttgggtacttgagctaatttccacgtggccctggcttcgtggtttgtttgttttttttcttttgttacggacacccatcatgtatggctcctcatctgagccatcaccgctcccgaaacacatggggcggcagctgctgtgcctccttctcaattcttccacccccccacaccatcagaattcggatttctctccacgtggcgtctgcctctgtccccttccaggctggagcgacgtttccacgttcggatgctgcagcctctgcacctgcctcagacagacccaccagataccacctgtctcttcgtggcatttgggagatgcgtgggcggcctgccccccgaccgccgcccctgcccaccacatgctgggacaaggttctggctggatgtcagaatggatgggggtgggggcagccctggccgtgattagttgaatgaatggggtcacaacatcccttttcctgcccctacagtttgtgttgcatatttgtgtttaaagcctattaaaataaacttgagggactttctgcga

SEQ ID NO: 153888 - DNA, 5718 bp, Homo sapiens
  Payload ID: 10252
  Gene Symbol: MTCL1
  Gene Name: microtubule crosslinking factor 1
  Uniprot ID: Q9Y4B5
  ENST ID: ENST00000306329
  CDS Start-End: 1-5718
atggagacactgaacggccccgcgggcggaggtgccccggacgcgaagctgcagccgcccggccagcaccaccgccaccaccacctccacccggtggccgaaaggcggcggctgcaccgtgcgccctcgcccgccagacccttcctcaaggacctgcacgcccggcccgccgcgcccggcccggccgtcccctcctcgggccgagccccggctcccgccgccccgcgctcgcccaacctcgcgggcaaagcgccgccctcgccggggtccctggccgcgcccggccgcctctctcggcgcagtggcggcgtcccgggcgcgaaggacaagcccccgccgggcgccggggccagagcggcgggcggtgccaaggctgccctgggaagcaggagggcggcgcgcgtggcgcccgcggagccgctgtcccgggctgggaagcctcccggagccgagccgccgtctgccgctgccaagggccgcaaagccaagcgcggctcccgggcgccacccgcccgcaccgtcggccccccgaccccggccgcccggatccctgccgtgaccctcgcggtgacctcggtggccgggtccccggcccgctgctcgcgcatcagccacacggacagcagctccgacctctctgactgcccctccgaacccctgtccgacgagcagcgcctgctccctgccgccagcagcgacgccgaatccggcacgggctccagcgaccgtgaacccccacgaggagcgccgacgccgagccccgcagcccgaggagcgccgccgggcagccccgagcccccagcgctcctcgccgcgcccctcgccgcgggcgcctgtcccgggggccggagcatcccgagcggggtttcggggggtttcgcggggcccggcgtggcggaggatgtccgggggcgctcgccaccggagcgaccagtccccgggacccccaaggagcccagcctgggcgagcagtctcggctcgtgccagcggcggaggaagaagagctgctgcgggagatggaggagctgcgctcggagaacgactatctcaaggatgagttagatgaactccgtgctgagatggaagagatgagagacagttatttagaggaagatgtttaccagctgcaggaacttcggcgagaactggaccgcgctaataaaaactgccgaatcctgcagtaccgtcttcggaaagccgagcagaaaagcctgaaagtggctgagacgggtcaggtggatggtgagcttattcgaagcctggagcaggacttgaaggtagccaaagatgtatctgtcagattgcaccacgaacttaagacggtggaggaaaagcgcgctaaagctgaggatgaaaacgaaactctccgacagcagatgattgaagtggaaatatccaaacaggccctccagaatgagctggagagactgaaagagagttccctaaaaagaagaagcactcgggaaatgtacaaggagaagaaaacctttaaccaggatgacagtgccgatttgaggtgccagctccagtttgccaaagaggaagccttcctgatgcgcaaaaagatggccaagctaggaagggagaaggacgagctggagcaggagctccagaagtacaagtccctctatggggatgtggacagtcccctgcccacgggggaagcaggcgggccccccagcacccgggaggccgagctgaagctgcggctaaagctggtggaggaggaagccaacatcttgggccggaagatcgtggagctggaggtggagaaccgtggcctcaaggcagagatggaggacatgcggggccagcaggagcgggagggcccgggtcgggaccacgcacccagcattcctacctcacccttcggtgactccctggagtcctccactgagctccgccgccacctgcagtttgtagaagaggaagcggagttgctccggaggtccatctccgagatcgaagaccacaaccggcaactgacccacgagctcagcaagtttaagtttgagcctccccgggagccgggctggctaggagagggtgcaagtcctggtgccgggggtggggcccccctgcaggaggagctgaagtcagccaggctgcagatcagcgagctcagcggcaaggtgctcaaactgcagcacgagaaccacgcgctgctgtccaacatccagcgctgcgacctggcagcccacctggggctgcgtgcccccagtccccgggacagcgatgccgagagtgatgcgggcaagaaggagagtgatggggaggagagccgcctgccccagcccaagcgggaagggcctgttggcggggagagtgactcggaggaaatgtttgagaagacgtcgggcttcgggagcgggaagccatcggaggccagcgagccatgccccacggagctcctgaaggcccgggaggactctgagtacctagtgaccctaaaacacgaggcccagcggctagagcggacggtggagcgcctcatcacggacaccgacagcttcctccatgatgcggggctgcggggtggtgcgcccttaccggggcctggcctccagggcgaagaggagcagggtgagggggaccagcaggagccccagctgctggggaccatcaacgccaagatgaaggctttcaagaaagagctgcaggccttcctggagcaggtgaaccgcattggggatggcctatcccccttgccccacctcacagagtcctctagcttcctctccactgtgacttccgtgtcccgggactcccccatcgggaacctggggaaggagctgggcccagacttgcagtccagactgaaagagcagctggagtggcagctcgggccggcccgaggggacgagcgggagagcctgcgcctccgagccgcgcgggagctgcaccgccgcgcagacggggacaccgggagccacgggctgggaggccagacctgcttcagcctggagatggaggaggagcacctctatgccttgaggtggaaagaactggaaatgcacagcctggctttgcaaaacaccctccatgagcgaacctggagtgatgagaagaatctgatgcagcaggagctccggtccttgaagcagaacattttcctcttctacgtcaaactcaggtggctgctgaaacactggcggcaagggaagcagatggaggaggaaggagaggagttcactgagggtgaacatccagagaccctctccaggctcggggagcttggagtccaggggggtcaccaggcggatggcccagaccacgacagtgaccgaggctgtggctttccagtgggggagcactccccacactcccgggtgcagattggagatcacagcttgcggctgcagaccgcggacaggggacagccccacaaacaggtggtggaaaaccagcagctgttcagcgccttcaaggccttgctggaggacttccgtgcggagctgcgggaggatgagcgtgcccgactacggctgcagcagcaatatgccagcgacaaggcggcctgggacgtggagtgggccgtgctcaagtgccgtctggaacagctggaagagaagactgagaacaagttgggagaactaggctcctccgctgagagcaagggggccttgaagaaggagagagaggtgcaccagaagctcctggcagacagtcacagcctggtcatggacctgcgctggcagatccatcacagcgagaagaactggaaccgggagaaggtggaacttctcgaccgcctggacagagatcggcaggagtgggagcggcagaagaaggaattcttgtggaggatagagcagttgcagaaagagaacagtccccggagaggtggcagtttcctctgtgatcaaaaagacggcaacgttcgcccctttccccaccagggaagcctccgcatgccccgtccagtggccatgtggccttgtgcagatgctgactccatcccgtttgaagaccggccgctgtccaagctgaaggagtcggacaggtgctcggccagtgagaatctctacctggatgccttgtccctggatgacgagccagaagagccaccagcccacaggcccgagagggagttcaggaaccgcctccctgaggaagaagaaaatcacaaaggaaatcttcaaagggcggtgtccgtgtcctccatgtctgagttccagcgtctaatggacatctcccccttcctgcctgagaagggcctgccgtccaccagcagcaaggaggatgtcaccccacccctgtctccagacgacctcaagtacatcgaggagttcaacaagagctgggactacacacccaacaggggccacaatggtggggggccggacctttgggccgacaggaccgaggtggggcgggcagggcacgaggacagcacagagcctttccccgactcctcctggtacctaaccacaagtgtcaccatgaccacggacaccatgaccagcccagagcactgccagaagcagccactgcggagccacgtcctcaccgagcagtcggggttgcgcgtgttacacagcccgcctgccgtgcgcagggtcgacagcatcacggcggcaggtggtgagggtccctttcccacaagcagagccagagggagcccgggagacaccaagggaggccctccagaacccatgctcagcaggtggccttgcacctcccccaggcactcccgggactatgtggagggggcacggcgcccccttgatagtcccctctgtacctccctggggtttgcctccccactgcacagcctggagatgtccaagaacttgagtgatgacatgaaggaggtggccttctctgtcaggaatgccatctgctccggccctggcgagctgcaagtcaaggacatggcctgccagaccaatgggtcccggacgatggggacccagactgttcagaccatcagtgtgggcttgcagactgaagccctgcgtggcagcggtgtcaccagcagcccccacaagtgtctcactccaaaggctgggggcggtgctacacccgtgtcgtctccttcccggagccttaggagcagacaggtggcccctgccatcgagaaggtgcaggccaagtttgaacgcacatgctgctcccccaagtatggttctcccaagctgcagaggaagcccctccccaaagccgaccagccaaataacaggacgtcaccagggatggcccagaaagggtacagtgagtcagcctgggcccgctccaccaccacaagggagagccccgtgcacaccaccattaatgatggcctctccagcctcttcaacatcattgaccacagccccgtggtgcaggaccccttccagaaggggctgcgggccggcagtcggtctcgctcagcagagccccgaccagagctgggcccaggccaggaaacaggcaccaattcccgaggaaggtcgcctagccccattggggtggggtcagagatgtgcagggaggaagggggagagggcacgccagtgaagcaggacttatctgctccccctggctacacgctcactgagaacgtggcccggatcctcaacaagaagctgctggaacatgccttaaaggaggagaggaggcaggctgcccacgggcccccgggtctccacagtgacagccactcgctgggggacacagccgagccagggcccatggagaaccaaactgtcttgctaactgccccctggggactctag

SEQ ID NO: 153889 - DNA, 6093 bp, Homo sapiens
  Payload ID: 10252
  Gene Symbol: MTCL1
  Gene Name: microtubule crosslinking factor 1
  Uniprot ID: Q9Y4B5
  ENST ID: ENST00000359865
  CDS Start-End: 143-4903
gagtgttttcagaagtgggaatagcaggcgaggtcttgaggcctgaagaagcaaagcgtcgcttagtcaatgctgagatgcgtcttgtggaacagaatttttgggacatttgcaggatgagttagatgaactccgtgctgagatggaagagatgagagacagttatttagaggaagatgtttaccagctgcaggaacttcggcgagaactggaccgcgctaataaaaactgccgaatcctgcagtaccgtcttcggaaagccgagcagaaaagcctgaaagtggctgagacgggtcaggtggatggtgagcttattcgaagcctggagcaggacttgaaggtagccaaagatgtatctgtcagattgcaccacgaacttaagacggtggaggaaaagcgcgctaaagctgaggatgaaaacgaaactctccgacagcagatgattgaagtggaaatatccaaacaggccctccagaatgagctggagagactgaaagagagttccctaaaaagaagaagcactcgggaaatgtacaaggagaagaaaacctttaaccaggatgacagtgccgatttgaggtgccagctccagtttgccaaagaggaagccttcctgatgcgcaaaaagatggccaagctaggaagggagaaggacgagctggagcaggagctccagaagtacaagtccctctatggggatgtggacagtcccctgcccacgggggaagcaggcgggccccccagcacccgggaggccgagctgaagctgcggctaaagctggtggaggaggaagccaacatcttgggccggaagatcgtggagctggaggtggagaaccgtggcctcaaggcagagatggaggacatgcggggccagcaggagcgggagggcccgggtcgggaccacgcacccagcattcctacctcacccttcggtgactccctggagtcctccactgagctccgccgccacctgcagtttgtagaagaggaagcggagttgctccggaggtccatctccgagatcgaagaccacaaccggcaactgacccacgagctcagcaagtttaagtttgagcctccccgggagccgggctggctaggagagggtgcaagtcctggtgccgggggtggggcccccctgcaggaggagctgaagtcagccaggctgcagatcagcgagctcagcggcaaggtgctcaaactgcagcacgagaaccacgcgctgctgtccaacatccagcgctgcgacctggcagcccacctggggctgcgtgcccccagtccccgggacagcgatgccgagagtgatgcgggcaagaaggagagtgatggggaggagagccgcctgccccagcccaagcgggaagggcctgttggcggggagagtgactcggaggaaatgtttgagaagacgtcgggcttcgggagcgggaagccatcggaggccagcgagccatgccccacggagctcctgaaggcccgggaggactctgagtacctagtgaccctaaaacacgaggcccagcggctagagcggacggtggagcgcctcatcacggacaccgacagcttcctccatgatgcggggctgcggggtggtgcgcccttaccggggcctggcctccagggcgaagaggagcagggtgagggggaccagcaggagccccagctgctggggaccatcaacgccaagatgaaggctttcaagaaagagctgcaggccttcctggagcaggtgaaccgcattggggatggcctatcccccttgccccacctcacagagtcctctagcttcctctccactgtgacttccgtgtcccgggactcccccatcgggaacctggggaaggagctgggcccagacttgcagtccagactgaaagagcagctggagtggcagctcgggccggcccgaggggacgagcgggagagcctgcgcctccgagccgcgcgggagctgcaccgccgcgcagacggggacaccgggagccacgggctgggaggccagacctgcttcagcctggagctcaggggcccccccgttttacctgagcagagtgtatccatagaggagctacagggtcagctcgtgcaggcggccagactgcatcaagaggagacagagacatttacaaacaagatccataagatggaggaggagcacctctatgccttgaggtggaaagaactggaaatgcacagcctggctttgcaaaacaccctccatgagcgaacctggagtgatgagaagaatctgatgcagcaggagctccggtccttgaagcagaacattttcctcttctacgtcaaactcaggtggctgctgaaacactggcggcaagggaagcagatggaggaggaaggagaggagttcactgagggtgaacatccagagaccctctccaggctcggggagcttggagtccaggggggtcaccaggcggatggcccagaccacgacagtgaccgaggctgtggctttccagtgggggagcactccccacactcccgggtgcagattggagatcacagcttgcggctgcagaccgcggacaggggacagccccacaaacaggtggtggaaaaccagcagctgttcagcgccttcaaggccttgctggaggacttccgtgcggagctgcgggaggatgagcgtgcccgactacggctgcagcagcaatatgccagcgacaaggcggcctgggacgtggagtgggccgtgctcaagtgccgtctggaacagctggaagagaagactgagaacaagttgggagaactaggctcctccgctgagagcaagggggccttgaagaaggagagagaggtgcaccagaagctcctggcagacagtcacagcctggtcatggacctgcgctggcagatccatcacagcgagaagaactggaaccgggagaaggtggaacttctcgaccgcctggacagagatcggcaggagtgggagcggcagaagaaggaattcttgtggaggatagagcagttgcagaaagagaacagtccccggagaggtggcagtttcctctgtgatcaaaaagacggcaacgttcgcccctttccccaccagggaagcctccgcatgccccgtccagtggccatgtggccttgtgcagatgctgactccatcccgtttgaagaccggccgctgtccaagctgaaggagtcggacaggtgctcggccagtgagaatctctacctggatgccttgtccctggatgacgagccagaagagccaccagcccacaggcccgagagggagttcaggaaccgcctccctgaggaagaagaaaatcacaaaggaaatcttcaaagggcggtgtccgtgtcctccatgtctgagttccagcgtctaatggacatctcccccttcctgcctgagaagggcctgccgtccaccagcagcaaggaggatgtcaccccacccctgtctccagacgacctcaagtacatcgaggagttcaacaagagctgggactacacacccaacaggggccacaatggtggggggccggacctttgggccgacaggaccgaggtggggcgggcagggcacgaggacagcacagagcctttccccgactcctcctggtacctaaccacaagtgtcaccatgaccacggacaccatgaccagcccagagcactgccagaagcagccactgcggagccacgtcctcaccgagcagtcggggttgcgcgtgttacacagcccgcctgccgtgcgcagggtcgacagcatcacggcggcaggtggtgagggtccctttcccacaagcagagccagagggagcccgggagacaccaagggaggccctccagaacccatgctcagcaggtggccttgcacctcccccaggcactcccgggactatgtggagggggcacggcgcccccttgatagtcccctctgtacctccctggggtttgcctccccactgcacagcctggagatgtccaagaacttgagtgatgacatgaaggaggtggccttctctgtcaggaatgccatctgctccggccctggcgagctgcaagtcaaggacatggcctgccagaccaatgggtcccggacgatggggacccagactgttcagaccatcagtgtgggcttgcagactgaagccctgcgtggcagcggtgtcaccagcagcccccacaagtgtctcactccaaaggctgggggcggtgctacacccgtgtcgtctccttcccggagccttaggagcagacaggtggcccctgccatcgagaaggtgcaggccaagtttgaacgcacatgctgctcccccaagtatggttctcccaagctgcagaggaagcccctccccaaagccgaccagccaaataacaggacgtcaccagggatggcccagaaagggtacagtgagtcagcctgggcccgctccaccaccacaagggagagccccgtgcacaccaccattaatgatggcctctccagcctcttcaacatcattgaccacagccccgtggtgcaggaccccttccagaaggggctgcgggccggcagtcggtctcgctcagcagagccccgaccagagctgggcccaggccaggaaacaggcaccaattcccgaggaaggtcgcctagccccattggggtggggtcagagatgtgcagggaggaagggggagagggcacgccagtgaagcaggacttatctgctccccctggctacacgctcactgagaacgtggcccggatcctcaacaagaagctgctggaacatgccttaaaggaggagaggaggcaggctgcccacgggcccccgggtctccacagtgacagccactcgctgggggacacagccgagccagggcccatggagaaccaaactgtcttgctaactgccccctggggactctagccctgcccgcctcacgctgaactaccttgttctgcactagctccatccctagagccctgcttctccaggcccgagagaccagcaaaccgtcgccctccgtcccgttgggccccacattcccccactgcctcacagcctcagtcacccggagacccgacgtccttggaggagcatggtggcgaggagccgcccgaggagcagccacaccgagatgcaagcttgcatggattatcacagtataattcactgtaatttgcataaccacaccatcaccatgaacaaaactctgcccaacaggagagatctagttttctcaaggtcaaagaatgttttttaaaaacacaaagctgctgaatgttcaacctgtgaaactgagatgtttctagaatgaaacagtaaatgtgcctgtaataacttaatttttttcatagctcagaaaactatttttgtctccatcttttttacacacagtatattaaacgaaaaggtaaataaggtataaatagatttaaaaaataaaagttttaaaaaatgtacattttaagagattctgaacaccctcgctgtcaatacctgactgcctctgttaaatttgcactgttacattttggttcagtttatttccatgttgaattagagtggattaagttaattttattttgtcagtgttactgttttttacgaattttttaatgcttcagactgtctgattcagtgaactttttgtagtgaaaaagccatgaagccagtagacaagacagatattctgtatgctggaggggatacaggatgattttgaaaaggtacaaagtcctcagtgggcttagaaaattcactgtatgatccttatattatcctacttggcttgcacgtcttcgggtgcatgtatataccgctactgtgtcctcgccatcacctaaatgtgactcagtctgttccactgtaatatgttgtgaatttccttgtactgtacttttattgttggtcttcttgcatcgatgatccaacagcaacaccatttttaaattattgtgaaaagattaactggcaatgtacagagtttactcaaagttttcttaagggaaaacactacaaaaagtcacaaggataccaaatggaaacacatgatgatgcctctgggtctgtatgagaccgtgatgaagtagaaataaagcccttctgagatggca

SEQ ID NO: 153890 - DNA, 6042 bp, Homo sapiens
  Payload ID: 10252
  Gene Symbol: MTCL1
  Gene Name: microtubule crosslinking factor 1
  Uniprot ID: Q9Y4B5
  ENST ID: ENST00000400050
  CDS Start-End: 93-4853
ggatagcgtcgcttagtcaatgctgagatgcgtcttgtggaacagaatttttgggacatttgcaggatgagttagatgaactccgtgctgagatggaagagatgagagacagttatttagaggaagatgtttaccagctgcaggaacttcggcgagaactggaccgcgctaataaaaactgccgaatcctgcagtaccgtcttcggaaagccgagcagaaaagcctgaaagtggctgagacgggtcaggtggatggtgagcttattcgaagcctggagcaggacttgaaggtagccaaagatgtatctgtcagattgcaccacgaacttaagacggtggaggaaaagcgcgctaaagctgaggatgaaaacgaaactctccgacagcagatgattgaagtggaaatatccaaacaggccctccagaatgagctggagagactgaaagagagttccctaaaaagaagaagcactcgggaaatgtacaaggagaagaaaacctttaaccaggatgacagtgccgatttgaggtgccagctccagtttgccaaagaggaagccttcctgatgcgcaaaaagatggccaagctaggaagggagaaggacgagctggagcaggagctccagaagtacaagtccctctatggggatgtggacagtcccctgcccacgggggaagcaggcgggccccccagcacccgggaggccgagctgaagctgcggctaaagctggtggaggaggaagccaacatcttgggccggaagatcgtggagctggaggtggagaaccgtggcctcaaggcagagatggaggacatgcggggccagcaggagcgggagggcccgggtcgggaccacgcacccagcattcctacctcacccttcggtgactccctggagtcctccactgagctccgccgccacctgcagtttgtagaagaggaagcggagttgctccggaggtccatctccgagatcgaagaccacaaccggcaactgacccacgagctcagcaagtttaagtttgagcctccccgggagccgggctggctaggagagggtgcaagtcctggtgccgggggtggggcccccctgcaggaggagctgaagtcagccaggctgcagatcagcgagctcagcggcaaggtgctcaaactgcagcacgagaaccacgcgctgctgtccaacatccagcgctgcgacctggcagcccacctggggctgcgtgcccccagtccccgggacagcgatgccgagagtgatgcgggcaagaaggagagtgatggggaggagagccgcctgccccagcccaagcgggaagggcctgttggcggggagagtgactcggaggaaatgtttgagaagacgtcgggcttcgggagcgggaagccatcggaggccagcgagccatgccccacggagctcctgaaggcccgggaggactctgagtacctagtgaccctaaaacacgaggcccagcggctagagcggacggtggagcgcctcatcacggacaccgacagcttcctccatgatgcggggctgcggggtggtgcgcccttaccggggcctggcctccagggcgaagaggagcagggtgagggggaccagcaggagccccagctgctggggaccatcaacgccaagatgaaggctttcaagaaagagctgcaggccttcctggagcaggtgaaccgcattggggatggcctatcccccttgccccacctcacagagtcctctagcttcctctccactgtgacttccgtgtcccgggactcccccatcgggaacctggggaaggagctgggcccagacttgcagtccagactgaaagagcagctggagtggcagctcgggccggcccgaggggacgagcgggagagcctgcgcctccgagccgcgcgggagctgcaccgccgcgcagacggggacaccgggagccacgggctgggaggccagacctgcttcagcctggagctcaggggcccccccgttttacctgagcagagtgtatccatagaggagctacagggtcagctcgtgcaggcggccagactgcatcaagaggagacagagacatttacaaacaagatccataagatggaggaggagcacctctatgccttgaggtggaaagaactggaaatgcacagcctggctttgcaaaacaccctccatgagcgaacctggagtgatgagaagaatctgatgcagcaggagctccggtccttgaagcagaacattttcctcttctacgtcaaactcaggtggctgctgaaacactggcggcaagggaagcagatggaggaggaaggagaggagttcactgagggtgaacatccagagaccctctccaggctcggggagcttggagtccaggggggtcaccaggcggatggcccagaccacgacagtgaccgaggctgtggctttccagtgggggagcactccccacactcccgggtgcagattggagatcacagcttgcggctgcagaccgcggacaggggacagccccacaaacaggtggtggaaaaccagcagctgttcagcgccttcaaggccttgctggaggacttccgtgcggagctgcgggaggatgagcgtgcccgactacggctgcagcagcaatatgccagcgacaaggcggcctgggacgtggagtgggccgtgctcaagtgccgtctggaacagctggaagagaagactgagaacaagttgggagaactaggctcctccgctgagagcaagggggccttgaagaaggagagagaggtgcaccagaagctcctggcagacagtcacagcctggtcatggacctgcgctggcagatccatcacagcgagaagaactggaaccgggagaaggtggaacttctcgaccgcctggacagagatcggcaggagtgggagcggcagaagaaggaattcttgtggaggatagagcagttgcagaaagagaacagtccccggagaggtggcagtttcctctgtgatcaaaaagacggcaacgttcgcccctttccccaccagggaagcctccgcatgccccgtccagtggccatgtggccttgtgcagatgctgactccatcccgtttgaagaccggccgctgtccaagctgaaggagtcggacaggtgctcggccagtgagaatctctacctggatgccttgtccctggatgacgagccagaagagccaccagcccacaggcccgagagggagttcaggaaccgcctccctgaggaagaagaaaatcacaaaggaaatcttcaaagggcggtgtccgtgtcctccatgtctgagttccagcgtctaatggacatctcccccttcctgcctgagaagggcctgccgtccaccagcagcaaggaggatgtcaccccacccctgtctccagacgacctcaagtacatcgaggagttcaacaagagctgggactacacacccaacaggggccacaatggtggggggccggacctttgggccgacaggaccgaggtggggcgggcagggcacgaggacagcacagagcctttccccgactcctcctggtacctaaccacaagtgtcaccatgaccacggacaccatgaccagcccagagcactgccagaagcagccactgcggagccacgtcctcaccgagcagtcggggttgcgcgtgttacacagcccgcctgccgtgcgcagggtcgacagcatcacggcggcaggtggtgagggtccctttcccacaagcagagccagagggagcccgggagacaccaagggaggccctccagaacccatgctcagcaggtggccttgcacctcccccaggcactcccgggactatgtggagggggcacggcgcccccttgatagtcccctctgtacctccctggggtttgcctccccactgcacagcctggagatgtccaagaacttgagtgatgacatgaaggaggtggccttctctgtcaggaatgccatctgctccggccctggcgagctgcaagtcaaggacatggcctgccagaccaatgggtcccggacgatggggacccagactgttcagaccatcagtgtgggcttgcagactgaagccctgcgtggcagcggtgtcaccagcagcccccacaagtgtctcactccaaaggctgggggcggtgctacacccgtgtcgtctccttcccggagccttaggagcagacaggtggcccctgccatcgagaaggtgcaggccaagtttgaacgcacatgctgctcccccaagtatggttctcccaagctgcagaggaagcccctccccaaagccgaccagccaaataacaggacgtcaccagggatggcccagaaagggtacagtgagtcagcctgggcccgctccaccaccacaagggagagccccgtgcacaccaccattaatgatggcctctccagcctcttcaacatcattgaccacagccccgtggtgcaggaccccttccagaaggggctgcgggccggcagtcggtctcgctcagcagagccccgaccagagctgggcccaggccaggaaacaggcaccaattcccgaggaaggtcgcctagccccattggggtggggtcagagatgtgcagggaggaagggggagagggcacgccagtgaagcaggacttatctgctccccctggctacacgctcactgagaacgtggcccggatcctcaacaagaagctgctggaacatgccttaaaggaggagaggaggcaggctgcccacgggcccccgggtctccacagtgacagccactcgctgggggacacagccgagccagggcccatggagaaccaaactgtcttgctaactgccccctggggactctagccctgcccgcctcacgctgaactaccttgttctgcactagctccatccctagagccctgcttctccaggcccgagagaccagcaaaccgtcgccctccgtcccgttgggccccacattcccccactgcctcacagcctcagtcacccggagacccgacgtccttggaggagcatggtggcgaggagccgcccgaggagcagccacaccgagatgcaagcttgcatggattatcacagtataattcactgtaatttgcataaccacaccatcaccatgaacaaaactctgcccaacaggagagatctagttttctcaaggtcaaagaatgttttttaaaaacacaaagctgctgaatgttcaacctgtgaaactgagatgtttctagaatgaaacagtaaatgtgcctgtaataacttaatttttttcatagctcagaaaactatttttgtctccatcttttttacacacagtatattaaacgaaaaggtaaataaggtataaatagatttaaaaaataaaagttttaaaaaatgtacattttaagagattctgaacaccctcgctgtcaatacctgactgcctctgttaaatttgcactgttacattttggttcagtttatttccatgttgaattagagtggattaagttaattttattttgtcagtgttactgttttttacgaattttttaatgcttcagactgtctgattcagtgaactttttgtagtgaaaaagccatgaagccagtagacaagacagatattctgtatgctggaggggatacaggatgattttgaaaaggtacaaagtcctcagtgggcttagaaaattcactgtatgatccttatattatcctacttggcttgcacgtcttcgggtgcatgtatataccgctactgtgtcctcgccatcacctaaatgtgactcagtctgttccactgtaatatgttgtgaatttccttgtactgtacttttattgttggtcttcttgcatcgatgatccaacagcaacaccatttttaaattattgtgaaaagattaactggcaatgtacagagtttactcaaagttttcttaagggaaaacactacaaaaagtcacaaggataccaaatggaaacacatgatgatgcctctgggtctgtatgagaccgtgatgaagtagaaataaagcccttctgagatggc

SEQ ID NO: 153891 - DNA, 6009 bp, Homo sapiens
  Payload ID: 10252
  Gene Symbol: MTCL1
  Gene Name: microtubule crosslinking factor 1
  Uniprot ID: Q9Y4B5
  ENST ID: ENST00000517570
  CDS Start-End: 183-4820
cggcgcctgctgcactctctgagtattttccggcagggcctgcgggcagtggcgtcttagtcgccttagcactgggtgcttaatccggctccatcttttctccacggagggggcctggtgctgcagacggggttcccggggtcaggacgatccaggatgagttagatgaactccgtgctgagatggaagagatgagagacagttatttagaggaagatgtttaccagctgcaggaacttcggcgagaactggaccgcgctaataaaaactgccgaatcctgcagtaccgtcttcggaaagccgagcagaaaagcctgaaagtggctgagacgggtcaggtggatggtgagcttattcgaagcctggagcaggacttgaaggtagccaaagatgtatctgtcagattgcaccacgaacttaagacggtggaggaaaagcgcgctaaagctgaggatgaaaacgaaactctccgacagcagatgattgaagtggaaatatccaaacaggccctccagaatgagctggagagactgaaagagagttccctaaaaagaagaagcactcgggaaatgtacaaggagaagaaaacctttaaccaggatgacagtgccgatttgaggtgccagctccagtttgccaaagaggaagccttcctgatgcgcaaaaagatggccaagctaggaagggagaaggacgagctggagcaggagctccagaagtacaagtccctctatggggatgtggacagtcccctgcccacgggggaagcaggcgggccccccagcacccgggaggccgagctgaagctgcggctaaagctggtggaggaggaagccaacatcttgggccggaagatcgtggagctggaggtggagaaccgtggcctcaaggcagagatggaggacatgcggggccagcaggagcgggagggcccgggtcgggaccacgcacccagcattcctacctcacccttcggtgactccctggagtcctccactgagctccgccgccacctgcagtttgtagaagaggaagcggagttgctccggaggtccatctccgagatcgaagaccacaaccggcaactgacccacgagctcagcaagtttaagtttgagcctccccgggagccgggctggctaggagagggtgcaagtcctggtgccgggggtggggcccccctgcaggaggagctgaagtcagccaggctgcagatcagcgagctcagcggcaaggtgctcaaactgcagcacgagaaccacgcgctgctgtccaacatccagcgctgcgacctggcagcccacctggggctgcgtgcccccagtccccgggacagcgatgccgagagtgatgcgggcaagaaggagagtgatggggaggagagccgcctgccccagcccaagcgggaagggcctgttggcggggagagtgactcggaggaaatgtttgagaagacgtcgggcttcgggagcgggaagccatcggaggccagcgagccatgccccacggagctcctgaaggcccgggaggactctgagtacctagtgaccctaaaacacgaggcccagcggctagagcggacggtggagcgcctcatcacggacaccgacagcttcctccatgatgcggggctgcggggtggtgcgcccttaccggggcctggcctccagggcgaagaggagcagggtgagggggaccagcaggagccccagctgctggggaccatcaacgccaagatgaaggctttcaagaaagagctgcaggccttcctggagcaggtgaaccgcattggggatggcctatcccccttgccccacctcacagagtcctctagcttcctctccactgtgacttccgtgtcccgggactcccccatcgggaacctggggaaggagctgggcccagacttgcagtccagactgaaagagcagctggagtggcagctcgggccggcccgaggggacgagcgggagagcctgcgcctccgagccgcgcgggagctgcaccgccgcgcagacggggacaccgggagccacgggctgggaggccagacctgcttcagcctggagatggaggaggagcacctctatgccttgaggtggaaagaactggaaatgcacagcctggctttgcaaaacaccctccatgagcgaacctggagtgatgagaagaatctgatgcagcaggagctccggtccttgaagcagaacattttcctcttctacgtcaaactcaggtggctgctgaaacactggcggcaagggaagcagatggaggaggaaggagaggagttcactgagggtgaacatccagagaccctctccaggctcggggagcttggagtccaggggggtcaccaggcggatggcccagaccacgacagtgaccgaggctgtggctttccagtgggggagcactccccacactcccgggtgcagattggagatcacagcttgcggctgcagaccgcggacaggggacagccccacaaacaggtggtggaaaaccagcagctgttcagcgccttcaaggccttgctggaggacttccgtgcggagctgcgggaggatgagcgtgcccgactacggctgcagcagcaatatgccagcgacaaggcggcctgggacgtggagtgggccgtgctcaagtgccgtctggaacagctggaagagaagactgagaacaagttgggagaactaggctcctccgctgagagcaagggggccttgaagaaggagagagaggtgcaccagaagctcctggcagacagtcacagcctggtcatggacctgcgctggcagatccatcacagcgagaagaactggaaccgggagaaggtggaacttctcgaccgcctggacagagatcggcaggagtgggagcggcagaagaaggaattcttgtggaggatagagcagttgcagaaagagaacagtccccggagaggtggcagtttcctctgtgatcaaaaagacggcaacgttcgcccctttccccaccagggaagcctccgcatgccccgtccagtggccatgtggccttgtgcagatgctgactccatcccgtttgaagaccggccgctgtccaagctgaaggagtcggacaggtgctcggccagtgagaatctctacctggatgccttgtccctggatgacgagccagaagagccaccagcccacaggcccgagagggagttcaggaaccgcctccctgaggaagaagaaaatcacaaaggaaatcttcaaagggcggtgtccgtgtcctccatgtctgagttccagcgtctaatggacatctcccccttcctgcctgagaagggcctgccgtccaccagcagcaaggaggatgtcaccccacccctgtctccagacgacctcaagtacatcgaggagttcaacaagagctgggactacacacccaacaggggccacaatggtggggggccggacctttgggccgacaggaccgaggtggggcgggcagggcacgaggacagcacagagcctttccccgactcctcctggtacctaaccacaagtgtcaccatgaccacggacaccatgaccagcccagagcactgccagaagcagccactgcggagccacgtcctcaccgagcagtcggggttgcgcgtgttacacagcccgcctgccgtgcgcagggtcgacagcatcacggcggcaggtggtgagggtccctttcccacaagcagagccagagggagcccgggagacaccaagggaggccctccagaacccatgctcagcaggtggccttgcacctcccccaggcactcccgggactatgtggagggggcacggcgcccccttgatagtcccctctgtacctccctggggtttgcctccccactgcacagcctggagatgtccaagaacttgagtgatgacatgaaggaggtggccttctctgtcaggaatgccatctgctccggccctggcgagctgcaagtcaaggacatggcctgccagaccaatgggtcccggacgatggggacccagactgttcagaccatcagtgtgggcttgcagactgaagccctgcgtggcagcggtgtcaccagcagcccccacaagtgtctcactccaaaggctgggggcggtgctacacccgtgtcgtctccttcccggagccttaggagcagacaggtggcccctgccatcgagaaggtgcaggccaagtttgaacgcacatgctgctcccccaagtatggttctcccaagctgcagaggaagcccctccccaaagccgaccagccaaataacaggacgtcaccagggatggcccagaaagggtacagtgagtcagcctgggcccgctccaccaccacaagggagagccccgtgcacaccaccattaatgatggcctctccagcctcttcaacatcattgaccacagccccgtggtgcaggaccccttccagaaggggctgcgggccggcagtcggtctcgctcagcagagccccgaccagagctgggcccaggccaggaaacaggcaccaattcccgaggaaggtcgcctagccccattggggtggggtcagagatgtgcagggaggaagggggagagggcacgccagtgaagcaggacttatctgctccccctggctacacgctcactgagaacgtggcccggatcctcaacaagaagctgctggaacatgccttaaaggaggagaggaggcaggctgcccacgggcccccgggtctccacagtgacagccactcgctgggggacacagccgagccagggcccatggagaaccaaactgtcttgctaactgccccctggggactctagccctgcccgcctcacgctgaactaccttgttctgcactagctccatccctagagccctgcttctccaggcccgagagaccagcaaaccgtcgccctccgtcccgttgggccccacattcccccactgcctcacagcctcagtcacccggagacccgacgtccttggaggagcatggtggcgaggagccgcccgaggagcagccacaccgagatgcaagcttgcatggattatcacagtataattcactgtaatttgcataaccacaccatcaccatgaacaaaactctgcccaacaggagagatctagttttctcaaggtcaaagaatgttttttaaaaacacaaagctgctgaatgttcaacctgtgaaactgagatgtttctagaatgaaacagtaaatgtgcctgtaataacttaatttttttcatagctcagaaaactatttttgtctccatcttttttacacacagtatattaaacgaaaaggtaaataaggtataaatagatttaaaaaataaaagttttaaaaaatgtacattttaagagattctgaacaccctcgctgtcaatacctgactgcctctgttaaatttgcactgttacattttggttcagtttatttccatgttgaattagagtggattaagttaattttattttgtcagtgttactgttttttacgaattttttaatgcttcagactgtctgattcagtgaactttttgtagtgaaaaagccatgaagccagtagacaagacagatattctgtatgctggaggggatacaggatgattttgaaaaggtacaaagtcctcagtgggcttagaaaattcactgtatgatccttatattatcctacttggcttgcacgtcttcgggtgcatgtatataccgctactgtgtcctcgccatcacctaaatgtgactcagtctgttccactgtaatatgttgtgaatttccttgtactgtacttttattgttggtcttcttgcatcgatgatccaacagcaacaccatttttaaattattgtgaaaagattaactggcaatgtacagagtttactcaaagttttcttaagggaaaacactacaaaaagtcacaaggataccaaatggaaacacatgatgatgcctctgggtctgtatgagaccgtgatgaagtagaaataaagcccttctgagatggc

SEQ ID NO: 153892 - DNA, 3286 bp, Homo sapiens
  Payload ID: 10252
  Gene Symbol: MTCL1
  Gene Name: microtubule crosslinking factor 1
  ENST ID: ENST00000520495
  CDS Start-End: 688-2217
aaatgatgagtgtgcgaccagactgcggcagagaacgagccatgctctctgagtgtaaaagctgcattgtgagcacacgtgacgatccgaaggagttaattctcccccgggggctgacttgttccacagaaggggcgacaggcctggagagcagtttgaagccttttcctccacgagggctgtgggatttgactcccgcagtgctgttgttgacagtttctctgtgtgatgggggaaacctttgctgaagccttttgaaacttttgatggccgatcaaagaggagtgattcgtgaaatcggttatttttcccatctgctgaatgtgaacagtaaaacgtttttgcaaaaccaaaacggggagttcatctggcttcaaaacaaggagaccagccctgcaaagcagcgttgactttccactggacccaaaaagtgccgttttgacctcagccaagcattgcaggctgtgaacagcagagtcagcttttgaggatcctccagaaccctctggaagccctatgaggacacttcttaggttttgatacacttgactctatccaacacttacctccttgccttgggtctctgggtttaatttcctgctgtgttatagcaactaaagggaaaggaacgatgacagtgccgatttgaggtgccagctccagtttgccaaagaggaagccttcctgatgcgcaaaaagatggccaagctaggaagggagaaggacgagctggagcaggagctccagaagtacaagtccctctatggggatgtggacagtcccctgcccacgggggaagcaggcgggccccccagcacccgggaggccgagctgaagctgcggctaaagctggtggaggaggaagccaacatcttgggccggaagatcgtggagctggaggtggagaaccgtggcctcaaggcagagatggaggacatgcggggccagcaggagcgggagggcccgggtcgggaccacgcacccagcattcctacctcacccttcggtgactccctggagtcctccactgagctccgccgccacctgcagtttgtagaagaggaagcggagttgctccggaggtccatctccgagatcgaagaccacaaccggcaactgacccacgagctcagcaagtttaagtttgagcctccccgggagccgggctggctaggagagggtgcaagtcctggtgccgggggtggggcccccctgcaggaggagctgaagtcagccaggctgcagatcagcgagctcagcggcaaggtgctcaaactgcagcacgagaaccacgcgctgctgtccaacatccagcgctgcgacctggcagcccacctggggctgcgtgcccccagtccccgggacagcgatgccgagagtgatgcgggcaagaaggagagtgatggggaggagagccgcctgccccagcccaagcgggaagggcctgttggcggggagagtgactcggaggaaatgtttgagaagacgtcgggcttcgggagcgggaagccatcggaggccagcgagccatgccccacggagctcctgaaggcccgggaggactctgagtacctagtgaccctaaaacacgaggcccagcggctagagcggacggtggagcgcctcatcacggacaccgacagcttcctccatgatgcggggctgcggggtggtgcgcccttaccggggcctggcctccagggcgaagaggagcagggtgagggggaccagcaggagccccagctgctggggaccatcaacgccaagatgaaggctttcaagaaagagctgcaggccttcctggagcaggtgaaccgcattggggatggcctatcccccttgccccacctcacagagtcctctagcttcctctccactgtgacttccgtgtcccgggactcccccatcgggaacctggggaaggagctgggcccagacttgcagatgtgtccacccgcccctttgctcatcctcatcttggtccagactgaaagagcagctggagtggcagctcgggccggcccgaggggacgagcgggagagcctgcgcctccgagccgcgcgggagctgcaccgccgcgcagacggggacaccgggagccacgggctgggaggccagacctgcttcagcctggagatggaggaggagcacctctatgccttgaggtggaaagaactggaaatgcacagcctggctttgcaaaacaccctccatgagcgaacctggagtgatgagaagaatctgatgcagcaggagctccggtccttgaagcagaacattttcctcttctacgtcaaactcaggtggctgctgaaacactggcggcaagggaagcagatggaggaggaaggagaggagttcactgagggtgaacatccagagaccctctccaggctcggggagcttggagtccaggggggtcaccaggcggatggcccagaccacgacagtgaccgaggctgtggctttccagtgggggagcactccccacactcccgggtgcagattggagatcacagcttgcggctgcagaccgcggacaggggacagccccacaaacaggtggtggaaaaccagcagctgttcagcgccttcaaggccttgctggaggacttccgtgcggagctgcgggaggatgagcgtgcccgactacggctgcagcagcaatatgccagcgacaaggcggcctgggacgtggagtgggccgtgctcaagtgccgtctggaacagaattgttgtggatatcccagaattaacattgaggaggagactttaggcttcaccaggctgccagctgggtccacggtaaaaacgttgaagagccttgggttgcagagattggaggtgagaggggtgactctgaagtaaagcagcagcagtggagaaggagtggagggcacacacctgaaaaaaacggagcaagtagagagtggccgggcctggtggccggttcatgagacgccgtggagcaacaggcacctcgcacggctgtcaggtttctagtacgggtgcctgggcgatgggccatcactgagacaggaacgcagagagacaaccagttgggatggaaaggggacaggttggatttgaggtgtgtgtcatcacaggcactgggacttgaaaagggctgggctgaagatgtatatacctgggtgtgaatgaggaggtgggaggcagggccatggaggacgctgcaggactgtgcacagaatgaaaggaactcatagaaggaaccaaaatattcattttgcagaaattagtggaaggagaagagattggaaagga

SEQ ID NO: 153893 - DNA, 3963 bp, Homo sapiens
  Payload ID: 10252
  Gene Symbol: MTCL1
  Gene Name: microtubule crosslinking factor 1
  Uniprot ID: Q9Y4B5
  ENST ID: ENST00000518815
  CDS Start-End: 95-3025
gctttaatagggagatcaagatgaatttgatgtataatcagaatcctagatggaggaggagcacctctatgccttgaggtggaaagaactggaaatgcacagcctggctttgcaaaacaccctccatgagcgaacctggagtgatgagaagaatctgatgcagcaggagctccggtccttgaagcagaacattttcctcttctacgtcaaactcaggtggctgctgaaacactggcggcaagggaagcagatggaggaggaaggagaggagttcactgagggtgaacatccagagaccctctccaggctcggggagcttggagtccaggggggtcaccaggcggatggcccagaccacgacagtgaccgaggctgtggctttccagtgggggagcactccccacactcccgggtgcagattggagatcacagcttgcggctgcagaccgcggacaggggacagccccacaaacaggtggtggaaaaccagcagctgttcagcgccttcaaggccttgctggaggacttccgtgcggagctgcgggaggatgagcgtgcccgactacggctgcagcagcaatatgccagcgacaaggcggcctgggacgtggagtgggccgtgctcaagtgccgtctggaacagaattgttgtggatatcccagaattaacattgaggaggagactttaggcttcaccaggctgccagctgggtccacggtaaaaacgttgaagagccttgggttgcagagattggagctggaagagaagactgagaacaagttgggagaactaggctcctccgctgagagcaagggggccttgaagaaggagagagaggtgcaccagaagctcctggcagacagtcacagcctggtcatggacctgcgctggcagatccatcacagcgagaagaactggaaccgggagaaggtggaacttctcgaccgcctggacagagatcggcaggagtgggagcggcagaagaaggaattcttgtggaggatagagcagggaagcctccgcatgccccgtccagtggccatgtggccttgtgcagatgctgactccatcccgtttgaagaccggccgctgtccaagctgaaggagtcggacaggtgctcggccagtgagaatctctacctggatgccttgtccctggatgacgagccagaagagccaccagcccacaggcccgagagggagttcaggaaccgcctccctgaggaagaagaaaatcacaaaggaaatcttcaaagggcggtgtccgtgtcctccatgtctgagttccagcgtctaatggacatctcccccttcctgcctgagaagggcctgccgtccaccagcagcaaggaggatgtcaccccacccctgtctccagacgacctcaagtacatcgaggagttcaacaagagctgggactacacacccaacaggggccacaatggtggggggccggacctttgggccgacaggaccgaggtggggcgggcagggcacgaggacagcacagagcctttccccgactcctcctggtacctaaccacaagtgtcaccatgaccacggacaccatgaccagcccagagcactgccagaagcagccactgcggagccacgtcctcaccgagcagtcggggttgcgcgtgttacacagcccgcctgccgtgcgcagggtcgacagcatcacggcggcaggtggtgagggtccctttcccacaagcagagccagagggagcccgggagacaccaagggaggccctccagaacccatgctcagcaggtggccttgcacctcccccaggcactcccgggactatgtggagggggcacggcgcccccttgatagtcccctctgtacctccctggggtttgcctccccactgcacagcctggagatgtccaagaacttgagtgatgacatgaaggaggtggccttctctgtcaggaatgccatctgctccggccctggcgagctgcaagtcaaggacatggcctgccagaccaatgggtcccggacgatggggacccagactgttcagaccatcagtgtgggcttgcagactgaagccctgcgtggcagcggtgtcaccagcagcccccacaagtgtctcactccaaaggctgggggcggtgctacacccgtgtcgtctccttcccggagccttaggagcagacaggtggcccctgccatcgagaaggtgcaggccaagtttgaacgcacatgctgctcccccaagtatggttctcccaagctgcagaggaagcccctccccaaagccgaccagccaaataacaggacgtcaccagggatggcccagaaagggtacagtgagtcagcctgggcccgctccaccaccacaagggagagccccgtgcacaccaccattaatgatggcctctccagcctcttcaacatcattgaccacagccccgtggtgcaggaccccttccagaaggggctgcgggccggcagtcggtctcgctcagcagagccccgaccagagctgggcccaggccaggaaacaggcaccaattcccgaggaaggtcgcctagccccattggggtggggtcagagatgtgcagggaggaagggggagagggcacgccagtgaagcaggacttatctgctccccctggctacacgctcactgagaacgtggcccggatcctcaacaagaagctgctggaacatgccttaaaggaggagaggaggcaggctgcccacgggcccccgggtctccacagtgacagccactcgctgggggacacagccgagccagggcccatggaggaactaccttgttctgcactagctccatccctagagccctgcttctccaggcccgagagaccagcaaaccgtcgccctccgtcccgttgggccccacattcccccactgcctcacagcctcagtcacccggagacccgacgtccttggaggagcatggtggcgaggagccgcccgaggagcagccacaccgagatgcaagcttgcatggattatcacagtataattcactgtaatttgcataaccacaccatcaccatgaacaaaactctgcccaacaggagagatctagttttctcaaggtcaaagaatgttttttaaaaacacaaagctgctgaatgttcaacctgtgaaactgagatgtttctagaatgaaacagtaaatgtgcctgtaataacttaatttttttcatagctcagaaaactatttttgtctccatcttttttacacacagtatattaaacgaaaaggtaaataaggtataaatagatttaaaaaataaaagttttaaaaaatgtacattttaagagattctgaacaccctcgctgtcaatacctgactgcctctgttaaatttgcactgttacattttggttcagtttatttccatgttgaattagagtggattaagttaattttattttgtcagtgttactgttttttacgaattttttaatgcttcagactgtctgattcagtgaactttttgtagtgaaaaagccatgaagccagtagacaagacagatattctgtatgctggaggggatacaggatgattttgaaaaggtacaaagtcctcagtgggcttagaaaattcactgtatgatccttatattatcctacttggcttgcacgtcttcgggtgcatgtatataccgctactgtgtcctcgccatcacctaaatgtgactcagtctgttccactgtaatatgttgtgaatttccttgtactgtacttttattgttggtcttcttgcatcgatgatccaacagcaacaccatttttaaattattgtgaaaagattaactggcaatgtacagagtttactcaaagttttcttaagggaaaacactacaaaaagtcacaaggataccaaatggaaacacatgatgatgcctctgggtctgtatgagaccgtgatgaagtagaaataaagcccttctgagatggca

SEQ ID NO: 153894 - DNA, 373 bp, Homo sapiens
  Payload ID: 10252
  Gene Symbol: MTCL1
  Gene Name: microtubule crosslinking factor 1
  ENST ID: ENST00000523122
  CDS Start-End: 232-373
aatgactccttgggttcccctgtattcagggtgcattcctgtggacagcaaagagtggaggtgtgggaaagtcagaataggtgaatgggaaaaaacagacccaatgtgtatttaaaataatggaaaatgtctcatttgtggatagcgtcgcttagtcaatgctgagatgcgtcttgtggaacagaatttttgggacatttgcaggatgagttagatgaactccgtgctgagatggaagagatgagagacagttatttagaggaagatgtttaccagctgcaggaacttcggcgagaactggaccgcgctaataaaaactgccgaatcctgcagtaccgtcttcggaaagccgagcagaaaagcctgaaagtgg

SEQ ID NO: 153895 - DNA, 19141 bp, Homo sapiens
  Payload ID: 10253
  Gene Symbol: MACF1
  Gene Name: microtubule-actin crosslinking factor 1
  Uniprot ID: Q9UPN3
  ENST ID: ENST00000289893
  CDS Start-End: 132-17948
ggctctgattcagttttctttttcttctcttttccttttttttttttttttttttttttttttaggaatgcagagcagttgctggggtgattgacctaggcacagtggagatatttcccatcttcaaagccatgcaaaagggcctccttgaccaagacacaggcctagtgcttctggaatctcaggttatcatgtctggcctcattgcccctgagacgggtgaaaacctctctttggaggagggcatagccagaaacctcattaatccccagatgtaccagcagctccgggagctacaggatgccctggccttaataagcaggcttactgagagcagaggccctctttctgtggtggaagcaattgaaaagagaataatcagtgagacagttggactgaaaatcttagaagctcacctggcaactggaggtttcagtctttcccctagtgagaactgtattaacctggaagaggcttttcatcaaggcctcatttctgcatggcttcattcagtattagagtcttatcttagaacatccaagaatttgatagaccctaacacagctgagaaaattggtttgctggatctgatgcagcgatgtattgtccaccaggaatcaggattcaaattactgcctgtcaaacaattggcaggggggatggtgagcttgaaatcaggccggaaggttagcattttccgtgcagttcaggaagggctaatagataggcaggtcactgtccggttgctggaagctcagctttttgctggtggcatagtagatccaagaacaggacacagacttacagtggaagaggctgtaagacataatctgattgaccaagatatggcctgtgctatcctcataaggcagcttcagacaggaggcatcatagacactgtcacggggcaaaggctaacaatagatgaagcagtgagcaatgatctagtagctgctaagatcgcccttgtgattctggagtccctctggtcattcatggggttgctgtggcctgaatctggagagatcctcccaattacagatgccctagaacaaggtattgtgtctactgaactagcacataaaatccttagtaaccgacagcatattaaggctctgtttctaccagcaaccacagagattttgtcctggaagaaagcaatagaaagtggtatcctggatagagatcttgccaataacttaaaatcgatttgtatacctgatgtgatgccccacatgcaactagcagactctgcagaacaaaatattaatcctggagcagcagttctaccgtgcagcaagagccaccctaaggccacagcaagccagagtgagaatctgttgttccagctgatgactcacagctatattaatgtgcaaaatggacagaggctgcttctgttagataaagagctgatggagacactaacatccagagatgagtatcaaacaagtcctccaaaagtggttgaaattgggcatcaaaggcaaaaaactcctgagggattgcaagaatcagctaatgtgaaaatctcaggaactttcagcagtgggtggactgtgaggctgcctgagttccagttttcttctcagaacaaagaatatcccgatcgggaagattgcactacagaaaaaggcaaaaagaccactgtagaaacagaagattcttctgtagagaaccctgaacaggatctgtttgtagaacaaaaagagagaaatccaaacattgatgctttgaaggtaataaataaagtcaaattagaggtacaaaggcagttgataggtacccaaagggaagaccaaacagcagtgtctgtcagagaaaatgccagcaggggacacctcctgaccatacctcctgctgaggcggaaggtgtgccgttggtggttgacaaagatgttttttctgttgaaacaccaaagaaagaacatcaacctctaagaaacacttcctttacatgtcagaatgaacaagcacacactcttgagactgaatatattcatgatgaaactggaggatctcacataaaaccccaaagcaaaaagttacaagttcaggtaaagaaaactctaggtataaagttagaactaaagtctgaaactgatgggaatgttcatcctctggacaaaaaggaaatgttaaagaaaacatttctggctaaggatgaccataaagaaagtcaagaagcacagaacatcgcaggtggtagtatgatgatgtcagaaaagaccgatgaggaagatagtggcagggaaatttttctgtcatgcagtcatccattagaattgcttgaagaagctaccttaaatgtattatctgcacagttactagatggtggtatctttcatgaacaaacaggtcaaaagctcttactaaatgaagcaatatcccgaggcattgtgccaagtcacactgccgtgaagcttatggagaagctgaacatgtttcaggggttctttgactctcagacttgtgagtctttgacaactgaagaagtcattaatgaaggtctgatggatgagaaattattacataatgtcctcatggcagacaaagctataagtggtgtcttagacccccgtacccagacactgtgctctgtaaaggatgcagttacagttggacttcttgacaaggaaacagccaccagaattttagagaggcaggtggtgactggtggaattattgatctgaaacgaggcaaaaaagtttcagtaactttggcctcaactcttggcttggtggacgttgctgaccagccagaacttataaatctggagaaagcttccaaaggtagagatgctgaaaaaacagttagggagagattaattagtttacaaatggaaacaacaggacttatagaccctgatagtaaagcacctttaacagttgtgcagtccattgacagaggtcttttggagagagaggaggccgttcgtttgttgactaagcaagtggtagatggaggtatcattcaccatatatctgggatgagactttctgttgataatgccttcagacatggcttaattggtgaagatttagccgagaaactcaaaagagttgagaacttaaacatccatcagatttttaatcctgaaacgaaggaaaatatttccctccctaaagccataaaattagatcttattacctcagacctgaaaagagaaatccaggaggttcaggcctttactggaaactttgtggatctcatttctggtcagagattgaccttggcagaagctaaaaaagaaggactgttaactaatgaagcagtattgtctccaggaatgatgcatggcattgtagatcccgagaactgcagaattgtcccctactcagaattagtcaagaaatgtaagattgatattgaatctggacagagatatctagaagtaattcccttctcagacattaaagatggggtgagcgacaaagtgcttacattgtctcaagcaattcagcttggaaaagtagactttgcatctacgctgaaggttctagaagcccaggcaaatactggtggaatcatagatactgctactggaaaaagactgacattggcatcagctttggaagagaaactggtggatgaaaacatggtcagaattattgcatctcatcaggtgttaaatggaggaattgttgacatatttagtgatcagagagtgactttagtagaagctattgagaaaagactgatcagccctgaactggcaaatatgatccaaatagatagttcagagttcagcgatcacagggctcagattgaaaagcaagaagggattgaagtgtgtgcattacaaaatgaatttctaggaaaggatatgttaattgcttgtaatcagactgctgaaatgagttgtaataaagtagaagagagtgagagattatttcaagttgaaaatcagtctgcacaagaaaaggttaaagtgagagtttctgatggggagcaggcaaaaaagagcagggaaatttccttaaaggaatttgggtgcaaggatcaacgtaagccaagaatgtcttcagatgctaaagaatttatcagtatcataaatcctcataatcttaaaggtaaatccttgggccaagtgtcattgacacacccttactctgaatgtgattttaaacttaaagaagtggctagaaataacatgggaaatgatacaaatgaagagcaggaaaaagcagtgacaaaaatagaaattatttctcatatgaagcagtctacctcatgtctagattctgaagaaataagagaaaatcaaggggaagtgattttggaagtacaagaaacatattgtgaaacgtcaggcaaattgccgagtgagcaggttttgcagcaaccaatgaatgctcgggtgaaaagtaagagagagaagagggaggtgattgtagaagaaagtatcagaacatgcaaaccagcatttctttctgaagaaaagttgtatcaggaaactgccattagagatgagcatgactcccatataaagagccaacctagggaaatgacctcaagtgaaaaagggaaagaagctgatacagaaatgggattttctattacttttaaaattgaagagtcctcttcccaagtggtacctcaaggaatttctgtaaaacatttagatgctttaacactcttcagctctaaacaggccaatgaaggaaaagtaaacaatttaagtctctgcttgactttaaaaccagaagaaaacttatctcgagaaattgcctgtggggcccagagtgaaccattcccttgtatgaccccaagacctgaaggattgcactaccaggaatcagatggaaaagcccaagtgacaggcccatcccaaatttccaaaacagacaagtctttccaaggaaccaccagacaggagaccaactatcaagattcctgggttacttcgaaaactaaggaaaccaaacatcaaatttcctcatctaatgaatgtaaagaaaagtcataccaagaagtatcttttgacccagcaagaggtcttaaattggaagaaatcacagtttctagaccagattcaaaagaagtcaggtatctagaattctcagacagaaaagaccttcatcatcagggcagcaaaagtgatgataaactttgtggaactctcaaatctgaaatagcaacacaggaactaactggagagaaatttctagaaatggcaaaccctaatgttgcaggtctagaagcaggatccattgaggacatagtgactcagagaggttccagagtcttgggatcctttcttccagagaaactgttcaaaggagtgtctcaaaaagagaatacagggcaacagaatgccatcattagtcctactgttctagagaccagtgaagaaaagacagtgtccctaacagtatgctctgcagtgaagacagagaagacaccacaggaaaagctcagagaaagccctggcagtgaacaaactcccttcatgactgcacctgaaggaaagggaaatggaggtgtaaacccagagcccttcagagcaactcagaatgtatttacccggcaactctgtttagaacatgatgaaaagctagtatcctatctgtctctgttacggaacattgaaatgaggaccaaacagattcaacctttggagctaaacctggcagaactacaggatctgctgtgtcaggccaaggtattagaaagggagttaaaggatctgaccaccttggtcagtcaggagctggagtgtgtgaatcagattatcatcagccagcctcaagaagttcctgctcaactgttgaaggctctagagaaagatgccaagaatcttcagaagtctctcagctctgtgagtgacacttggaattccaggctactccacttccagaatgctgtggaaatagaaaagactaaagtgttaaatcagcacacacagctagaaggccgacttcaagatctgagagcctgggttggcaataaaaatcttattctgaacagcaagggatctaacagtgaaatagatgttgacagcctgaacctctgcctccaacagtatgaggatttgaaacagcccatggctgaaaggaaagctcagctggatgctcttgcttttgatattcagttctttatctcagaacatgcccaggacttgtcccctcagcagaatcgacagatgctgaggcttctgaatgaactgcagaggtccttccaggacattttggaacagactgccgctcaggtggatgccttgcagggccatcttcaacaaatggagcaggaagccctggtgaagaccctgcagaaacaacaaaatacctgtcaccagcaactggaggatctttgcagttgggtaggacaggcagaaagagcactggcaggccaccaaggcagaaccacccagcaggatctctctgctttgcagaagaaccaaagtgacttgaaggatttacaggatgacattcagaatcgtgccacctcatttgccactgttgtcaaggacattgaggggttcatggaagagaatcagaccaagctgagcccacgtgagttgacagctcttcgggaaaagcttcatcaggctaaggagcaatatgaggcgctccaggaagagacacgtgtggcccagaaggaactggaggaagcagtgacctccgccttacagcaggagactgaaaagagtaaagcagcaaaggaactggcagagaacaagaagaagatcgatgctctcctggattgggtaacttcagtaggatcatctggtggacagctgctgaccaaccttccaggaatggagcagctctcgggagctagcttggagaaaggagccttggacaccactgatggttacatgggggtgaatcaagccccagagaaactggacaagcaatgtgagatgatgaaggcccgtcaccaagaattgctgtcccagcagcaaaatttcattctggccacccagtcagctcaggccttcttggatcagcatggccacaatctcacacctgaggagcaacagatgctgcaacagaagctgggagagctaaaggaacaatactctacttccctggcccaatcagaggcagaactgaagcaggtgcagacacttcaggatgagttgcagaaatttctgcaggatcataaagagtttgaaagctggttggaacgatccgagaaagagctggagaacatgcataagggaggcagcagccccgagacccttccctccctgctaaagcggcaaggaagcttctcagaggatgtcatttcccacaaaggagacttgagatttgtgactatctcaggacagaaagtcttggacatggaaaacagttttaaggaaggcaaagaaccatcagaaattggaaacttagtaaaggacaagttgaaggatgcaacagaaagatacactgctctccactcaaagtgtacacgattaggatctcacctgaatatgctgttaggccagtatcatcaattccaaaacagtgctgacagcctgcaggcctggatgcaggcttgtgaggccaacgtggagaagctcctctcagatactgttgcctctgaccctggagttctccaggagcagcttgcaacaacaaagcagttgcaggaggaattggctgagcaccaagtacctgtggaaaaactccaaaaagtagctcgtgacataatggaaattgaaggggagccagccccagaccacaggcatgttcaagaaactacagattccatactcagccacttccaaagcctctcctatagcctggctgagcgatcttctctgctgcagaaagcaattgcccaatctcagagtgtccaggaaagcctggagagcctgttgcagtctattggggaagttgaacaaaacctggaagggaagcaggtgtcatcactctcatcaggagtcatccaggaagccttagccacaaatatgaaattgaagcaggacattgctcggcaaaagagcagcttggaggccacccgtgagatggtgacccgattcatggagacagcagacagtactacagcagcagtgctgcagggcaaactggcagaggtgagccagcggttcgaacagctctgtctacagcagcaagaaaaggagagctccctaaagaagcttctaccccaggcagagatgtttgaacacctctctggtaagctgcagcagttcatggaaaacaaaagtcggatgctggcctctggaaatcagccagatcaagatattacacatttcttccaacagatccaggagctcaatttggaaatggaagaccaacaggagaacctagatactcttgagcacctggtcactgaactgagctcttgtggctttgcgctggacttgtgccagcatcaggacagggtacagaatctaagaaaagacttcacagagctacagaagacagttaaagagagagagaaagatgcatcatcttgccaggaacagttggatgaattccggaagctggtcaggaccttccagaaatggttgaaagaaactgaagggagtattccacctacggaaacttctatgagtgctaaagagttagaaaagcagattgaacacctgaagagtctactagatgactgggcaagtaagggaactctggtggaagaaatcaattgcaaaggtacttctttagaaaatctcatcatggaaatcacagcacctgattcccaaggcaagacaggttccatactgccctctgtaggaagctctgtaggcagtgtaaacggataccacacctgcaaagatctgacggagatccagtgtgacatgtcagatgtaaacttgaagtatgagaaactagggggagtacttcatgaacgccaggaaagccttcaggctatcctcaacagaatggaggaggttcacaaggaggcaaactctgtgctgcagtggctggaatcaaaagaggaagtcctgaaatccatggatgccatgtcatctccaaccaagacagaaacagtgaaagcccaagctgaatctaacaaggccttcctggctgagttggaacagaattctccaaaaattcaaaaagtaaaggaagccctggctggattactggtgacatatcccaactcacaggaagcagaaaattggaagaaaattcaggaagaactcaattcccgatgggaaagggccactgaggttactgtggctcggcaaaggcagctagaggaatctgcaagtcatctggcctgcttccaggctgcagaatcccagctccggccgtggctgatggagaaagaactgatgatgggagtgctggggcccctgtctattgaccccaacatgttgaatgcacaaaagcaacaggtccagtttatgctaaaggaatttgaagcacgcaggcaacagcatgagcaactgaatgaggcagctcagggcatcctaacaggccctggagatgtctctctgtccaccagccaagtacagaaagaactccagagcatcaatcagaaatgggttgagctgactgacaaactcaactcccgttccagccaaattgaccaagctattgttaagagcacccagtaccaggaactgctccaggacttatcagagaaggtgagggcagttggacaacggctgagtgtccagtcagctatcagcacccaaccagaggctgtaaagcagcaattggaagagaccagtgaaattcgatctgacttggagcagttagaccacgaggttaaggaggctcagacactgtgcgatgaactctcagtgctcattggtgagcagtacctcaaggatgaactgaagaagcgtttggagacagttgccctgcctctccaaggtttagaagaccttgcagccgatcgcattaacagactccaggcagctcttgccagcacccagcagttccagcaaatgtttgatgagttgaggacctggttggatgataaacaaagccagcaagcaaaaaactgcccaatttctgcaaaattggagcggctacagtctcagctacaggagaatgaagagtttcagaaaagtcttaatcaacacagtggctcctatgaggtgattgtggctgaaggggaatctctacttctttctgtacctcctggagaagagaaaaggactctacaaaaccagttggttgagctcaaaaaccattgggaagagcttagtaaaaaaactgcagacagacaatccaggctcaaggattgtatgcagaaagctcagaaatatcagtggcatgtggaagaccttgtgccatggatagaagattgtaaagctaagatgtctgagttgcgagtcactctggatccagtgcagctagagtccagtctcctaagatcaaaggctatgctgaatgaggtggagaagcgccgctccctgctggaaatattgaatagtgctgctgacattctgatcaattcttcagaagcagatgaggatggaatccgggatgagaaggctgggatcaaccagaacatggatgctgttacagaagagctgcaggccaaaacagggtcactcgaagaaatgactcagaggctcagggagttccaggaaagctttaagaatattgaaaagaaggttgaaggagccaaacaccaacttgagatctttgatgctctgggttctcaagcctgtagcaacaagaacctggagaagctaagagctcaacaggaagtgctgcaggccctagagcctcaggtagactatctgaggaactttactcagggtctggtagaagatgccccagatggatctgatgcttctcaacttctccaccaagctgaggtcgcccagcaagagttcctcgaagttaagcaaagagtgaacagtggttgtgtgatgatggaaaacaagctggaggggattggccagtttcactgccgggtccgagagatgttctctcaattggcagacctggatgatgagctagatggcatgggtgctattggcagagacactgatagcctccagtcccaaatcgaggatgtccggctattccttaacaaaattcacgtcctcaaattagacatagaggcctctgaagcagagtgtcgacatatgctagaagaagaggggactctggatttgttaggtctcaaaagggagctagaagccctgaacaaacagtgtggcaaactgacagagagggggaaagctcgtcaggaacagctggaactgacactaggccgtgtagaggacttctacaggaaattgaaaggactcaatgacgcgaccacagcagcagaggaggcagaggccctccagtgggtagtggggaccgaagtggaaatcatcaaccaacaattagcagattttaaaatgtttcagaaagaacaagtggatcctcttcagatgaaattgcagcaggtgaatggacttggccagggattaattcagagtgcaggaaaagactgtgatgtacagggtttagaacatgacatggaagagatcaatgctcgatggaatacattgaataaaaaggtcgcacaaagaattgcacagctacaggaagctttgttgcattgtgggaagtttcaagatgccttggagccattgctcagctggttggcagataccgaggagctcatagccaatcagaaacctccatctgctgagtataaagtggtgaaagcacagatccaagaacagaagttgctccagcggctcctagatgatcgaaaggccacagtagacatgcttcaagcagaaggaggcagaatagcccagtcagcagagctggctgatagagagaaaatcactggacagctggagagtcttgaaagtagatggactgaactactcagtaaggcagcagccaggcaaaaacagctggaagacatcctggttctggccaaacagttccatgagacagctgagcctatttctgacttcttatctgtcacagagaaaaagcttgctaactcagaacctgttggcactcagactgccaaaatacagcagcagatcattcggcacaaggctctggaagaagacatagaaaaccatgcaacagatgtgcaccaggcagtcaaaattgggcagtccctctcctccctgacatctcctgcagaacagggtgtgctgtcagaaaagatagactcattgcaggcccgatacagtgaaattcaagaccgctgttgtcggaaggcagccctacttgaccaagctctgtctaatgctaggctgtttggggaggatgaggtggaggtgctcaactggctggctgaggttgaggacaagctcagttcagtgttcgtaaaggatttcaaacaggatgtcctgcacaggcagcatgctgaccacctggctttaaatgaagaaattgttaatagaaagaagaatgtagatcaagctattaaaaatggtcaggctcttctaaaacaaaccacaggtgaggaggtgttacttatccaggaaaaactagatggtataaagactcgttacgcagacatcacagttactagctccaaggccctcagaactttagagcaagcccggcagctggccaccaagttccagtctacttatgaggaactgaccgggtggctgagggaggtggaggaggagctggcaaccagtggaggacagtctcccacaggggaacagataccccagtttcagcagagacagaaggaattaaagaaggaggtcatggagcacaggctggtgttggacacagtgaatgaggtgagccgtgctctcttagagctggtgccctggagagccagagaagggctggataaacttgtgtccgatgctaacgagcagtacaaactagtcagtgacactattggacaaagggtggatgaaattgatgctgctattcagagatcacaacagtatgagcaagctgccgatgcagaactagcttgggttgctgaaacaaaacggaaactgatggctctgggtccaattcgcctggaacaggaccagaccacagctcagcttcaggtacagaaggctttctccattgacattattcgacacaaagattcaatggatgaactcttcagtcaccgtagtgaaatctttggcacatgtggggaggagcaaaaaactgtattacaggaaaagacagagtctctaatacagcaatatgaagccattagcctactcaattcagagcgttatgcccgcctagagcgggcccaggtcttagtaaaccagttttgggaaacttatgaagagctcagcccctggattgaggaaactcgggcactaatagcacagttaccctctccagccattgatcatgagcagctcaggcagcaacaagaggaaatgaggcaattaagggaatctattgctgaacacaaacctcatattgacaaactactaaagataggcccacaactaaaggaattaaaccctgaggaaggggaaatggtggaagaaaaataccagaaagcagaaaacatgtatgcccaaataaaggaggaggtgcgccagcgagccctggctctggatgaagccgtgtcccagtccacacagattacagagtttcatgataaaattgagcctatgttggagacactggagaatctttcctctcgcctgcgtatgccaccactgatccctgctgaagtagacaagatcagagagtgcatcagtgacaataagagtgccaccgtggagctagaaaaactgcagccatcctttgaggccttgaagcgccgtggagaggagcttattggacgatctcagggagcagacaaggatctggctgcaaaagaaatccaggataaattggatcaaatggtattcttctgggaggacatcaaagctcgggctgaagaacgagaaatcaaatttcttgatgtccttgaattagcagagaagttctggtatgacatggcagctctcctgaccaccatcaaagacacccaggatattgtccatgacttggaaagcccaggcattgatccttccatcatcaaacaacaggttgaagctgctgagactattaaggaagagacagatggtctgcatgaagagctggagtttattcggatccttggagcagatttgatttttgcctgtggagaaactgagaagcctgaagtgaggaagagcattgatgagatgaataatgcttgggagaacttaaacaaaacatggaaagagaggctagaaaaacttgaggatgctatgcaagctgctgtgcagtatcaggacactcttcaggctatgtttgactggctagataacactgtgattaaactctgcaccatgccccctgttggcactgacctcaatactgttaaagatcagttaaatgaaatgaaggagttcaaagtagaagtttaccaacagcaaattgagatggagaagcttaatcaccagggtgaactgatgttaaagaaagctactgatgagacggacagagacattatacgagaaccactgacagaactcaaacacctctgggagaacctgggtgagaaaattgcccaccgacagcacaaactagaaggggctctgttggcccttggtcagttccagcatgccttagaggaactaatgagttggctgactcataccgaagagttgttagatgctcagagaccaataagtggagacccaaaagtcattgaagttgagctcgcaaagcaccatgtcctaaaaaatgatgttttggctcatcaagccacagtggaaacagtcaacaaagctggcaatgagcttcttgaatccagtgctggagatgatgccagcagcttaaggagccgtttggaagccatgaaccaatgctgggagtcagtgttacagaaaacagaggagagggagcagcagcttcagtcaactctgcagcaggcccagggcttccacagtgaaattgaagatttcctcttggaacttactagaatggagagccagctttctgcatctaagcccacaggaggacttcctgaaactgctagggaacagcttgatacacatatggaactctattcccagctgaaagccaaggaagagacttataatcaactacttgacaagggcagactcatgcttctaagccgtgacgactctgggtctggctccaagacagaacagagtgtagcacttttggagcagaagtggcatgtggtcagcagtaagatggaagaaagaaagtcaaagctggaagaggccctcaacttggcaacagaattccagaattccctacaagaatttatcaactggctcactctagcagagcagagtttaaacatcgcttctccaccaagcctgattctaaatactgtcctttcccagatagaagagcacaaggtttttgctaatgaagtaaatgctcatcgagaccagatcattgagctggatcaaactgggaatcaattaaagttccttagccaaaagcaggatgttgttctgatcaagaatttgttggtgagcgtgcagtctcgatgggagaaggttgtccagcgatctattgaaagagggcgatcactagatgatgccaggaagcgggcaaaacaattccatgaagcttggaaaaaactgattgactggctagaagatgcagagagtcacctggactcagaactagagatatccaatgacccagacaaaattaaacttcagctttctaagcataaggagtttcagaagactcttggtggcaagcagcctgtgtatgataccacaattagaactggcagagcactgaaagaaaagactttgcttcccgaagatagtcagaaacttgacaatttcctaggagaagtcagagacaaatgggatactgtttgtggcaagtctgtggagcggcagcacaagttggaggaagccctgctcttttcgggtcagttcatggatgctttgcaggcattggttgactggttatacaaggtggagccacagctggctgaggaccagcccgtgcacggggaccttgacctcgtcatgaacctcatggatgcacacaaggttttccagaaggaactgggaaagcgaacaggaaccgttcaggtcctgaagcggtcaggccgagagctgattgagaatagtcgagatgacaccacttgggtaaaaggacagctccaggaactgagcactcgctgggacactgtctgtaaactctctgtttccaaacaaagccggcttgagcaggccttaaaacaagcggaagtgtttcgagacacagtccacatgctgttggagtggctttctgaagcagagcaaacgcttcgctttcggggagcacttcctgatgacacagaggccctgcagtctctcattgacacccataaggaattcatgaagaaagtagaagaaaagcgagtggacgttaactcagcagtagccatgggagaagtcatcctggctgtctgccaccccgattgcatcacaaccatcaaacactggatcaccatcatccgagctcgcttcgaggaggtcctgacatgggctaagcagcaccagcagcgtcttgaaacggccttgtcagaactggtggctaatgctgagctcctggaagaacttctggcatggatccagtgggctgagaccaccctcattcagcgggatcaggagccaatcccgcagaacattgaccgagttaaagcccttatcgctgagcatcagacatttatggaggagatgactcgcaaacagcctgacgtggaccgggtcaccaagacatacaaaaggaaaaacatagagcctactcacgcgcctttcatagagaaatcccgcagcggaggcaggaaatccctaagtcagccaacccctcctcccatgccaatcctttcacagtctgaagcaaaaaacccacggatcaaccagctttctgcccgctggcagcaggtgtggctgttagcactggagcggcaaaggaaactgaatgatgccttggatcggctggaggagttgaaagaatttgccaactttgactttgatgtctggaggaaaaagtatatgcgttggatgaatcacaaaaagtctcgagtgatggatttcttccggcgcattgataaggaccaggatgggaagataacacgtcaggagtttatcgatggcattttagcatccaagttccccaccaccaagttagagatgactgctgtggctgacattttcgaccgagatggggatggttacattgattattatgaatttgtggctgctcttcatcccaacaaggatgcgtatcgaccaacaaccgatgcagataaaatcgaagatgaggttacaagacaagtggctcagtgcaaatgtgcaaaaaggtttcaggtggagcagatcggagagaataaataccggttcttcctcggcaatcagtttggggattctcagcagttgcggctggtccgtattctgcgcagcaccgtgatggttcgcgttggtggaggatggatggccttggatgaatttttagtgaaaaatgatccctgccgagcacgaggtagaactaacattgaacttagagagaaattcatcctaccagagggagcatcccagggaatgacccccttccgctcacggggtcgaaggtccaaaccatcttcccgggcagcttcccctactcgttccagctccagtgctagtcagagtaaccacagctgtacatccatgccatcttctccagccaccccagccagtggaaccaaggttatcccatcatcaggtagcaagttgaaacgaccaacaccaacttttcattctagtcggacatcccttgctggtgataccagcaatagttcttccccggcctccacaggtgccaaaactaatcgggcagaccctaaaaagtctgccagtcgccctgggagtcgggctgggagtcgagccgggagtcgagccagcagccggcgaggaagtgacgcttctgactttgacctcttagagacgcagtctgcttgttccgacacttcagaaagcagcgctgcagggggccaaggcaactccaggagagggctaaacaaaccttccaaaatcccaaccatgtctaagaagaccaccactgcctcccccaggactccaggtcccaagcgataacactgtctaagcacccccaagccactatccactttgaatcctgctccatacattgggtgtatatttattctgaacgggagaagttatattgttaaaagtgtaaaagaataattgtgttatgaagctgccttattttttttctttttgtaagttactattttcatgtgaatatttatgtagataaaatttgcctcctggtaaccctgtaatggatggggcccagaaatgaaatatttgagaaaaacaagtgaaaaggtcaagatacaaatgtgtattaaaaaaaaaaaagcctattaatagggtttctgcgcggtgcagggttgtaaacctgctttatcttttaggattattcctaaatgcatcttctttataaacttgacttgctatctcagcaagataaattatattaaaaaaataagaatcctgcagtgtttaaggaactctttttttgtaaatcacggacacctcaattagcaagaactgaggggagggctttttccattgtttaatgttttgtgatttttagctaaagagagggaacctcatctaagtaacatttgcacatgatacagcaaaaggagttcattgcaatactgtctttggatattgtttcagtactgggtgtttaaaggacaaatagctgctagaattcaggggtaaatgtaagtgttcagaaaacgtcagaacatttggggttttaaactgatttgttgctccctatccagcctagacaccagtaactcttgtgttcaccaggacccagacccttggcaagggataggctcgttggtgacattgtgaatttcagatttgttttatccactttttttgctatttatttaaatggtcgatcaacttcccacaaactgaggaatgaattccacgagcctgttctgaaaatgtggacgtaagacaaacacgtgctcgtcctttaatggagttcaccagcacacttgttaaccagtcctgtttgctttcgtctttttttgtgcgtaataaagtcaactgaccaagtgaccatgaaaaggggctgtctggggctcctgttttttagctgctgttcttcagctccgaccatgttgctgtgtgattatctcaattggttttaattgaggcagaaactgaagctctaccaatgaactgtttagaaacaagacacacttttgtattaaaattgcttgcagtaacaaata

SEQ ID NO: 153896 - DNA, 2824 bp, Homo sapiens
  Payload ID: 10253
  Gene Symbol: MACF1
  Gene Name: microtubule-actin crosslinking factor 1
  ENST ID: ENST00000360115
  CDS Start-End: 1-1631
ctcgcttcgaggaggtcctgacatgggctaagcagcaccagcagcgtcttgaaacggccttgtcagaactggtggctaatgctgagctcctggaagaacttctggcatggatccagtgggctgagaccaccctcattcagcgggatcaggagccaatcccgcagaacattgaccgagttaaagcccttatcgctgagcatcagacatttatggaggagatgactcgcaaacagcctgacgtggaccgggtcaccaagacatacaaaaggaaaaacatagagcctactcacgcgcctttcatagagaaatcccgcagcggaggcaggaaatccctaagtcagccaacccctcctcccatgccaatcctttcacagtctgaagcaaaaaacccacggatcaaccagctttctgcccgctggcagcaggtgtggctgttagcactggagcggcaaaggaaactgaatgatgccttggatcggctggaggagcagctatgcctggaattgaaagaatttgccaactttgactttgatgtctggaggaaaaagtatatgcgttggatgaatcacaaaaagtctcgagtgatggatttcttccggcgcattgataaggaccaggatgggaagataacacgtcaggagtttatcgatggcattttagcatccaagttccccaccaccaagttagagatgactgctgtggctgacattttcgaccgagatggggatggttacattgattattatgaatttgtggctgctcttcatcccaacaaggatgcgtatcgaccaacaaccgatgcagataaaatcgaagatgaggttacaagacaagtggctcagtgcaaatgtgcaaaaaggtttcaggtggagcagatcggagagaataaataccggttcttcctcggcaatcagtttggggattctcagcagttgcggctggtccgtattctgcgcagcaccgtgatggttcgcgttggtggaggatggatggccttggatgaatttttagtgaaaaatgatccctgccgagcacgaggtagaactaacattgaacttagagagaaattcatcctaccagagggagcatcccagggaatgacccccttccgctcacggggtcgaaggtccaaaccatcttcccgggcagcttcccctactcgttccagctccagtgctagtcagagtaaccacagctgtacatccatgccatcttctccagccaccccagccagtggaaccaaggttatcccatcatcaggtagcaagttgaaacgaccaacaccaacttttcattctagtcggacatcccttgctggtgataccagcaatagttcttccccggcctccacaggtgccaaaactaatcgggcagaccctaaaaagtctgccagtcgccctgggagtcgggctgggagtcgagccgggagtcgagccagcagccggcgaggaagtgacgcttctgactttgacctcttagagacgcagtctgcttgttccgacacttcagaaagcagcgctgcagggggccaaggcaactccaggagagggctaaacaaaccttccaaaatcccaaccatgtctaagaagaccaccactgcctcccccaggactccaggtcccaagcgataacactgtctaagcacccccaagccactatccactttgaatcctgctccatacattgggtgtatatttattctgaacgggagaagttatattgttaaaagtgtaaaagaataattgtgttatgaagctgccttattttttttctttttgtaagttactattttcatgtgaatatttatgtagataaaatttgcctcctggtaaccctgtaatggatggggcccagaaatgaaatatttgagaaaaacaagtgaaaaggtcaagatacaaatgtgtattaaaaaaaaaaaagcctattaatagggtttctgcgcggtgcagggttgtaaacctgctttatcttttaggattattcctaaatgcatcttctttataaacttgacttgctatctcagcaagataaattatattaaaaaaataagaatcctgcagtgtttaaggaactctttttttgtaaatcacggacacctcaattagcaagaactgaggggagggctttttccattgtttaatgttttgtgatttttagctaaagagagggaacctcatctaagtaacatttgcacatgatacagcaaaaggagttcattgcaatactgtctttggatattgtttcagtactgggtgtttaaaggacaaatagctgctagaattcaggggtaaatgtaagtgttcagaaaacgtcagaacatttggggttttaaactgatttgttgctccctatccagcctagacaccagtaactcttgtgttcaccaggacccagacccttggcaagggataggctcgttggtgacattgtgaatttcagatttgttttatccactttttttgctatttatttaaatggtcgatcaacttcccacaaactgaggaatgaattccacgagcctgttctgaaaatgtggacgtaagacaaacacgtgctcgtcctttaatggagttcaccagcacacttgttaaccagtcctgtttgctttcgtctttttttgtgcgtaataaagtcaactgaccaagtgaccatgaaaaggggctgtctggggctcctgttttttagctgctgttcttcagctccgaccatgttgctgtgtgattatctcaattggttttaattgaggcagaaactgaagctctaccaatgaactgtttagaaacaagacacacttttgtattaaaattgcttgcagtaacaaata

SEQ ID NO: 153897 - DNA, 17538 bp, Homo sapiens
  Payload ID: 10253
  Gene Symbol: MACF1
  Gene Name: microtubule-actin crosslinking factor 1
  Uniprot ID: Q9UPN3
  ENST ID: ENST00000361689
  CDS Start-End: 53-16345
atcacttctccctgggctcccaggccctcctgcagcagcccccgcctgggccatgtcttcctcagatgaagagacgctcagtgagcggtcatgtcggagtgagcggtcttgtcggagtgagcgatcttacaggagcgagcggtcggggagcctgtctccctgtcccccaggggacaccttgccctggaacctgccactgcatgagcagaaaaagcggaaaagccaggattcggtgctggaccctgcagagcgtgctgtggtcagagtcgctgatgaacgggaccgggttcagaagaaaacgttcaccaagtgggtcaacaagcacttaatgaaggtccgcaagcacatcaatgatctttatgaagatctgcgggatggccataacctgatctctctgttggaggtcctctcaggcatcaaactgccccgggagaagggcaggatgcgttttcataggctgcagaatgtgcagattgccctggacttcctaaagcagcgacaggtgaaactagtgaatattcgcaatgatgacatcacagatggcaaccccaagttgaccctgggtctgatctggaccattattttgcatttccagatctctgacatctacattagtggagaatcaggggatatgtcagccaaggagaaactactcctgtggacccagaaggtgacagctggttacacaggaatcaaatgcaccaacttttcctcctgctggagtgatgggaagatgttcaatgcactcattcaccgataccgacccgatctagtagacatggagagggtgcaaatccaaagtaaccgagagaatctggaacaggcttttgaagtggcagaaagactgggggtcactcgcctgctggatgcagaagatgtggatgtgccatctccagatgaaaagtctgtaatcacttatgtgtcttcgatttatgatgccttccctaaagttcctgagggtggagaagggatcagtgctacggaagtggactccaggtggcaagaataccaaagccgagtggactccctcattccctggatcaaacagcatacaatactgatgtcagataaaacttttccccaaaaccctgttgaactaaaggcactttataaccaatatatacacttcaaagaaacagaaattctggccaaggagagagaaaaaggaagaattgaggaattatataaattactagaggtgtggattgaatttggccgaattaaactgcctcaaggttatcaccctaatgatgtggaagaagagtggggaaagctcatcatagagatgctggaacgagagaaatcacttcggccggctgtggagaggctggaattgctgctacagattgcaaacaaaatccagaatggtgctttgaactgtgaagaaaaactgacactagctaagaatacactgcaggctgatgctgctcacctggaatcaggacaaccggtacaatgtgagtcagatgtcattatgtacattcaggagtgtgaaggtctcatcaggcagctgcaggtggatctccagatcctgcgggatgagaattactaccagctagaagagctggcttttagggtcatgcgtcttcaggatgagctggtcaccttgcgtctagagtgtacaaacctgtaccggaagggtcatttcacttcacttgaattggttccaccctctactttaaccaccactcatctgaaagcagaacccttaaccaaggcaacccattcttcttctacctcctggttccgaaagcctatgactcgggctgaacttgtggccatcagctcctctgaagatgaaggcaatctccgatttgtgtatgaactactgtcttgggtagaagagatgcagatgaaactggagcgagcagagtggggcaatgacctgcctagtgtggagttgcagctagaaacacagcagcacatccatacgagtgtagaagagctgggctcaagtgtcaaggaggccaggttgtatgagggaaagatgtcccagaatttccataccagctatgctgaaactcttggaaagctggagacacagtattgtaaattgaaggaaacttctagcttccggatgaggcaccttcagagcctgcataaatttgtttccagagctacagctgagttgatctggttgaatgagaaggaggaggaggaactagcatatgactggagtgacaacaattccaatatctcagccaagagaaattacttctctgagttgacaatggaactggaggagaaacaggatgtgtttcgttctctacaagatacagcagaactactttcacttgagaaccacccagccaagcagacagtggaggcttacagtgctgctgtccagtcccagttgcagtggatgaagcagctgtgcctgtgtgttgagcagcatgtgaaagagaatactgcttattttcagttcttcagtgatgcacgagagctggagtcattcttgaggaacctccaagattccattaaacgaaaatattcctgtgaccacaacaccagcttatcccgccttgaagacctgctccaggactccatggatgaaaaggagcagcttatacagtccaagagttccgttgccagtctcgttgggagatcaaaaaccatcgttcagctaaaaccacgcagtccagaccatgtgttaaagaacaccatttctgtcaaggctgtctgtgactacaggcagatcgagattactatttgcaaaaatgatgaatgtgtgctagaagataattctcagcggaccaaatggaaagtgatcagccccacagggaacgaggcaatggtgccgtcagtctgcttcctcatccccccacccaataaggatgccattgagatggccagcagggtcgaacaatcttatcagaaggttatggccctttggcatcagctgcatgttaacaccaaaagccttatctcttggaactatctgcgtaaagaccttgaccttgtacagacctggaacctagaaaagcttcgatcctcagcaccaggggagtgccatcagattatgaagaaccttcaggcccactatgaagactttctgcaggatagtcgtgactctgtgctgttctcagtggctgatcgcttgcgcttggaagaggaggtggaagcttgtaaagcccgcttccagcacctgatgaagtccatggagaatgaggacaaagaggagactgtggccaagatgtacatttcagagttgaagaacatccggctacgcctggaggagtatgaacagagggtggtcaaacgaattcagtctctagccagctctaggactgacagagatgcctggcaggacaatgcattaaggattgcagagcaagagcacacccaggaggatttacagcaattgaggtcagacttggatgcagtttctatgaaatgtgacagctttctccatcagtctccatctagttcaagtgtcccaactctgcgctcagaactgaatctgctggtggagaagatggaccatgtctatggtctctctactgtatatctgaataagttaaagacagttgatgttatagtacgtagcatacaggatgctgaactcttggtcaaaggttatgagattaagctgagtcaagaagaagtagtactggcagatctctcagctctggaggcccattggtcgacattacggcactggcttagtgatgtgaaggacaagaattcagtgttttcagtcctggatgaggaaattgccaaggccaaggtagtggcagagcagatgagtcgtctgacaccagagcgaaatctggatttggagcgctatcaggaaaaaggctcccagctgcaggagcgttggcaccgagtcattgcccagctcgagattcgccaatctgagctagaaagtatccaggaagttctgggagattaccgagcctgccatggaactctcatcaagtggattgaggaaaccactgcccagcaggaaatgatgaagccaggccaggcagaggatagcagagtgctttcggagcagctcagccagcagacggccctatttgcagaaattgagagaaatcagacaaaactggatcaatgtcaaaaattttcccagcagtactctactattgtaaaggactatgaattgcaactgatgacatacaaggcctttgtggaatcgcagcagaaatcccctggcaagcgccgtcgcatgctttcctcttcagatgccatcactcaagagttcatggacttaaggactcgctacacggcattggtgactttaacaactcagcacgtgaaatacatcagtgatgcactccggcgtctggaggaggaggagaaagtggtagaagaggagaaacaagaacatgtggagaaggttaaagaacttttgggctgggtgtctaccctagcgaggaatacacaaggaaaagctacctcatccgagaccaaagaatcaacagacattgaaaaagctattttggaacagcaggttctgtcagaagagctgacaacaaagaaagaacaagtctctgaagctattaaaacatcacagatcttcttggccaagcatggtcataagctctcagaaaaagagaagaaacaaatatctgagcaattgaatgccctaaacaaggcttaccatgacctttgtgatggttctgcaaatcagcttcagcagcttcagagccagttggctcaccagacagaacaaaagaccctgcagaaacaacaaaatacctgtcaccagcaactggaggatctttgcagttgggtaggacaggcagaaagagcactggcaggccaccaaggcagaaccacccagcaggatctctctgctttgcagaagaaccaaagtgacttgaaggatttacaggatgacattcagaatcgtgccacctcatttgccactgttgtcaaggacattgaggggttcatggaagagaatcagaccaagctgagcccacgtgagttgacagctcttcgggaaaagcttcatcaggctaaggagcaatatgaggcgctccaggaagagacacgtgtggcccagaaggaactggaggaagcagtgacctccgccttacagcaggagactgaaaagagtaaagcagcaaaggaactggcagagaacaagaagaagatcgatgctctcctggattgggtaacttcagtaggatcatctggtggacagctgctgaccaaccttccaggaatggagcagctctcgggagctagcttggagaaaggagccttggacaccactgatggttacatgggggtgaatcaagccccagagaaactggacaagcaatgtgagatgatgaaggcccgtcaccaagaattgctgtcccagcagcaaaatttcattctggccacccagtcagctcaggccttcttggatcagcatggccacaatctcacacctgaggagcaacagatgctgcaacagaagctgggagagctaaaggaacaatactctacttccctggcccaatcagaggcagaactgaagcaggtgcagacacttcaggatgagttgcagaaatttctgcaggatcataaagagtttgaaagctggttggaacgatccgagaaagagctggagaacatgcataagggaggcagcagccccgagacccttccctccctgctaaagcggcaaggaagcttctcagaggatgtcatttcccacaaaggagacttgagatttgtgactatctcaggacagaaagtcttggacatggaaaacagttttaaggaaggcaaagaaccatcagaaattggaaacttagtaaaggacaagttgaaggatgcaacagaaagatacactgctctccactcaaagtgtacacgattaggatctcacctgaatatgctgttaggccagtatcatcaattccaaaacagtgctgacagcctgcaggcctggatgcaggcttgtgaggccaacgtggagaagctcctctcagatactgttgcctctgaccctggagttctccaggagcagcttgcaacaacaaagcagttgcaggaggaattggctgagcaccaagtacctgtggaaaaactccaaaaagtagctcgtgacataatggaaattgaaggggagccagccccagaccacaggcatgttcaagaaactacagattccatactcagccacttccaaagcctctcctatagcctggctgagcgatcttctctgctgcagaaagcaattgcccaatctcagagtgtccaggaaagcctggagagcctgttgcagtctattggggaagttgaacaaaacctggaagggaagcaggtgtcatcactctcatcaggagtcatccaggaagccttagccacaaatatgaaattgaagcaggacattgctcggcaaaagagcagcttggaggccacccgtgagatggtgacccgattcatggagacagcagacagtactacagcagcagtgctgcagggcaaactggcagaggtgagccagcggttcgaacagctctgtctacagcagcaagaaaaggagagctccctaaagaagcttctaccccaggcagagatgtttgaacacctctctggtaagctgcagcagttcatggaaaacaaaagtcggatgctggcctctggaaatcagccagatcaagatattacacatttcttccaacagatccaggagctcaatttggaaatggaagaccaacaggagaacctagatactcttgagcacctggtcactgaactgagctcttgtggctttgcgctggacttgtgccagcatcaggacagggtacagaatctaagaaaagacttcacagagctacagaagacagttaaagagagagagaaagatgcatcatcttgccaggaacagttggatgaattccggaagctggtcaggaccttccagaaatggttgaaagaaactgaagggagtattccacctacggaaacttctatgagtgctaaagagttagaaaagcagattgaacacctgaagagtctactagatgactgggcaagtaagggaactctggtggaagaaatcaattgcaaaggtacttctttagaaaatctcatcatggaaatcacagcacctgattcccaaggcaagacaggttccatactgccctctgtaggaagctctgtaggcagtgtaaacggataccacacctgcaaagatctgacggagatccagtgtgacatgtcagatgtaaacttgaagtatgagaaactagggggagtacttcatgaacgccaggaaagccttcaggctatcctcaacagaatggaggaggttcacaaggaggcaaactctgtgctgcagtggctggaatcaaaagaggaagtcctgaaatccatggatgccatgtcatctccaaccaagacagaaacagtgaaagcccaagctgaatctaacaaggccttcctggctgagttggaacagaattctccaaaaattcaaaaagtaaaggaagccctggctggattactggtgacatatcccaactcacaggaagcagaaaattggaagaaaattcaggaagaactcaattcccgatgggaaagggccactgaggttactgtggctcggcaaaggcagctagaggaatctgcaagtcatctggcctgcttccaggctgcagaatcccagctccggccgtggctgatggagaaagaactgatgatgggagtgctggggcccctgtctattgaccccaacatgttgaatgcacaaaagcaacaggtccagtttatgctaaaggaatttgaagcacgcaggcaacagcatgagcaactgaatgaggcagctcagggcatcctaacaggccctggagatgtctctctgtccaccagccaagtacagaaagaactccagagcatcaatcagaaatgggttgagctgactgacaaactcaactcccgttccagccaaattgaccaagctattgttaagagcacccagtaccaggaactgctccaggacttatcagagaaggtgagggcagttggacaacggctgagtgtccagtcagctatcagcacccaaccagaggctgtaaagcagcaattggaagagaccagtgaaattcgatctgacttggagcagttagaccacgaggttaaggaggctcagacactgtgcgatgaactctcagtgctcattggtgagcagtacctcaaggatgaactgaagaagcgtttggagacagttgccctgcctctccaaggtttagaagaccttgcagccgatcgcattaacagactccaggcagctcttgccagcacccagcagttccagcaaatgtttgatgagttgaggacctggttggatgataaacaaagccagcaagcaaaaaactgcccaatttctgcaaaattggagcggctacagtctcagctacaggagaatgaagagtttcagaaaagtcttaatcaacacagtggctcctatgaggtgattgtggctgaaggggaatctctacttctttctgtacctcctggagaagagaaaaggactctacaaaaccagttggttgagctcaaaaaccattgggaagagcttagtaaaaaaactgcagacagacaatccaggctcaaggattgtatgcagaaagctcagaaatatcagtggcatgtggaagaccttgtgccatggatagaagattgtaaagctaagatgtctgagttgcgagtcactctggatccagtgcagctagagtccagtctcctaagatcaaaggctatgctgaatgaggtggagaagcgccgctccctgctggaaatattgaatagtgctgctgacattctgatcaattcttcagaagcagatgaggatggaatccgggatgagaaggctgggatcaaccagaacatggatgctgttacagaagagctgcaggccaaaacagggtcactcgaagaaatgactcagaggctcagggagttccaggaaagctttaagaatattgaaaagaaggttgaaggagccaaacaccaacttgagatctttgatgctctgggttctcaagcctgtagcaacaagaacctggagaagctaagagctcaacaggaagtgctgcaggccctagagcctcaggtagactatctgaggaactttactcagggtctggtagaagatgccccagatggatctgatgcttctcaacttctccaccaagctgaggtcgcccagcaagagttcctcgaagttaagcaaagagtgaacagtggttgtgtgatgatggaaaacaagctggaggggattggccagtttcactgccgggtccgagagatgttctctcaattggcagacctggatgatgagctagatggcatgggtgctattggcagagacactgatagcctccagtcccaaatcgaggatgtccggctattccttaacaaaattcacgtcctcaaattagacatagaggcctctgaagcagagtgtcgacatatgctagaagaagaggggactctggatttgttaggtctcaaaagggagctagaagccctgaacaaacagtgtggcaaactgacagagagggggaaagctcgtcaggaacagctggaactgacactaggccgtgtagaggacttctacaggaaattgaaaggactcaatgacgcgaccacagcagcagaggaggcagaggccctccagtgggtagtggggaccgaagtggaaatcatcaaccaacaattagcagattttaaaatgtttcagaaagaacaagtggatcctcttcagatgaaattgcagcaggtgaatggacttggccagggattaattcagagtgcaggaaaagactgtgatgtacagggtttagaacatgacatggaagagatcaatgctcgatggaatacattgaataaaaaggtcgcacaaagaattgcacagctacaggaagctttgttgcattgtgggaagtttcaagatgccttggagccattgctcagctggttggcagataccgaggagctcatagccaatcagaaacctccatctgctgagtataaagtggtgaaagcacagatccaagaacagaagttgctccagcggctcctagatgatcgaaaggccacagtagacatgcttcaagcagaaggaggcagaatagcccagtcagcagagctggctgatagagagaaaatcactggacagctggagagtcttgaaagtagatggactgaactactcagtaaggcagcagccaggcaaaaacagctggaagacatcctggttctggccaaacagttccatgagacagctgagcctatttctgacttcttatctgtcacagagaaaaagcttgctaactcagaacctgttggcactcagactgccaaaatacagcagcagatcattcggcacaaggctctggaagaagacatagaaaaccatgcaacagatgtgcaccaggcagtcaaaattgggcagtccctctcctccctgacatctcctgcagaacagggtgtgctgtcagaaaagatagactcattgcaggcccgatacagtgaaattcaagaccgctgttgtcggaaggcagccctacttgaccaagctctgtctaatgctaggctgtttggggaggatgaggtggaggtgctcaactggctggctgaggttgaggacaagctcagttcagtgttcgtaaaggatttcaaacaggatgtcctgcacaggcagcatgctgaccacctggctttaaatgaagaaattgttaatagaaagaagaatgtagatcaagctattaaaaatggtcaggctcttctaaaacaaaccacaggtgaggaggtgttacttatccaggaaaaactagatggtataaagactcgttacgcagacatcacagttactagctccaaggccctcagaactttagagcaagcccggcagctggccaccaagttccagtctacttatgaggaactgaccgggtggctgagggaggtggaggaggagctggcaaccagtggaggacagtctcccacaggggaacagataccccagtttcagcagagacagaaggaattaaagaaggaggtcatggagcacaggctggtgttggacacagtgaatgaggtgagccgtgctctcttagagctggtgccctggagagccagagaagggctggataaacttgtgtccgatgctaacgagcagtacaaactagtcagtgacactattggacaaagggtggatgaaattgatgctgctattcagagatcacaacagtatgagcaagctgccgatgcagaactagcttgggttgctgaaacaaaacggaaactgatggctctgggtccaattcgcctggaacaggaccagaccacagctcagcttcaggtacagaaggctttctccattgacattattcgacacaaagattcaatggatgaactcttcagtcaccgtagtgaaatctttggcacatgtggggaggagcaaaaaactgtattacaggaaaagacagagtctctaatacagcaatatgaagccattagcctactcaattcagagcgttatgcccgcctagagcgggcccaggtcttagtaaaccagttttgggaaacttatgaagagctcagcccctggattgaggaaactcgggcactaatagcacagttaccctctccagccattgatcatgagcagctcaggcagcaacaagaggaaatgaggcaattaagggaatctattgctgaacacaaacctcatattgacaaactactaaagataggcccacaactaaaggaattaaaccctgaggaaggggaaatggtggaagaaaaataccagaaagcagaaaacatgtatgcccaaataaaggaggaggtgcgccagcgagccctggctctggatgaagccgtgtcccagtccacacagattacagagtttcatgataaaattgagcctatgttggagacactggagaatctttcctctcgcctgcgtatgccaccactgatccctgctgaagtagacaagatcagagagtgcatcagtgacaataagagtgccaccgtggagctagaaaaactgcagccatcctttgaggccttgaagcgccgtggagaggagcttattggacgatctcagggagcagacaaggatctggctgcaaaagaaatccaggataaattggatcaaatggtattcttctgggaggacatcaaagctcgggctgaagaacgagaaatcaaatttcttgatgtccttgaattagcagagaagttctggtatgacatggcagctctcctgaccaccatcaaagacacccaggatattgtccatgacttggaaagcccaggcattgatccttccatcatcaaacaacaggttgaagctgctgagactattaaggaagagacagatggtctgcatgaagagctggagtttattcggatccttggagcagatttgatttttgcctgtggagaaactgagaagcctgaagtgaggaagagcattgatgagatgaataatgcttgggagaacttaaacaaaacatggaaagagaggctagaaaaacttgaggatgctatgcaagctgctgtgcagtatcaggacactcttcaggctatgtttgactggctagataacactgtgattaaactctgcaccatgccccctgttggcactgacctcaatactgttaaagatcagttaaatgaaatgaaggagttcaaagtagaagtttaccaacagcaaattgagatggagaagcttaatcaccagggtgaactgatgttaaagaaagctactgatgagacggacagagacattatacgagaaccactgacagaactcaaacacctctgggagaacctgggtgagaaaattgcccaccgacagcacaaactagaaggggctctgttggcccttggtcagttccagcatgccttagaggaactaatgagttggctgactcataccgaagagttgttagatgctcagagaccaataagtggagacccaaaagtcattgaagttgagctcgcaaagcaccatgtcctaaaaaatgatgttttggctcatcaagccacagtggaaacagtcaacaaagctggcaatgagcttcttgaatccagtgctggagatgatgccagcagcttaaggagccgtttggaagccatgaaccaatgctgggagtcagtgttacagaaaacagaggagagggagcagcagcttcagtcaactctgcagcaggcccagggcttccacagtgaaattgaagatttcctcttggaacttactagaatggagagccagctttctgcatctaagcccacaggaggacttcctgaaactgctagggaacagcttgatacacatatggaactctattcccagctgaaagccaaggaagagacttataatcaactacttgacaagggcagactcatgcttctaagccgtgacgactctgggtctggctccaagacagaacagagtgtagcacttttggagcagaagtggcatgtggtcagcagtaagatggaagaaagaaagtcaaagctggaagaggccctcaacttggcaacagaattccagaattccctacaagaatttatcaactggctcactctagcagagcagagtttaaacatcgcttctccaccaagcctgattctaaatactgtcctttcccagatagaagagcacaaggtttttgctaatgaagtaaatgctcatcgagaccagatcattgagctggatcaaactgggaatcaattaaagttccttagccaaaagcaggatgttgttctgatcaagaatttgttggtgagcgtgcagtctcgatgggagaaggttgtccagcgatctattgaaagagggcgatcactagatgatgccaggaagcgggcaaaacaattccatgaagcttggaaaaaactgattgactggctagaagatgcagagagtcacctggactcagaactagagatatccaatgacccagacaaaattaaacttcagctttctaagcataaggagtttcagaagactcttggtggcaagcagcctgtgtatgataccacaattagaactggcagagcactgaaagaaaagactttgcttcccgaagatagtcagaaacttgacaatttcctaggagaagtcagagacaaatgggatactgtttgtggcaagtctgtggagcggcagcacaagttggaggaagccctgctcttttcgggtcagttcatggatgctttgcaggcattggttgactggttatacaaggtggagccacagctggctgaggaccagcccgtgcacggggaccttgacctcgtcatgaacctcatggatgcacacaaggttttccagaaggaactgggaaagcgaacaggaaccgttcaggtcctgaagcggtcaggccgagagctgattgagaatagtcgagatgacaccacttgggtaaaaggacagctccaggaactgagcactcgctgggacactgtctgtaaactctctgtttccaaacaaagccggcttgagcaggccttaaaacaagcggaagtgtttcgagacacagtccacatgctgttggagtggctttctgaagcagagcaaacgcttcgctttcggggagcacttcctgatgacacagaggccctgcagtctctcattgacacccataaggaattcatgaagaaagtagaagaaaagcgagtggacgttaactcagcagtagccatgggagaagtcatcctggctgtctgccaccccgattgcatcacaaccatcaaacactggatcaccatcatccgagctcgcttcgaggaggtcctgacatgggctaagcagcaccagcagcgtcttgaaacggccttgtcagaactggtggctaatgctgagctcctggaagaacttctggcatggatccagtgggctgagaccaccctcattcagcgggatcaggagccaatcccgcagaacattgaccgagttaaagcccttatcgctgagcatcagacatttatggaggagatgactcgcaaacagcctgacgtggaccgggtcaccaagacatacaaaaggaaaaacatagagcctactcacgcgcctttcatagagaaatcccgcagcggaggcaggaaatccctaagtcagccaacccctcctcccatgccaatcctttcacagtctgaagcaaaaaacccacggatcaaccagctttctgcccgctggcagcaggtgtggctgttagcactggagcggcaaaggaaactgaatgatgccttggatcggctggaggagttgaaagaatttgccaactttgactttgatgtctggaggaaaaagtatatgcgttggatgaatcacaaaaagtctcgagtgatggatttcttccggcgcattgataaggaccaggatgggaagataacacgtcaggagtttatcgatggcattttagcatccaagttccccaccaccaagttagagatgactgctgtggctgacattttcgaccgagatggggatggttacattgattattatgaatttgtggctgctcttcatcccaacaaggatgcgtatcgaccaacaaccgatgcagataaaatcgaagatgaggttacaagacaagtggctcagtgcaaatgtgcaaaaaggtttcaggtggagcagatcggagagaataaataccggtttggggattctcagcagttgcggctggtccgtattctgcgcagcaccgtgatggttcgcgttggtggaggatggatggccttggatgaatttttagtgaaaaatgatccctgccgagcacgaggtagaactaacattgaacttagagagaaattcatcctaccagagggagcatcccagggaatgacccccttccgctcacggggtcgaaggtccaaaccatcttcccgggcagcttcccctactcgttccagctccagtgctagtcagagtaaccacagctgtacatccatgccatcttctccagccaccccagccagtggaaccaaggttatcccatcatcaggtagcaagttgaaacgaccaacaccaacttttcattctagtcggacatcccttgctggtgataccagcaatagttcttccccggcctccacaggtgccaaaactaatcgggcagaccctaaaaagtctgccagtcgccctgggagtcgggctgggagtcgagccgggagtcgagccagcagccggcgaggaagtgacgcttctgactttgacctcttagagacgcagtctgcttgttccgacacttcagaaagcagcgctgcagggggccaaggcaactccaggagagggctaaacaaaccttccaaaatcccaaccatgtctaagaagaccaccactgcctcccccaggactccaggtcccaagcgataacactgtctaagcacccccaagccactatccactttgaatcctgctccatacattgggtgtatatttattctgaacgggagaagttatattgttaaaagtgtaaaagaataattgtgttatgaagctgccttattttttttctttttgtaagttactattttcatgtgaatatttatgtagataaaatttgcctcctggtaaccctgtaatggatggggcccagaaatgaaatatttgagaaaaacaagtgaaaaggtcaagatacaaatgtgtattaaaaaaaaaaaagcctattaatagggtttctgcgcggtgcagggttgtaaacctgctttatcttttaggattattcctaaatgcatcttctttataaacttgacttgctatctcagcaagataaattatattaaaaaaataagaatcctgcagtgtttaaggaactctttttttgtaaatcacggacacctcaattagcaagaactgaggggagggctttttccattgtttaatgttttgtgatttttagctaaagagagggaacctcatctaagtaacatttgcacatgatacagcaaaaggagttcattgcaatactgtctttggatattgtttcagtactgggtgtttaaaggacaaatagctgctagaattcaggggtaaatgtaagtgttcagaaaacgtcagaacatttggggttttaaactgatttgttgctccctatccagcctagacaccagtaactcttgtgttcaccaggacccagacccttggcaagggataggctcgttggtgacattgtgaatttcagatttgttttatccactttttttgctatttatttaaatggtcgatcaacttcccacaaactgaggaatgaattccacgagcctgttctgaaaatgtggacgtaagacaaacacgtgctcgtcctttaatggagttcaccagcacacttgttaaccagtcctgtttgctttcgtctttttttgtgcgtaataaagtcaactgaccaagtgaccatgaaaaggggctgtctggggctcctgttttttagctgctgttcttcagctccgaccatgttgctgtgtgattatctcaattggttttaattgaggcagaaactgaagctctaccaatgaactgtttagaaacaagacacacttttgtattaaaattgcttgcagtaacaaata

SEQ ID NO: 153898 - DNA, 23440 bp, Homo sapiens
  Payload ID: 10253
  Gene Symbol: MACF1
  Gene Name: microtubule-actin crosslinking factor 1
  Uniprot ID: Q9UPN3
  ENST ID: ENST00000372915
  CDS Start-End: 88-22254
ttttgtctgctcacattcacccctttctccttcagatcacttctccctgggctcccaggccctcctgcagcagcccccgcctgggccatgtcttcctcagatgaagagacgctcagtgagcggtcatgtcggagtgagcggtcttgtcggagtgagcgatcttacaggagcgagcggtcggggagcctgtctccctgtcccccaggggacaccttgccctggaacctgccactgcatgagcagaaaaagcggaaaagccaggattcggtgctggaccctgcagagcgtgctgtggtcagagtcgctgatgaacgggaccgggttcagaagaaaacgttcaccaagtgggtcaacaagcacttaatgaaggtccgcaagcacatcaatgatctttatgaagatctgcgggatggccataacctgatctctctgttggaggtcctctcaggcatcaaactgccccgggagaagggcaggatgcgttttcataggctgcagaatgtgcagattgccctggacttcctaaagcagcgacaggtgaaactagtgaatattcgcaatgatgacatcacagatggcaaccccaagttgaccctgggtctgatctggaccattattttgcatttccagatctctgacatctacattagtggagaatcaggggatatgtcagccaaggagaaactactcctgtggacccagaaggtgacagctggttacacaggaatcaaatgcaccaacttttcctcctgctggagtgatgggaagatgttcaatgcactcattcaccgataccgacccgatctagtagacatggagagggtgcaaatccaaagtaaccgagagaatctggaacaggcttttgaagtggcagaaagactgggggtcactcgcctgctggatgcagaagatgtggatgtgccatctccagatgaaaagtctgtaatcacttatgtgtcttcgatttatgatgccttccctaaagttcctgagggtggagaagggatcagtgctacggaagtggactccaggtggcaagaataccaaagccgagtggactccctcattccctggatcaaacagcatacaatactgatgtcagataaaacttttccccaaaaccctgttgaactaaaggcactttataaccaatatatacacttcaaagaaacagaaattctggccaaggagagagaaaaaggaagaattgaggaattatataaattactagaggtgtggattgaatttggccgaattaaactgcctcaaggttatcaccctaatgatgtggaagaagagtggggaaagctcatcatagagatgctggaacgagagaaatcacttcggccggctgtggagaggctggaattgctgctacagattgcaaacaaaatccagaatggtgctttgaactgtgaagaaaaactgacactagctaagaatacactgcaggctgatgctgctcacctggaatcaggacaaccggtacaatgtgagtcagatgtcattatgtacattcaggagtgtgaaggtctcatcaggcagctgcaggtggatctccagatcctgcgggatgagaattactaccagctagaagagctggcttttagggtcatgcgtcttcaggatgagctggtcaccttgcgtctagagtgtacaaacctgtaccggaagggtcatttcacttcacttgaattggttccaccctctactttaaccaccactcatctgaaagcagaacccttaaccaaggcaacccattcttcttctacctcctggttccgaaagcctatgactcgggctgaacttgtggccatcagctcctctgaagatgaaggcaatctccgatttgtgtatgaactactgtcttgggtagaagagatgcagatgaaactggagcgagcagagtggggcaatgacctgcctagtgtggagttgcagctagaaacacagcagcacatccatacgagtgtagaagagctgggctcaagtgtcaaggaggccaggttgtatgagggaaagatgtcccagaatttccataccagctatgctgaaactcttggaaagctggagacacagtattgtaaattgaaggaaacttctagcttccggatgaggcaccttcagagcctgcataaatttgtttccagagctacagctgagttgatctggttgaatgagaaggaggaggaggaactagcatatgactggagtgacaacaattccaatatctcagccaagagaaattacttctctgagttgacaatggaactggaggagaaacaggatgtgtttcgttctctacaagatacagcagaactactttcacttgagaaccacccagccaagcagacagtggaggcttacagtgctgctgtccagtcccagttgcagtggatgaagcagctgtgcctgtgtgttgagcagcatgtgaaagagaatactgcttattttcagttcttcagtgatgcacgagagctggagtcattcttgaggaacctccaagattccattaaacgaaaatattcctgtgaccacaacaccagcttatcccgccttgaagacctgctccaggactccatggatgaaaaggagcagcttatacagtccaagagttccgttgccagtctcgttgggagatcaaaaaccatcgttcagctaaaaccacgcagtccagaccatgtgttaaagaacaccatttctgtcaaggctgtctgtgactacaggcagatcgagattactatttgcaaaaatgatgaatgtgtgctagaagataattctcagcggaccaaatggaaagtgatcagccccacagggaacgaggcaatggtgccgtcagtctgcttcctcatccccccacccaataaggatgccattgagatggccagcagggtcgaacaatcttatcagaaggttatggccctttggcatcagctgcatgttaacaccaaaagccttatctcttggaactatctgcgtaaagaccttgaccttgtacagacctggaacctagaaaagcttcgatcctcagcaccaggggagtgccatcagattatgaagaaccttcaggcccactatgaagactttctgcaggatagtcgtgactctgtgctgttctcagtggctgatcgcttgcgcttggaagaggaggtggaagcttgtaaagcccgcttccagcacctgatgaagtccatggagaatgaggacaaagaggagactgtggccaagatgtacatttcagagttgaagaacatccggctacgcctggaggagtatgaacagagggtggtcaaacgaattcagtctctagccagctctaggactgacagagatgcctggcaggacaatgcattaaggattgcagagcaagagcacacccaggaggatttacagcaattgaggtcagacttggatgcagtttctatgaaatgtgacagctttctccatcagtctccatctagttcaagtgtcccaactctgcgctcagaactgaatctgctggtggagaagatggaccatgtctatggtctctctactgtatatctgaataagttaaagacagttgatgttatagtacgtagcatacaggatgctgaactcttggtcaaaggttatgagattaagctgagtcaagaagaagtagtactggcagatctctcagctctggaggcccattggtcgacattacggcactggcttagtgatgtgaaggacaagaattcagtgttttcagtcctggatgaggaaattgccaaggccaaggtagtggcagagcagatgagtcgtctgacaccagagcgaaatctggatttggagcgctatcaggaaaaaggctcccagctgcaggagcgttggcaccgagtcattgcccagctcgagattcgccaatctgagctagaaagtatccaggaagttctgggagattaccgagcctgccatggaactctcatcaagtggattgaggaaaccactgcccagcaggaaatgatgaagccaggccaggcagaggatagcagagtgctttcggagcagctcagccagcagacggccctatttgcagaaattgagagaaatcagacaaaactggatcaatgtcaaaaattttcccagcagtactctactattgtaaaggactatgaattgcaactgatgacatacaaggcctttgtggaatcgcagcagaaatcccctggcaagcgccgtcgcatgctttcctcttcagatgccatcactcaagagttcatggacttaaggactcgctacacggcattggtgactttaacaactcagcacgtgaaatacatcagtgatgcactccggcgtctggaggaggaggagaaagtggtagaagaggagaaacaagaacatgtggagaaggttaaagaacttttgggctgggtgtctaccctagcgaggaatacacaaggaaaagctacctcatccgagaccaaagaatcaacagacattgaaaaagctattttggaacagcaggttctgtcagaagagctgacaacaaagaaagaacaagtctctgaagctattaaaacatcacagatcttcttggccaagcatggtcataagctctcagaaaaagagaagaaacaaatatctgagcaattgaatgccctaaacaaggcttaccatgacctttgtgatggttctgcaaatcagcttcagcagcttcagagccagttggctcaccagacagaacaaaaggaatgcagagcagttgctggggtgattgacctaggcacagtggagatatttcccatcttcaaagccatgcaaaagggcctccttgaccaagacacaggcctagtgcttctggaatctcaggttatcatgtctggcctcattgcccctgagacgggtgaaaacctctctttggaggagggcatagccagaaacctcattaatccccagatgtaccagcagctccgggagctacaggatgccctggccttaataagcaggcttactgagagcagaggccctctttctgtggtggaagcaattgaaaagagaataatcagtgagacagttggactgaaaatcttagaagctcacctggcaactggaggtttcagtctttcccctagtgagaactgtattaacctggaagaggcttttcatcaaggcctcatttctgcatggcttcattcagtattagagtcttatcttagaacatccaagaatttgatagaccctaacacagctgagaaaattggtttgctggatctgatgcagcgatgtattgtccaccaggaatcaggattcaaattactgcctgtcaaacaattggcaggggggatggtgagcttgaaatcaggccggaaggttagcattttccgtgcagttcaggaagggctaatagataggcaggtcactgtccggttgctggaagctcagctttttgctggtggcatagtagatccaagaacaggacacagacttacagtggaagaggctgtaagacataatctgattgaccaagatatggcctgtgctatcctcataaggcagcttcagacaggaggcatcatagacactgtcacggggcaaaggctaacaatagatgaagcagtgagcaatgatctagtagctgctaagatcgcccttgtgattctggagtccctctggtcattcatggggttgctgtggcctgaatctggagagatcctcccaattacagatgccctagaacaaggtattgtgtctactgaactagcacataaaatccttagtaaccgacagcatattaaggctctgtttctaccagcaaccacagagattttgtcctggaagaaagcaatagaaagtggtatcctggatagagatcttgccaataacttaaaatcgatttgtatacctgatgtgatgccccacatgcaactagcagactctgcagaacaaaatattaatcctggagcagcagttctaccgtgcagcaagagccaccctaaggccacagcaagccagagtgagaatctgttgttccagctgatgactcacagctatattaatgtgcaaaatggacagaggctgcttctgttagataaagagctgatggagacactaacatccagagatgagtatcaaacaagtcctccaaaagtggttgaaattgggcatcaaaggcaaaaaactcctgagggattgcaagaatcagctaatgtgaaaatctcaggaactttcagcagtgggtggactgtgaggctgcctgagttccagttttcttctcagaacaaagaatatcccgatcgggaagattgcactacagaaaaaggcaaaaagaccactgtagaaacagaagattcttctgtagagaaccctgaacaggatctgtttgtagaacaaaaagagagaaatccaaacattgatgctttgaaggtaataaataaagtcaaattagaggtacaaaggcagttgataggtacccaaagggaagaccaaacagcagtgtctgtcagagaaaatgccagcaggggacacctcctgaccatacctcctgctgaggcggaaggtgtgccgttggtggttgacaaagatgttttttctgttgaaacaccaaagaaagaacatcaacctctaagaaacacttcctttacatgtcagaatgaacaagcacacactcttgagactgaatatattcatgatgaaactggaggatctcacataaaaccccaaagcaaaaagttacaagttcaggtaaagaaaactctaggtataaagttagaactaaagtctgaaactgatgggaatgttcatcctctggacaaaaaggaaatgttaaagaaaacatttctggctaaggatgaccataaagaaagtcaagaagcacagaacatcgcaggtggtagtatgatgatgtcagaaaagaccgatgaggaagatagtggcagggaaatttttctgtcatgcagtcatccattagaattgcttgaagaagctaccttaaatgtattatctgcacagttactagatggtggtatctttcatgaacaaacaggtcaaaagctcttactaaatgaagcaatatcccgaggcattgtgccaagtcacactgccgtgaagcttatggagaagctgaacatgtttcaggggttctttgactctcagacttgtgagtctttgacaactgaagaagtcattaatgaaggtctgatggatgagaaattattacataatgtcctcatggcagacaaagctataagtggtgtcttagacccccgtacccagacactgtgctctgtaaaggatgcagttacagttggacttcttgacaaggaaacagccaccagaattttagagaggcaggtggtgactggtggaattattgatctgaaacgaggcaaaaaagtttcagtaactttggcctcaactcttggcttggtggacgttgctgaccagccagaacttataaatctggagaaagcttccaaaggtagagatgctgaaaaaacagttagggagagattaattagtttacaaatggaaacaacaggacttatagaccctgatagtaaagcacctttaacagttgtgcagtccattgacagaggtcttttggagagagaggaggccgttcgtttgttgactaagcaagtggtagatggaggtatcattcaccatatatctgggatgagactttctgttgataatgccttcagacatggcttaattggtgaagatttagccgagaaactcaaaagagttgagaacttaaacatccatcagatttttaatcctgaaacgaaggaaaatatttccctccctaaagccataaaattagatcttattacctcagacctgaaaagagaaatccaggaggttcaggcctttactggaaactttgtggatctcatttctggtcagagattgaccttggcagaagctaaaaaagaaggactgttaactaatgaagcagtattgtctccaggaatgatgcatggcattgtagatcccgagaactgcagaattgtcccctactcagaattagtcaagaaatgtaagattgatattgaatctggacagagatatctagaagtaattcccttctcagacattaaagatggggtgagcgacaaagtgcttacattgtctcaagcaattcagcttggaaaagtagactttgcatctacgctgaaggttctagaagcccaggcaaatactggtggaatcatagatactgctactggaaaaagactgacattggcatcagctttggaagagaaactggtggatgaaaacatggtcagaattattgcatctcatcaggtgttaaatggaggaattgttgacatatttagtgatcagagagtgactttagtagaagctattgagaaaagactgatcagccctgaactggcaaatatgatccaaatagatagttcagagttcagcgatcacagggctcagattgaaaagcaagaagggattgaagtgtgtgcattacaaaatgaatttctaggaaaggatatgttaattgcttgtaatcagactgctgaaatgagttgtaataaagtagaagagagtgagagattatttcaagttgaaaatcagtctgcacaagaaaaggttaaagtgagagtttctgatggggagcaggcaaaaaagagcagggaaatttccttaaaggaatttgggtgcaaggatcaacgtaagccaagaatgtcttcagatgctaaagaatttatcagtatcataaatcctcataatcttaaaggtaaatccttgggccaagtgtcattgacacacccttactctgaatgtgattttaaacttaaagaagtggctagaaataacatgggaaatgatacaaatgaagagcaggaaaaagcagtgacaaaaatagaaattatttctcatatgaagcagtctacctcatgtctagattctgaagaaataagagaaaatcaaggggaagtgattttggaagtacaagaaacatattgtgaaacgtcaggcaaattgccgagtgagcaggttttgcagcaaccaatgaatgctcgggtgaaaagtaagagagagaagagggaggtgattgtagaagaaagtatcagaacatgcaaaccagcatttctttctgaagaaaagttgtatcaggaaactgccattagagatgagcatgactcccatataaagagccaacctagggaaatgacctcaagtgaaaaagggaaagaagctgatacagaaatgggattttctattacttttaaaattgaagagtcctcttcccaagtggtacctcaaggaatttctgtaaaacatttagatgctttaacactcttcagctctaaacaggccaatgaaggaaaagtaaacaatttaagtctctgcttgactttaaaaccagaagaaaacttatctcgagaaattgcctgtggggcccagagtgaaccattcccttgtatgaccccaagacctgaaggattgcactaccaggaatcagatggaaaagcccaagtgacaggcccatcccaaatttccaaaacagacaagtctttccaaggaaccaccagacaggagaccaactatcaagattcctgggttacttcgaaaactaaggaaaccaaacatcaaatttcctcatctaatgaatgtaaagaaaagtcataccaagaagtatcttttgacccagcaagaggtcttaaattggaagaaatcacagtttctagaccagattcaaaagaagtcaggtatctagaattctcagacagaaaagaccttcatcatcagggcagcaaaagtgatgataaactttgtggaactctcaaatctgaaatagcaacacaggaactaactggagagaaatttctagaaatggcaaaccctaatgttgcaggtctagaagcaggatccattgaggacatagtgactcagagaggttccagagtcttgggatcctttcttccagagaaactgttcaaaggagtgtctcaaaaagagaatacagggcaacagaatgccatcattagtcctactgttctagagaccagtgaagaaaagacagtgtccctaacagtatgctctgcagtgaagacagagaagacaccacaggaaaagctcagagaaagccctggcagtgaacaaactcccttcatgactgcacctgaaggaaagggaaatggaggtgtaaacccagagcccttcagagcaactcagaatgtatttacccggcaactctgtttagaacatgatgaaaagctagtatcctatctgtctctgttacggaacattgaaatgaggaccaaacagattcaacctttggagctaaacctggcagaactacaggatctgctgtgtcaggccaaggtattagaaagggagttaaaggatctgaccaccttggtcagtcaggagctggagtgtgtgaatcagattatcatcagccagcctcaagaagttcctgctcaactgttgaaggctctagagaaagatgccaagaatcttcagaagtctctcagctctgtgagtgacacttggaattccaggctactccacttccagaatgctgtggaaatagaaaagactaaagtgttaaatcagcacacacagctagaaggccgacttcaagatctgagagcctgggttggcaataaaaatcttattctgaacagcaagggatctaacagtgaaatagatgttgacagcctgaacctctgcctccaacagtatgaggatttgaaacagcccatggctgaaaggaaagctcagctggatgctcttgcttttgatattcagttctttatctcagaacatgcccaggacttgtcccctcagcagaatcgacagatgctgaggcttctgaatgaactgcagaggtccttccaggacattttggaacagactgccgctcaggtggatgccttgcagggccatcttcaacaaatggagcaggaagccctggtgaagaccctgcagaaacaacaaaatacctgtcaccagcaactggaggatctttgcagttgggtaggacaggcagaaagagcactggcaggccaccaaggcagaaccacccagcaggatctctctgctttgcagaagaaccaaagtgacttgaaggatttacaggatgacattcagaatcgtgccacctcatttgccactgttgtcaaggacattgaggggttcatggaagagaatcagaccaagctgagcccacgtgagttgacagctcttcgggaaaagcttcatcaggctaaggagcaatatgaggcgctccaggaagagacacgtgtggcccagaaggaactggaggaagcagtgacctccgccttacagcaggagactgaaaagagtaaagcagcaaaggaactggcagagaacaagaagaagatcgatgctctcctggattgggtaacttcagtaggatcatctggtggacagctgctgaccaaccttccaggaatggagcagctctcgggagctagcttggagaaaggagccttggacaccactgatggttacatgggggtgaatcaagccccagagaaactggacaagcaatgtgagatgatgaaggcccgtcaccaagaattgctgtcccagcagcaaaatttcattctggccacccagtcagctcaggccttcttggatcagcatggccacaatctcacacctgaggagcaacagatgctgcaacagaagctgggagagctaaaggaacaatactctacttccctggcccaatcagaggcagaactgaagcaggtgcagacacttcaggatgagttgcagaaatttctgcaggatcataaagagtttgaaagctggttggaacgatccgagaaagagctggagaacatgcataagggaggcagcagccccgagacccttccctccctgctaaagcggcaaggaagcttctcagaggatgtcatttcccacaaaggagacttgagatttgtgactatctcaggacagaaagtcttggacatggaaaacagttttaaggaaggcaaagaaccatcagaaattggaaacttagtaaaggacaagttgaaggatgcaacagaaagatacactgctctccactcaaagtgtacacgattaggatctcacctgaatatgctgttaggccagtatcatcaattccaaaacagtgctgacagcctgcaggcctggatgcaggcttgtgaggccaacgtggagaagctcctctcagatactgttgcctctgaccctggagttctccaggagcagcttgcaacaacaaagcagttgcaggaggaattggctgagcaccaagtacctgtggaaaaactccaaaaagtagctcgtgacataatggaaattgaaggggagccagccccagaccacaggcatgttcaagaaactacagattccatactcagccacttccaaagcctctcctatagcctggctgagcgatcttctctgctgcagaaagcaattgcccaatctcagagtgtccaggaaagcctggagagcctgttgcagtctattggggaagttgaacaaaacctggaagggaagcaggtgtcatcactctcatcaggagtcatccaggaagccttagccacaaatatgaaattgaagcaggacattgctcggcaaaagagcagcttggaggccacccgtgagatggtgacccgattcatggagacagcagacagtactacagcagcagtgctgcagggcaaactggcagaggtgagccagcggttcgaacagctctgtctacagcagcaagaaaaggagagctccctaaagaagcttctaccccaggcagagatgtttgaacacctctctggtaagctgcagcagttcatggaaaacaaaagtcggatgctggcctctggaaatcagccagatcaagatattacacatttcttccaacagatccaggagctcaatttggaaatggaagaccaacaggagaacctagatactcttgagcacctggtcactgaactgagctcttgtggctttgcgctggacttgtgccagcatcaggacagggtacagaatctaagaaaagacttcacagagctacagaagacagttaaagagagagagaaagatgcatcatcttgccaggaacagttggatgaattccggaagctggtcaggaccttccagaaatggttgaaagaaactgaagggagtattccacctacggaaacttctatgagtgctaaagagttagaaaagcagattgaacacctgaagagtctactagatgactgggcaagtaagggaactctggtggaagaaatcaattgcaaaggtacttctttagaaaatctcatcatggaaatcacagcacctgattcccaaggcaagacaggttccatactgccctctgtaggaagctctgtaggcagtgtaaacggataccacacctgcaaagatctgacggagatccagtgtgacatgtcagatgtaaacttgaagtatgagaaactagggggagtacttcatgaacgccaggaaagccttcaggctatcctcaacagaatggaggaggttcacaaggaggcaaactctgtgctgcagtggctggaatcaaaagaggaagtcctgaaatccatggatgccatgtcatctccaaccaagacagaaacagtgaaagcccaagctgaatctaacaaggccttcctggctgagttggaacagaattctccaaaaattcaaaaagtaaaggaagccctggctggattactggtgacatatcccaactcacaggaagcagaaaattggaagaaaattcaggaagaactcaattcccgatgggaaagggccactgaggttactgtggctcggcaaaggcagctagaggaatctgcaagtcatctggcctgcttccaggctgcagaatcccagctccggccgtggctgatggagaaagaactgatgatgggagtgctggggcccctgtctattgaccccaacatgttgaatgcacaaaagcaacaggtccagtttatgctaaaggaatttgaagcacgcaggcaacagcatgagcaactgaatgaggcagctcagggcatcctaacaggccctggagatgtctctctgtccaccagccaagtacagaaagaactccagagcatcaatcagaaatgggttgagctgactgacaaactcaactcccgttccagccaaattgaccaagctattgttaagagcacccagtaccaggaactgctccaggacttatcagagaaggtgagggcagttggacaacggctgagtgtccagtcagctatcagcacccaaccagaggctgtaaagcagcaattggaagagaccagtgaaattcgatctgacttggagcagttagaccacgaggttaaggaggctcagacactgtgcgatgaactctcagtgctcattggtgagcagtacctcaaggatgaactgaagaagcgtttggagacagttgccctgcctctccaaggtttagaagaccttgcagccgatcgcattaacagactccaggcagctcttgccagcacccagcagttccagcaaatgtttgatgagttgaggacctggttggatgataaacaaagccagcaagcaaaaaactgcccaatttctgcaaaattggagcggctacagtctcagctacaggagaatgaagagtttcagaaaagtcttaatcaacacagtggctcctatgaggtgattgtggctgaaggggaatctctacttctttctgtacctcctggagaagagaaaaggactctacaaaaccagttggttgagctcaaaaaccattgggaagagcttagtaaaaaaactgcagacagacaatccaggctcaaggattgtatgcagaaagctcagaaatatcagtggcatgtggaagaccttgtgccatggatagaagattgtaaagctaagatgtctgagttgcgagtcactctggatccagtgcagctagagtccagtctcctaagatcaaaggctatgctgaatgaggtggagaagcgccgctccctgctggaaatattgaatagtgctgctgacattctgatcaattcttcagaagcagatgaggatggaatccgggatgagaaggctgggatcaaccagaacatggatgctgttacagaagagctgcaggccaaaacagggtcactcgaagaaatgactcagaggctcagggagttccaggaaagctttaagaatattgaaaagaaggttgaaggagccaaacaccaacttgagatctttgatgctctgggttctcaagcctgtagcaacaagaacctggagaagctaagagctcaacaggaagtgctgcaggccctagagcctcaggtagactatctgaggaactttactcagggtctggtagaagatgccccagatggatctgatgcttctcaacttctccaccaagctgaggtcgcccagcaagagttcctcgaagttaagcaaagagtgaacagtggttgtgtgatgatggaaaacaagctggaggggattggccagtttcactgccgggtccgagagatgttctctcaattggcagacctggatgatgagctagatggcatgggtgctattggcagagacactgatagcctccagtcccaaatcgaggatgtccggctattccttaacaaaattcacgtcctcaaattagacatagaggcctctgaagcagagtgtcgacatatgctagaagaagaggggactctggatttgttaggtctcaaaagggagctagaagccctgaacaaacagtgtggcaaactgacagagagggggaaagctcgtcaggaacagctggaactgacactaggccgtgtagaggacttctacaggaaattgaaaggactcaatgacgcgaccacagcagcagaggaggcagaggccctccagtgggtagtggggaccgaagtggaaatcatcaaccaacaattagcagattttaaaatgtttcagaaagaacaagtggatcctcttcagatgaaattgcagcaggtgaatggacttggccagggattaattcagagtgcaggaaaagactgtgatgtacagggtttagaacatgacatggaagagatcaatgctcgatggaatacattgaataaaaaggtcgcacaaagaattgcacagctacaggaagctttgttgcattgtgggaagtttcaagatgccttggagccattgctcagctggttggcagataccgaggagctcatagccaatcagaaacctccatctgctgagtataaagtggtgaaagcacagatccaagaacagaagttgctccagcggctcctagatgatcgaaaggccacagtagacatgcttcaagcagaaggaggcagaatagcccagtcagcagagctggctgatagagagaaaatcactggacagctggagagtcttgaaagtagatggactgaactactcagtaaggcagcagccaggcaaaaacagctggaagacatcctggttctggccaaacagttccatgagacagctgagcctatttctgacttcttatctgtcacagagaaaaagcttgctaactcagaacctgttggcactcagactgccaaaatacagcagcagatcattcggcacaaggctttaaatgaagaaattgttaatagaaagaagaatgtagatcaagctattaaaaatggtcaggctcttctaaaacaaaccacaggtgaggaggtgttacttatccaggaaaaactagatggtataaagactcgttacgcagacatcacagttactagctccaaggccctcagaactttagagcaagcccggcagctggccaccaagttccagtctacttatgaggaactgaccgggtggctgagggaggtggaggaggagctggcaaccagtggaggacagtctcccacaggggaacagataccccagtttcagcagagacagaaggaattaaagaaggaggtcatggagcacaggctggtgttggacacagtgaatgaggtgagccgtgctctcttagagctggtgccctggagagccagagaagggctggataaacttgtgtccgatgctaacgagcagtacaaactagtcagtgacactattggacaaagggtggatgaaattgatgctgctattcagagatcacaacagtatgagcaagctgccgatgcagaactagcttgggttgctgaaacaaaacggaaactgatggctctgggtccaattcgcctggaacaggaccagaccacagctcagcttcaggtacagaaggctttctccattgacattattcgacacaaagattcaatggatgaactcttcagtcaccgtagtgaaatctttggcacatgtggggaggagcaaaaaactgtattacaggaaaagacagagtctctaatacagcaatatgaagccattagcctactcaattcagagcgttatgcccgcctagagcgggcccaggtcttagtaaaccagttttgggaaacttatgaagagctcagcccctggattgaggaaactcgggcactaatagcacagttaccctctccagccattgatcatgagcagctcaggcagcaacaagaggaaatgaggcaattaagggaatctattgctgaacacaaacctcatattgacaaactactaaagataggcccacaactaaaggaattaaaccctgaggaaggggaaatggtggaagaaaaataccagaaagcagaaaacatgtatgcccaaataaaggaggaggtgcgccagcgagccctggctctggatgaagccgtgtcccagtccacacagattacagagtttcatgataaaattgagcctatgttggagacactggagaatctttcctctcgcctgcgtatgccaccactgatccctgctgaagtagacaagatcagagagtgcatcagtgacaataagagtgccaccgtggagctagaaaaactgcagccatcctttgaggccttgaagcgccgtggagaggagcttattggacgatctcagggagcagacaaggatctggctgcaaaagaaatccaggataaattggatcaaatggtattcttctgggaggacatcaaagctcgggctgaagaacgagaaatcaaatttcttgatgtccttgaattagcagagaagttctggtatgacatggcagctctcctgaccaccatcaaagacacccaggatattgtccatgacttggaaagcccaggcattgatccttccatcatcaaacaacaggttgaagctgctgagactattaaggaagagacagatggtctgcatgaagagctggagtttattcggatccttggagcagatttgatttttgcctgtggagaaactgagaagcctgaagtgaggaagagcattgatgagatgaataatgcttgggagaacttaaacaaaacatggaaagagaggctagaaaaacttgaggatgctatgcaagctgctgtgcagtatcaggacactcttcaggctatgtttgactggctagataacactgtgattaaactctgcaccatgccccctgttggcactgacctcaatactgttaaagatcagttaaatgaaatgaaggagttcaaagtagaagtttaccaacagcaaattgagatggagaagcttaatcaccagggtgaactgatgttaaagaaagctactgatgagacggacagagacattatacgagaaccactgacagaactcaaacacctctgggagaacctgggtgagaaaattgcccaccgacagcacaaactagaaggggctctgttggcccttggtcagttccagcatgccttagaggaactaatgagttggctgactcataccgaagagttgttagatgctcagagaccaataagtggagacccaaaagtcattgaagttgagctcgcaaagcaccatgtcctaaaaaatgatgttttggctcatcaagccacagtggaaacagtcaacaaagctggcaatgagcttcttgaatccagtgctggagatgatgccagcagcttaaggagccgtttggaagccatgaaccaatgctgggagtcagtgttacagaaaacagaggagagggagcagcagcttcagtcaactctgcagcaggcccagggcttccacagtgaaattgaagatttcctcttggaacttactagaatggagagccagctttctgcatctaagcccacaggaggacttcctgaaactgctagggaacagcttgatacacatatggaactctattcccagctgaaagccaaggaagagacttataatcaactacttgacaagggcagactcatgcttctaagccgtgacgactctgggtctggctccaagacagaacagagtgtagcacttttggagcagaagtggcatgtggtcagcagtaagatggaagaaagaaagtcaaagctggaagaggccctcaacttggcaacagaattccagaattccctacaagaatttatcaactggctcactctagcagagcagagtttaaacatcgcttctccaccaagcctgattctaaatactgtcctttcccagatagaagagcacaaggtttttgctaatgaagtaaatgctcatcgagaccagatcattgagctggatcaaactgggaatcaattaaagttccttagccaaaagcaggatgttgttctgatcaagaatttgttggtgagcgtgcagtctcgatgggagaaggttgtccagcgatctattgaaagagggcgatcactagatgatgccaggaagcgggcaaaacaattccatgaagcttggaaaaaactgattgactggctagaagatgcagagagtcacctggactcagaactagagatatccaatgacccagacaaaattaaacttcagctttctaagcataaggagtttcagaagactcttggtggcaagcagcctgtgtatgataccacaattagaactggcagagcactgaaagaaaagactttgcttcccgaagatagtcagaaacttgacaatttcctaggagaagtcagagacaaatgggatactgtttgtggcaagtctgtggagcggcagcacaagttggaggaagccctgctcttttcgggtcagttcatggatgctttgcaggcattggttgactggttatacaaggtggagccacagctggctgaggaccagcccgtgcacggggaccttgacctcgtcatgaacctcatggatgcacacaaggttttccagaaggaactgggaaagcgaacaggaaccgttcaggtcctgaagcggtcaggccgagagctgattgagaatagtcgagatgacaccacttgggtaaaaggacagctccaggaactgagcactcgctgggacactgtctgtaaactctctgtttccaaacaaagccggcttgagcaggccttaaaacaagcggaagtgtttcgagacacagtccacatgctgttggagtggctttctgaagcagagcaaacgcttcgctttcggggagcacttcctgatgacacagaggccctgcagtctctcattgacacccataaggaattcatgaagaaagtagaagaaaagcgagtggacgttaactcagcagtagccatgggagaagtcatcctggctgtctgccaccccgattgcatcacaaccatcaaacactggatcaccatcatccgagctcgcttcgaggaggtcctgacatgggctaagcagcaccagcagcgtcttgaaacggccttgtcagaactggtggctaatgctgagctcctggaagaacttctggcatggatccagtgggctgagaccaccctcattcagcgggatcaggagccaatcccgcagaacattgaccgagttaaagcccttatcgctgagcatcagacatttatggaggagatgactcgcaaacagcctgacgtggaccgggtcaccaagacatacaaaaggaaaaacatagagcctactcacgcgcctttcatagagaaatcccgcagcggaggcaggaaatccctaagtcagccaacccctcctcccatgccaatcctttcacagtctgaagcaaaaaacccacggatcaaccagctttctgcccgctggcagcaggtgtggctgttagcactggagcggcaaaggaaactgaatgatgccttggatcggctggaggagttgaaagaatttgccaactttgactttgatgtctggaggaaaaagtatatgcgttggatgaatcacaaaaagtctcgagtgatggatttcttccggcgcattgataaggaccaggatgggaagataacacgtcaggagtttatcgatggcattttagcatccaagttccccaccaccaagttagagatgactgctgtggctgacattttcgaccgagatggggatggttacattgattattatgaatttgtggctgctcttcatcccaacaaggatgcgtatcgaccaacaaccgatgcagataaaatcgaagatgaggttacaagacaagtggctcagtgcaaatgtgcaaaaaggtttcaggtggagcagatcggagagaataaataccggtttggggattctcagcagttgcggctggtccgtattctgcgcagcaccgtgatggttcgcgttggtggaggatggatggccttggatgaatttttagtgaaaaatgatccctgccgagcacgaggtagaactaacattgaacttagagagaaattcatcctaccagagggagcatcccagggaatgacccccttccgctcacggggtcgaaggtccaaaccatcttcccgggcagcttcccctactcgttccagctccagtgctagtcagagtaaccacagctgtacatccatgccatcttctccagccaccccagccagtggaaccaaggttatcccatcatcaggtagcaagttgaaacgaccaacaccaacttttcattctagtcggacatcccttgctggtgataccagcaatagttcttccccggcctccacaggtgccaaaactaatcgggcagaccctaaaaagtctgccagtcgccctgggagtcgggctgggagtcgagccgggagtcgagccagcagccggcgaggaagtgacgcttctgactttgacctcttagagacgcagtctgcttgttccgacacttcagaaagcagcgctgcagggggccaaggcaactccaggagagggctaaacaaaccttccaaaatcccaaccatgtctaagaagaccaccactgcctcccccaggactccaggtcccaagcgataacactgtctaagcacccccaagccactatccactttgaatcctgctccatacattgggtgtatatttattctgaacgggagaagttatattgttaaaagtgtaaaagaataattgtgttatgaagctgccttattttttttctttttgtaagttactattttcatgtgaatatttatgtagataaaatttgcctcctggtaaccctgtaatggatggggcccagaaatgaaatatttgagaaaaacaagtgaaaaggtcaagatacaaatgtgtattaaaaaaaaaaaagcctattaatagggtttctgcgcggtgcagggttgtaaacctgctttatcttttaggattattcctaaatgcatcttctttataaacttgacttgctatctcagcaagataaattatattaaaaaaataagaatcctgcagtgtttaaggaactctttttttgtaaatcacggacacctcaattagcaagaactgaggggagggctttttccattgtttaatgttttgtgatttttagctaaagagagggaacctcatctaagtaacatttgcacatgatacagcaaaaggagttcattgcaatactgtctttggatattgtttcagtactgggtgtttaaaggacaaatagctgctagaattcaggggtaaatgtaagtgttcagaaaacgtcagaacatttggggttttaaactgatttgttgctccctatccagcctagacaccagtaactcttgtgttcaccaggacccagacccttggcaagggataggctcgttggtgacattgtgaatttcagatttgttttatccactttttttgctatttatttaaatggtcgatcaacttcccacaaactgaggaatgaattccacgagcctgttctgaaaatgtggacgtaagacaaacacgtgctcgtcctttaatggagttcaccagcacacttgttaaccagtcctgtttgctttcgtctttttttgtgcgtaataaagtcaactgaccaagtgaccatgaaaaggggctgtctggggctcctgttttttagctgctgttcttcagctccgaccatgttgctgtgtgattatctcaattggttttaattgaggcagaaactgaagctctaccaatgaactgtttagaaacaagacacacttttgtattaaaattgcttgcagta

SEQ ID NO: 153899 - DNA, 14496 bp, Homo sapiens
  Payload ID: 10253
  Gene Symbol: MACF1
  Gene Name: microtubule-actin crosslinking factor 1
  ENST ID: ENST00000372925
  CDS Start-End: 1-13303
aaagaacaccatttctgtcaaggctgtctgtgactacaggcagatcgagattactatttgcaaaaatgatgaatgtgtgctagaagataattctcagcggaccaaatggaaagtgatcagccccacagggaacgaggcaatggtgccgtcagtctgcttcctcatccccccacccaataaggatgccattgagatggccagcagggtcgaacaatcttatcagaaggttatggccctttggcatcagctgcatgttaacaccaaaagccttatctcttggaactatctgcgtaaagaccttgaccttgtacagacctggaacctagaaaagcttcgatcctcagcaccaggggagtgccatcagattatgaagaaccttcaggcccactatgaagactttctgcaggatagtcgtgactctgtgctgttctcagtggctgatcgcttgcgcttggaagaggaggtggaagcttgtaaagcccgcttccagcacctgatgaagtccatggagaatgaggacaaagaggagactgtggccaagatgtacatttcagagttgaagaacatccggctacgcctggaggagtatgaacagagggtggtcaaacgaattcagtctctagccagctctaggactgacagagatgcctggcaggacaatgcattaaggattgcagagcaagagcacacccaggaggatttacagcaattgaggtcagacttggatgcagtttctatgaaatgtgacagctttctccatcagtctccatctagttcaagtgtcccaactctgcgctcagaactgaatctgctggtggagaagatggaccatgtctatggtctctctactgtatatctgaataagttaaagacagttgatgttatagtacgtagcatacaggatgctgaactcttggtcaaaggttatgagattaagctgagtcaagaagaagtagtactggcagatctctcagctctggaggcccattggtcgacattacggcactggcttagtgatgtgaaggacaagaattcagtgttttcagtcctggatgaggaaattgccaaggccaaggtagtggcagagcagatgagtcgtctgacaccagagcgaaatctggatttggagcgctatcaggaaaaaggctcccagctgcaggagcgttggcaccgagtcattgcccagctcgagattcgccaatctgagctagaaagtatccaggaagttctgggagattaccgagcctgccatggaactctcatcaagtggattgaggaaaccactgcccagcaggaaatgatgaagccaggccaggcagaggatagcagagtgctttcggagcagctcagccagcagacggccctatttgcagaaattgagagaaatcagacaaaactggatcaatgtcaaaaattttcccagcagtactctactattgtaaaggactatgaattgcaactgatgacatacaaggcctttgtggaatcgcagcagaaatcccctggcaagcgccgtcgcatgctttcctcttcagatgccatcactcaagagttcatggacttaaggactcgctacacggcattggtgactttaacaactcagcacgtgaaatacatcagtgatgcactccggcgtctggaggaggaggagaaagtggtagaagaggagaaacaagaacatgtggagaaggttaaagaacttttgggctgggtgtctaccctagcgaggaatacacaaggaaaagctacctcatccgagaccaaagaatcaacagacattgaaaaagctattttggaacagcaggttctgtcagaagagctgacaacaaagaaagaacaagtctctgaagctattaaaacatcacagatcttcttggccaagcatggtcataagctctcagaaaaagagaagaaacaaatatctgagcaattgaatgccctaaacaaggcttaccatgacctttgtgatggttctgcaaatcagcttcagcagcttcagagccagttggctcaccagacagaacaaaagaccctgcagaaacaacaaaatacctgtcaccagcaactggaggatctttgcagttgggtaggacaggcagaaagagcactggcaggccaccaaggcagaaccacccagcaggatctctctgctttgcagaagaaccaaagtgacttgaaggatttacaggatgacattcagaatcgtgccacctcatttgccactgttgtcaaggacattgaggggttcatggaagagaatcagaccaagctgagcccacgtgagttgacagctcttcgggaaaagcttcatcaggctaaggagcaatatgaggcgctccaggaagagacacgtgtggcccagaaggaactggaggaagcagtgacctccgccttacagcaggagactgaaaagagtaaagcagcaaaggaactggcagagaacaagaagaagatcgatgctctcctggattgggtaacttcagtaggatcatctggtggacagctgctgaccaaccttccaggaatggagcagctctcgggagctagcttggagaaaggagccttggacaccactgatggttacatgggggtgaatcaagccccagagaaactggacaagcaatgtgagatgatgaaggcccgtcaccaagaattgctgtcccagcagcaaaatttcattctggccacccagtcagctcaggccttcttggatcagcatggccacaatctcacacctgaggagcaacagatgctgcaacagaagctgggagagctaaaggaacaatactctacttccctggcccaatcagaggcagaactgaagcaggtgcagacacttcaggatgagttgcagaaatttctgcaggatcataaagagtttgaaagctggttggaacgatccgagaaagagctggagaacatgcataagggaggcagcagccccgagacccttccctccctgctaaagcggcaaggaagcttctcagaggatgtcatttcccacaaaggagacttgagatttgtgactatctcaggacagaaagtcttggacatggaaaacagttttaaggaaggcaaagaaccatcagaaattggaaacttagtaaaggacaagttgaaggatgcaacagaaagatacactgctctccactcaaagtgtacacgattaggatctcacctgaatatgctgttaggccagtatcatcaattccaaaacagtgctgacagcctgcaggcctggatgcaggcttgtgaggccaacgtggagaagctcctctcagatactgttgcctctgaccctggagttctccaggagcagcttgcaacaacaaagcagttgcaggaggaattggctgagcaccaagtacctgtggaaaaactccaaaaagtagctcgtgacataatggaaattgaaggggagccagccccagaccacaggcatgttcaagaaactacagattccatactcagccacttccaaagcctctcctatagcctggctgagcgatcttctctgctgcagaaagcaattgcccaatctcagagtgtccaggaaagcctggagagcctgttgcagtctattggggaagttgaacaaaacctggaagggaagcaggtgtcatcactctcatcaggagtcatccaggaagccttagccacaaatatgaaattgaagcaggacattgctcggcaaaagagcagcttggaggccacccgtgagatggtgacccgattcatggagacagcagacagtactacagcagcagtgctgcagggcaaactggcagaggtgagccagcggttcgaacagctctgtctacagcagcaagaaaaggagagctccctaaagaagcttctaccccaggcagagatgtttgaacacctctctggtaagctgcagcagttcatggaaaacaaaagtcggatgctggcctctggaaatcagccagatcaagatattacacatttcttccaacagatccaggagctcaatttggaaatggaagaccaacaggagaacctagatactcttgagcacctggtcactgaactgagctcttgtggctttgcgctggacttgtgccagcatcaggacagggtacagaatctaagaaaagacttcacagagctacagaagacagttaaagagagagagaaagatgcatcatcttgccaggaacagttggatgaattccggaagctggtcaggaccttccagaaatggttgaaagaaactgaagggagtattccacctacggaaacttctatgagtgctaaagagttagaaaagcagattgaacacctgaagagtctactagatgactgggcaagtaagggaactctggtggaagaaatcaattgcaaaggtacttctttagaaaatctcatcatggaaatcacagcacctgattcccaaggcaagacagatctgacggagatccagtgtgacatgtcagatgtaaacttgaagtatgagaaactagggggagtacttcatgaacgccaggaaagccttcaggctatcctcaacagaatggaggaggttcacaaggaggcaaactctgtgctgcagtggctggaatcaaaagaggaagtcctgaaatccatggatgccatgtcatctccaaccaagacagaaacagtgaaagcccaagctgaatctaacaaggccttcctggctgagttggaacagaattctccaaaaattcaaaaagtaaaggaagccctggctggattactggtgacatatcccaactcacaggaagcagaaaattggaagaaaattcaggaagaactcaattcccgatgggaaagggccactgaggttactgtggctcggcaaaggcagctagaggaatctgcaagtcatctggcctgcttccaggctgcagaatcccagctccggccgtggctgatggagaaagaactgatgatgggagtgctggggcccctgtctattgaccccaacatgttgaatgcacaaaagcaacaggtccagtttatgctaaaggaatttgaagcacgcaggcaacagcatgagcaactgaatgaggcagctcagggcatcctaacaggccctggagatgtctctctgtccaccagccaagtacagaaagaactccagagcatcaatcagaaatgggttgagctgactgacaaactcaactcccgttccagccaaattgaccaagctattgttaagagcacccagtaccaggaactgctccaggacttatcagagaaggtgagggcagttggacaacggctgagtgtccagtcagctatcagcacccaaccagaggctgtaaagcagcaattggaagagaccagtgaaattcgatctgacttggagcagttagaccacgaggttaaggaggctcagacactgtgcgatgaactctcagtgctcattggtgagcagtacctcaaggatgaactgaagaagcgtttggagacagttgccctgcctctccaaggtttagaagaccttgcagccgatcgcattaacagactccaggcagctcttgccagcacccagcagttccagcaaatgtttgatgagttgaggacctggttggatgataaacaaagccagcaagcaaaaaactgcccaatttctgcaaaattggagcggctacagtctcagctacaggagaatgaagagtttcagaaaagtcttaatcaacacagtggctcctatgaggtgattgtggctgaaggggaatctctacttctttctgtacctcctggagaagagaaaaggactctacaaaaccagttggttgagctcaaaaaccattgggaagagcttagtaaaaaaactgcagacagacaatccaggctcaaggattgtatgcagaaagctcagaaatatcagtggcatgtggaagaccttgtgccatggatagaagattgtaaagctaagatgtctgagttgcgagtcactctggatccagtgcagctagagtccagtctcctaagatcaaaggctatgctgaatgaggtggagaagcgccgctccctgctggaaatattgaatagtgctgctgacattctgatcaattcttcagaagcagatgaggatggaatccgggatgagaaggctgggatcaaccagaacatggatgctgttacagaagagctgcaggccaaaacagggtcactcgaagaaatgactcagaggctcagggagttccaggaaagctttaagaatattgaaaagaaggttgaaggagccaaacaccaacttgagatctttgatgctctgggttctcaagcctgtagcaacaagaacctggagaagctaagagctcaacaggaagtgctgcaggccctagagcctcaggtagactatctgaggaactttactcagggtctggtagaagatgccccagatggatctgatgcttctcaacttctccaccaagctgaggtcgcccagcaagagttcctcgaagttaagcaaagagtgaacagtggttgtgtgatgatggaaaacaagctggaggggattggccagtttcactgccgggtccgagagatgttctctcaattggcagacctggatgatgagctagatggcatgggtgctattggcagagacactgatagcctccagtcccaaatcgaggatgtccggctattccttaacaaaattcacgtcctcaaattagacatagaggcctctgaagcagagtgtcgacatatgctagaagaagaggggactctggatttgttaggtctcaaaagggagctagaagccctgaacaaacagtgtggcaaactgacagagagggggaaagctcgtcaggaacagctggaactgacactaggccgtgtagaggacttctacaggaaattgaaaggactcaatgacgcgaccacagcagcagaggaggcagaggccctccagtgggtagtggggaccgaagtggaaatcatcaaccaacaattagcagattttaaaatgtttcagaaagaacaagtggatcctcttcagatgaaattgcagcaggtgaatggacttggccagggattaattcagagtgcaggaaaagactgtgatgtacagggtttagaacatgacatggaagagatcaatgctcgatggaatacattgaataaaaaggtcgcacaaagaattgcacagctacaggaagctttgttgcattgtgggaagtttcaagatgccttggagccattgctcagctggttggcagataccgaggagctcatagccaatcagaaacctccatctgctgagtataaagtggtgaaagcacagatccaagaacagaagttgctccagcggctcctagatgatcgaaaggccacagtagacatgcttcaagcagaaggaggcagaatagcccagtcagcagagctggctgatagagagaaaatcactggacagctggagagtcttgaaagtagatggactgaactactcagtaaggcagcagccaggcaaaaacagctggaagacatcctggttctggccaaacagttccatgagacagctgagcctatttctgacttcttatctgtcacagagaaaaagcttgctaactcagaacctgttggcactcagactgccaaaatacagcagcagatcattcggcacaaggctttaaatgaagaaattgttaatagaaagaagaatgtagatcaagctattaaaaatggtcaggctcttctaaaacaaaccacaggtgaggaggtgttacttatccaggaaaaactagatggtataaagactcgttacgcagacatcacagttactagctccaaggccctcagaactttagagcaagcccggcagctggccaccaagttccagtctacttatgaggaactgaccgggtggctgagggaggtggaggaggagctggcaaccagtggaggacagtctcccacaggggaacagataccccagtttcagcagagacagaaggaattaaagaaggaggtcatggagcacaggctggtgttggacacagtgaatgaggtgagccgtgctctcttagagctggtgccctggagagccagagaagggctggataaacttgtgtccgatgctaacgagcagtacaaactagtcagtgacactattggacaaagggtggatgaaattgatgctgctattcagagatcacaacagtatgagcaagctgccgatgcagaactagcttgggttgctgaaacaaaacggaaactgatggctctgggtccaattcgcctggaacaggaccagaccacagctcagcttcaggtacagaaggctttctccattgacattattcgacacaaagattcaatggatgaactcttcagtcaccgtagtgaaatctttggcacatgtggggaggagcaaaaaactgtattacaggaaaagacagagtctctaatacagcaatatgaagccattagcctactcaattcagagcgttatgcccgcctagagcgggcccaggtcttagtaaaccagttttgggaaacttatgaagagctcagcccctggattgaggaaactcgggcactaatagcacagttaccctctccagccattgatcatgagcagctcaggcagcaacaagaggaaatgaggcaattaagggaatctattgctgaacacaaacctcatattgacaaactactaaagataggcccacaactaaaggaattaaaccctgaggaaggggaaatggtggaagaaaaataccagaaagcagaaaacatgtatgcccaaataaaggaggaggtgcgccagcgagccctggctctggatgaagccgtgtcccagtccacacagattacagagtttcatgataaaattgagcctatgttggagacactggagaatctttcctctcgcctgcgtatgccaccactgatccctgctgaagtagacaagatcagagagtgcatcagtgacaataagagtgccaccgtggagctagaaaaactgcagccatcctttgaggccttgaagcgccgtggagaggagcttattggacgatctcagggagcagacaaggatctggctgcaaaagaaatccaggataaattggatcaaatggtattcttctgggaggacatcaaagctcgggctgaagaacgagaaatcaaatttcttgatgtccttgaattagcagagaagttctggtatgacatggcagctctcctgaccaccatcaaagacacccaggatattgtccatgacttggaaagcccaggcattgatccttccatcatcaaacaacaggttgaagctgctgagactattaaggaagagacagatggtctgcatgaagagctggagtttattcggatccttggagcagatttgatttttgcctgtggagaaactgagaagcctgaagtgaggaagagcattgatgagatgaataatgcttgggagaacttaaacaaaacatggaaagagaggctagaaaaacttgaggatgctatgcaagctgctgtgcagtatcaggacactcttcaggctatgtttgactggctagataacactgtgattaaactctgcaccatgccccctgttggcactgacctcaatactgttaaagatcagttaaatgaaatgaaggagttcaaagtagaagtttaccaacagcaaattgagatggagaagcttaatcaccagggtgaactgatgttaaagaaagctactgatgagacggacagagacattatacgagaaccactgacagaactcaaacacctctgggagaacctgggtgagaaaattgcccaccgacagcacaaactagaaggggctctgttggcccttggtcagttccagcatgccttagaggaactaatgagttggctgactcataccgaagagttgttagatgctcagagaccaataagtggagacccaaaagtcattgaagttgagctcgcaaagcaccatgtcctaaaaaatgatgttttggctcatcaagccacagtggaaacagtcaacaaagctggcaatgagcttcttgaatccagtgctggagatgatgccagcagcttaaggagccgtttggaagccatgaaccaatgctgggagtcagtgttacagaaaacagaggagagggagcagcagcttcagtcaactctgcagcaggcccagggcttccacagtgaaattgaagatttcctcttggaacttactagaatggagagccagctttctgcatctaagcccacaggaggacttcctgaaactgctagggaacagcttgatacacatatggaactctattcccagctgaaagccaaggaagagacttataatcaactacttgacaagggcagactcatgcttctaagccgtgacgactctgggtctggctccaagacagaacagagtgtagcacttttggagcagaagtggcatgtggtcagcagtaagatggaagaaagaaagtcaaagctggaagaggccctcaacttggcaacagaattccagaattccctacaagaatttatcaactggctcactctagcagagcagagtttaaacatcgcttctccaccaagcctgattctaaatactgtcctttcccagatagaagagcacaaggtttttgctaatgaagtaaatgctcatcgagaccagatcattgagctggatcaaactgggaatcaattaaagttccttagccaaaagcaggatgttgttctgatcaagaatttgttggtgagcgtgcagtctcgatgggagaaggttgtccagcgatctattgaaagagggcgatcactagatgatgccaggaagcgggcaaaacaattccatgaagcttggaaaaaactgattgactggctagaagatgcagagagtcacctggactcagaactagagatatccaatgacccagacaaaattaaacttcagctttctaagcataaggagtttcagaagactcttggtggcaagcagcctgtgtatgataccacaattagaactggcagagcactgaaagaaaagactttgcttcccgaagatagtcagaaacttgacaatttcctaggagaagtcagagacaaatgggatactgtttgtggcaagtctgtggagcggcagcacaagttggaggaagccctgctcttttcgggtcagttcatggatgctttgcaggcattggttgactggttatacaaggtggagccacagctggctgaggaccagcccgtgcacggggaccttgacctcgtcatgaacctcatggatgcacacaaggttttccagaaggaactgggaaagcgaacaggaaccgttcaggtcctgaagcggtcaggccgagagctgattgagaatagtcgagatgacaccacttgggtaaaaggacagctccaggaactgagcactcgctgggacactgtctgtaaactctctgtttccaaacaaagccggcttgagcaggccttaaaacaagcggaagtgtttcgagacacagtccacatgctgttggagtggctttctgaagcagagcaaacgcttcgctttcggggagcacttcctgatgacacagaggccctgcagtctctcattgacacccataaggaattcatgaagaaagtagaagaaaagcgagtggacgttaactcagcagtagccatgggagaagtcatcctggctgtctgccaccccgattgcatcacaaccatcaaacactggatcaccatcatccgagctcgcttcgaggaggtcctgacatgggctaagcagcaccagcagcgtcttgaaacggccttgtcagaactggtggctaatgctgagctcctggaagaacttctggcatggatccagtgggctgagaccaccctcattcagcgggatcaggagccaatcccgcagaacattgaccgagttaaagcccttatcgctgagcatcagacatttatggaggagatgactcgcaaacagcctgacgtggaccgggtcaccaagacatacaaaaggaaaaacatagagcctactcacgcgcctttcatagagaaatcccgcagcggaggcaggaaatccctaagtcagccaacccctcctcccatgccaatcctttcacagtctgaagcaaaaaacccacggatcaaccagctttctgcccgctggcagcaggtgtggctgttagcactggagcggcaaaggaaactgaatgatgccttggatcggctggaggagttgaaagaatttgccaactttgactttgatgtctggaggaaaaagtatatgcgttggatgaatcacaaaaagtctcgagtgatggatttcttccggcgcattgataaggaccaggatgggaagataacacgtcaggagtttatcgatggcattttagcatccaagttccccaccaccaagttagagatgactgctgtggctgacattttcgaccgagatggggatggttacattgattattatgaatttgtggctgctcttcatcccaacaaggatgcgtatcgaccaacaaccgatgcagataaaatcgaagatgaggttacaagacaagtggctcagtgcaaatgtgcaaaaaggtttcaggtggagcagatcggagagaataaataccggtttggggattctcagcagttgcggctggtccgtattctgcgcagcaccgtgatggttcgcgttggtggaggatggatggccttggatgaatttttagtgaaaaatgatccctgccgagcacgaggtagaactaacattgaacttagagagaaattcatcctaccagagggagcatcccagggaatgacccccttccgctcacggggtcgaaggtccaaaccatcttcccgggcagcttcccctactcgttccagctccagtgctagtcagagtaaccacagctgtacatccatgccatcttctccagccaccccagccagtggaaccaaggttatcccatcatcaggtagcaagttgaaacgaccaacaccaacttttcattctagtcggacatcccttgctggtgataccagcaatagttcttccccggcctccacaggtgccaaaactaatcgggcagaccctaaaaagtctgccagtcgccctgggagtcgggctgggagtcgagccgggagtcgagccagcagccggcgaggaagtgacgcttctgactttgacctcttagagacgcagtctgcttgttccgacacttcagaaagcagcgctgcagggggccaaggcaactccaggagagggctaaacaaaccttccaaaatcccaaccatgtctaagaagaccaccactgcctcccccaggactccaggtcccaagcgataacactgtctaagcacccccaagccactatccactttgaatcctgctccatacattgggtgtatatttattctgaacgggagaagttatattgttaaaagtgtaaaagaataattgtgttatgaagctgccttattttttttctttttgtaagttactattttcatgtgaatatttatgtagataaaatttgcctcctggtaaccctgtaatggatggggcccagaaatgaaatatttgagaaaaacaagtgaaaaggtcaagatacaaatgtgtattaaaaaaaaaaaagcctattaatagggtttctgcgcggtgcagggttgtaaacctgctttatcttttaggattattcctaaatgcatcttctttataaacttgacttgctatctcagcaagataaattatattaaaaaaataagaatcctgcagtgtttaaggaactctttttttgtaaatcacggacacctcaattagcaagaactgaggggagggctttttccattgtttaatgttttgtgatttttagctaaagagagggaacctcatctaagtaacatttgcacatgatacagcaaaaggagttcattgcaatactgtctttggatattgtttcagtactgggtgtttaaaggacaaatagctgctagaattcaggggtaaatgtaagtgttcagaaaacgtcagaacatttggggttttaaactgatttgttgctccctatccagcctagacaccagtaactcttgtgttcaccaggacccagacccttggcaagggataggctcgttggtgacattgtgaatttcagatttgttttatccactttttttgctatttatttaaatggtcgatcaacttcccacaaactgaggaatgaattccacgagcctgttctgaaaatgtggacgtaagacaaacacgtgctcgtcctttaatggagttcaccagcacacttgttaaccagtcctgtttgctttcgtctttttttgtgcgtaataaagtcaactgaccaagtgaccatgaaaaggggctgtctggggctcctgttttttagctgctgttcttcagctccgaccatgttgctgtgtgattatctcaattggttttaattgaggcagaaactgaagctctaccaatgaactgtttagaaacaagacacacttttgtattaaaattgcttgcagtaacaaata

SEQ ID NO: 153900 - DNA, 2559 bp, Homo sapiens
  Payload ID: 10253
  Gene Symbol: MACF1
  Gene Name: microtubule-actin crosslinking factor 1
  ENST ID: ENST00000446276
  CDS Start-End: 1-1366
aatcctttcacagtctgaagcaaaaaacccacggatcaaccagctttctgcccgctggcagcaggtgtggctgttagcactggagcggcaaaggaaactgaatgatgccttggatcggctggaggagttgaaagaatttgccaactttgactttgatgtctggaggaaaaagtatatgcgttggatgaatcacaaaaagtctcgagtgatggatttcttccggcgcattgataaggaccaggatgggaagataacacgtcaggagtttatcgatggcattttagcatccaagttccccaccaccaagttagagatgactgctgtggctgacattttcgaccgagatggggatggttacattgattattatgaatttgtggctgctcttcatcccaacaaggatgcgtatcgaccaacaaccgatgcagataaaatcgaagatgaggttacaagacaagtggctcagtgcaaatgtgcaaaaaggtttcaggtggagcagatcggagagaataaataccggttcttcctcggcaatcagtttggggattctcagcagttgcggctggtccgtattctgcgcagcaccgtgatggttcgcgttggtggaggatggatggccttggatgaatttttagtgaaaaatgatccctgccgagcacgaggtagaactaacattgaacttagagagaaattcatcctaccagagggagcatcccagggaatgacccccttccgctcacggggtcgaaggtccaaaccatcttcccgggcagcttcccctactcgttccagctccagtgctagtcagagtaaccacagctgtacatccatgccatcttctccagccaccccagccagtggaaccaagacttcacttcagttctctcgctgttatgacaaaccctggttggtaaacagtaaagctggcacccctatcagggacagccattctcctgacctccagctgcccacccccgaggttatcccatcatcaggtagcaagttgaaacgaccaacaccaacttttcattctagtcggacatcccttgctggtgataccagcaatagttcttccccggcctccacaggtgccaaaactaatcgggcagaccctaaaaagtctgccagtcgccctgggagtcgggctgggagtcgagccgggagtcgagccagcagccggcgaggaagtgacgcttctgactttgacctcttagagacgcagtctgcttgttccgacacttcagaaagcagcgctgcagggggccaaggcaactccaggagagggctaaacaaaccttccaaaatcccaaccatgtctaagaagaccaccactgcctcccccaggactccaggtcccaagcgataacactgtctaagcacccccaagccactatccactttgaatcctgctccatacattgggtgtatatttattctgaacgggagaagttatattgttaaaagtgtaaaagaataattgtgttatgaagctgccttattttttttctttttgtaagttactattttcatgtgaatatttatgtagataaaatttgcctcctggtaaccctgtaatggatggggcccagaaatgaaatatttgagaaaaacaagtgaaaaggtcaagatacaaatgtgtattaaaaaaaaaaaagcctattaatagggtttctgcgcggtgcagggttgtaaacctgctttatcttttaggattattcctaaatgcatcttctttataaacttgacttgctatctcagcaagataaattatattaaaaaaataagaatcctgcagtgtttaaggaactctttttttgtaaatcacggacacctcaattagcaagaactgaggggagggctttttccattgtttaatgttttgtgatttttagctaaagagagggaacctcatctaagtaacatttgcacatgatacagcaaaaggagttcattgcaatactgtctttggatattgtttcagtactgggtgtttaaaggacaaatagctgctagaattcaggggtaaatgtaagtgttcagaaaacgtcagaacatttggggttttaaactgatttgttgctccctatccagcctagacaccagtaactcttgtgttcaccaggacccagacccttggcaagggataggctcgttggtgacattgtgaatttcagatttgttttatccactttttttgctatttatttaaatggtcgatcaacttcccacaaactgaggaatgaattccacgagcctgttctgaaaatgtggacgtaagacaaacacgtgctcgtcctttaatggagttcaccagcacacttgttaaccagtcctgtttgctttcgtctttttttgtgcgtaataaagtcaactgaccaagtgaccatgaaaaggggctgtctggggctcctgttttttagctgctgttcttcagctccgaccatgttgctgtgtgattatctcaattggttttaattgaggcagaaactgaagctctaccaatgaactgtttagaaacaagacacacttttgtattaaaattgcttgcagtaacaaata

SEQ ID NO: 153901 - DNA, 2299 bp, Homo sapiens
  Payload ID: 10253
  Gene Symbol: MACF1
  Gene Name: microtubule-actin crosslinking factor 1
  ENST ID: ENST00000442046
  CDS Start-End: 1-1106
atgggaagataacacgtcaggagtttatcgatggcattttagcatccaagttccccaccaccaagttagagatgactgctgtggctgacattttcgaccgagatggggatggttacattgattattatgaatttgtggctgctcttcatcccaacaaggatgcgtatcgaccaacaaccgatgcagataaaatcgaagatgaggttacaagacaagtggctcagtgcaaatgtgcaaaaaggtttcaggtggagcagatcggagagaataaataccggtttggggattctcagcagttgcggctggtccgtattctgcgcagcaccgtgatggttcgcgttggtggaggatggatggccttggatgaatttttagtgaaaaatgatccctgccgagcacgaggtagaactaacattgaacttagagagaaattcatcctaccagagggagcatcccagggaatgacccccttccgctcacggggtcgaaggtccaaaccatcttcccgggcagcttcccctactcgttccagctccagtgctagtcagagtaaccacagctgtacatccatgccatcttctccagccaccccagccagtggaaccaagacttcacttcagttctctcgctgttatgacaaaccctggttggtaaacagtaaagctggcacccctatcagggacagccattctcctgacctccagctgcccacccccgaggttatcccatcatcaggtagcaagttgaaacgaccaacaccaacttttcattctagtcggacatcccttgctggtgataccagcaatagttcttccccggcctccacaggtgccaaaactaatcgggcagaccctaaaaagtctgccagtcgccctgggagtcgggctgggagtcgagccgggagtcgagccagcagccggcgaggaagtgacgcttctgactttgacctcttagagacgcagtctgcttgttccgacacttcagaaagcagcgctgcagggggccaaggcaactccaggagagggctaaacaaaccttccaaaatcccaaccatgtctaagaagaccaccactgcctcccccaggactccaggtcccaagcgataacactgtctaagcacccccaagccactatccactttgaatcctgctccatacattgggtgtatatttattctgaacgggagaagttatattgttaaaagtgtaaaagaataattgtgttatgaagctgccttattttttttctttttgtaagttactattttcatgtgaatatttatgtagataaaatttgcctcctggtaaccctgtaatggatggggcccagaaatgaaatatttgagaaaaacaagtgaaaaggtcaagatacaaatgtgtattaaaaaaaaaaaagcctattaatagggtttctgcgcggtgcagggttgtaaacctgctttatcttttaggattattcctaaatgcatcttctttataaacttgacttgctatctcagcaagataaattatattaaaaaaataagaatcctgcagtgtttaaggaactctttttttgtaaatcacggacacctcaattagcaagaactgaggggagggctttttccattgtttaatgttttgtgatttttagctaaagagagggaacctcatctaagtaacatttgcacatgatacagcaaaaggagttcattgcaatactgtctttggatattgtttcagtactgggtgtttaaaggacaaatagctgctagaattcaggggtaaatgtaagtgttcagaaaacgtcagaacatttggggttttaaactgatttgttgctccctatccagcctagacaccagtaactcttgtgttcaccaggacccagacccttggcaagggataggctcgttggtgacattgtgaatttcagatttgttttatccactttttttgctatttatttaaatggtcgatcaacttcccacaaactgaggaatgaattccacgagcctgttctgaaaatgtggacgtaagacaaacacgtgctcgtcctttaatggagttcaccagcacacttgttaaccagtcctgtttgctttcgtctttttttgtgcgtaataaagtcaactgaccaagtgaccatgaaaaggggctgtctggggctcctgttttttagctgctgttcttcagctccgaccatgttgctgtgtgattatctcaattggttttaattgaggcagaaactgaagctctaccaatgaactgtttagaaacaagacacacttttgtattaaaattgcttgcagtaacaaata

SEQ ID NO: 153902 - DNA, 477 bp, Homo sapiens
  Payload ID: 10253
  Gene Symbol: MACF1
  Gene Name: microtubule-actin crosslinking factor 1
  ENST ID: ENST00000422234
  CDS Start-End: 1-477
gataaaatcgaagatgaggttacaagacaagtggctcagtgcaaatgtgcaaaaaggtttcaggtggagcagatcggagagaataaataccggtttggggattctcagcagttgcggctggtccgtattctgcgcagcaccgtgatggttcgcgttggtggaggatggatggccttggatgaatttttagtgaaaaatgatccctgccgagttcaccatcctgggagtaaaataaagcgctctgattccagctcttcgatttccagtcagtctcccatagcacgaggtagaactaacattgaacttagagagaaattcatcctaccagagggagcatcccagggaatgacccccttccgctcacggggtcgaaggtccaaaccatcttcccgggcagcttcccctactcgttccagctccagtgctagtcagagtaaccacagctgtacatccatgccatcttctccagccacccca

SEQ ID NO: 153903 - DNA, 7410 bp, Homo sapiens
  Payload ID: 10253
  Gene Symbol: MACF1
  Gene Name: microtubule-actin crosslinking factor 1
  ENST ID: ENST00000530275
  CDS Start-End: 1194-5477
gagcacttccagcgagctagcgagctagcgggtcgcgctgcgcgggggaggaggactcgccccccgcccgaccctagcggagccttttgttcccagccagaagtttgcatgccgggaccgtgacagctgcgggcggggaggacggcggggccgcggggccagcggcgtggtggagaatagaggcggctgcttgtcatgcagcccacggcgtggcggctgcgggccggggactggcggcggcgggcgaggcggcgcccacagcactcgggactcagctgccggagggacaaactaacttcctgagcgcgggacctgaggctggcgcggccgggagccacctgcagcctgcggtgaggcgaccctggccctcggggcgcgcggcatggcgcggggaagcgggccgtgctgagcgagcccctccgacagacccgcggccgctgctgctgcccgcccgcccgcctgcctttccgaaggcctggcgcggggctccgctcgccttgttttgcagctacagcgcagggttggcctgggagccacaacaatgccatgatgttttggagacaggaagccccaagctggccccgaatgaaggacttcctgtgtttaaagttgcaggaatatccgccgaccagcccagttcaaatgcaaacaccccagctagggaggacgaatggctaattcagaccagctggactctccagggctggaactgaggataaaatgaaaggaattcttaggagcttgggccatacttgaagactagagaggctgtgccattgttattaaaggatacaatcggcataaatttgctgctcccaactctgcttcggtgagaagtgagtggaactagatatcgaaaaagactcgtcaatatcagatgatttttgttgactgtatttgaaagagcagtgctcttaaaaaaaattaaaccataagccatacaaggaattattttaaattatatcgtctgtcaaccatgaggctgctagcctgtgaggaaaaagctgtttgtcttagagcttctcccagaatggtttcaaaacggaacttccaggcctttctggagggcagatgcaattggtggtttggggtatgaacagctaaaaggatttataacttatgtagaatgcatttggggggaacctgtgaaaaatacttttgaaagattgatggttcatcttgattgaaaaaggatgggtaagccactcagcagaccagactgtttaaggcggaaccccagctgcctggggaaaggagaggaggaggatggctacatagaggactgctatgttccacaacggtctatatatgatacgatgaggataaatgagcaaattgaccaggggtcaaagcttaaccagacttcaaaaagcaccatggaaaagatggaaggaagtactatatccagcaatggtacattaggagcagcatctaatgtttttgaatctagagcaccagaaggtaagaagctggatgagaggataatatttgatgcactaaagctaagcagtgatgtgcagaagtcagcacctgtgccacccagaaggcggccaaatgcagaacgcaaagacaatgttaacaggagatcgtggaagtccttcatgccacccaacttcccagaatttgcagagaggatagaagcttctctcagtgaggtttcagaagctggtgcttcaaatccttccttgcaagagaagaaggagtccagttctgcattaacagaaagttctggtcatttggaccacagggaacctcagtcagagtcagtaactctggaacatgtgtccaaatccataggtattccagaggtgcaagattttaaaaacttaagtggagactgccaggactttagatttcagcagcacagtgcaaaccctcctcatgaattccagcctgtagaatcagaagctgtagcaacaagtggtaacacagatgtaatgcaggaatccagattctcaagtgcaacctggccgagggccacaaaaagtttagctaagggaggcttcagtgagaagcagcacccccttggggacacagcctgcactgtggaaatgccacctctctccccttgcctgagtgaagagctgttagatccagaattgcatgttctcataacccccagcctgagagagaaaacagagtctgagctaaagtttgaggaggatgagcgatggattatgatggaggctgagggagagtgggaggaagagaaactgtcagacagggaaaagacttttctgatggcagatgagaagaacagcctggcagatatttttgaagaaagagaacaagcaaacacagcagtggtggaggatggatccgattgcttagctgctgtcttgaggacttttggccacctatctcttggtcagatttgttgccctgatgacccacagccagccaaggaccagttggctactgttcccaaggatatacccctggattgcgattgtgttcttacaggtgaggatattctcggtgaggtggcaaacagaactgctcaggggttagagggacttgtttcagattcagcatgtactgtgggtactattgatgcagaacagctctctgacacagactcagtgcagatgtttcttgaacttgaaaaggagtgtttatgtgaagaaggagtaactcctctagttgagctacagaatcaaatctcttctgaagggctggctgcatcccaggatgcagaaaatttactcgtaattagtcatttttcaggggctgccttagaaaaggaacagcatttaggccttttacatgtaagggcaaaagattatgatactagattggattgtggatattttaataccctggattcttctcaggtgcctaatgctgtggaacttattgcccacgttgatatcatgagagacacttccactgttagcaaggaggaatgtgaaaaagtgccttttagccccaggactgcagaatttaagtccagacagccagctgatctggattcactggaaaagctggacccaggaggactgctgaactctgatcacagggtttctcatgaagaaaaattatcaggcttcattgcttctgagctggccaaagacaatggcagtttgtcccagggagactgcagtcaaactgaggggaatggtgaggagtgcattgagagggtcaccttcagttttgcttttaatcatgaactaacagatgttacctcaggacctgaagtagaggtgttatatgaatcaaatttactaacagatgaaattcatttggaaagtgggaatgtaactgttaatcaagaaaataacagtctgacatcaatgggaaatgtggtcacttgtgaattgtctgtggagaaagtttgtgatgaggatggtgaggcaaaagagctggattatcaagccacacttttggaggatcaagctccagcacatttccacagaaacttcccagagcaggtcttccaggatctccagaggaagtccccagagtcagagattctgagtctgcacctgctggttgaagaactgagacttaatccagatggagtggaaactgtgaatgatacaaagcctgagctgaatgtggcatcatcagagggaggggagatggaaaggagagattcagattcattcctaaatatttttccagagaaacaagttaccaaggctggtaatactgaaccagttttagaggaatggatacccgtcctccagagaccttcccggactgctgcagtacccactgtcaaagatgccctagatgctgcactgcccagcccagaggagggtacctcaattgctgcagtgcctgccccagagggaactgctgtagttgctgctttagtgccctttccacatgaggacatcctagttgcttcaatagtctccttagaggaggaggatgtcacagctgctgcagtatcagccccagagagggctactgtcccagctgttacagtatctgtccctgaagggactgctgcagttgctgcagtgtcctccccagaggagactgctccagctgttgcagcagccatcacacaggagggtatgtcagctgtcgcagggttctccccagagtgggctgctttagctattacagtacccatcacagaggaggatggtacaccagaagggcctgtcaccccagctaccacagtgcatgctccagaggagcctgatactgcagctgtcagagtgtccaccccagaggagcccgcctccccagctgctgcagtgcccaccccagaggagcccacctccccagctgctgcagtgcccaccccagaggagcccacctccccagctgctgcagtgccccccccagaggagcccacctccccagctgctgcagtgcccaccccagaggagcccacctccccagctgctgcagtgcccaccccagaggagcccacctccccagctgctgcagtgcccaccccagaggagcccacctccccagctgctgcagtgcccaccccagaggagcccacctccccagctgctgcagtgcccaccccagaggagcccacctccccagctgctgcagtgcccaccccagaggagcccgcctccccagctgctgcagtgcccaccccagaggagcccgcctccccagctgctgcagtgcccaccccagaggagcctgccttcccagctcctgcagtgcccaccccagaggaatccgcctccgcagctgttgcagtgcccacccccgaggaatctgcctccccagctgctgcagtgcccaccccagcagaatctgcctcctttgcagctgtggtggccaccctggaggaacccacttccccggcagcttcagtgcccacccctgcagctatggtggccaccctagaggaattcacttccccggcagcttcagtgcccacctctgaggagcctgcctccctagcagctgcagtgtccaacccagaggagcccacctccccagcagcagcagtgcccaccctagaggaacccacctcctcagcagctgcagtgctcaccccagaggaactcagttccccagcagcttcagtgcccacccccgaggagcctgcctccccagcagctgcagtgtccaacctagaggagcccgcctccccagcagcagcagtgcccaccccagaggtggctgccatccctgctgcttcagtgcccaccccagaggtgcctgccatcccagctgctgcagtgcctcctatggaggaagtttcccccattggtgtgcccttcctgggagtttctgcccacactgactcagtgcctatttcagaagaaggaacacctgttctagaggaggcttcctccactggaatgtggatcaaggaggaccttgattccctagtatttggcataaaagaggtgaccagcacagtgctacatgggaaagtgcctctggctgcaaccgctggattaaattcagatgaggtaattgtccattttgattctgggaagggtctaaagagtaaagtgagatttgcagggctgacctggtggtgatgagaaatggcacagatagttcttttgttctttttgggtctcccgggcttatagtttgtagtctttctgttcagtttttggggaaaatatactttaattttgtctggtgaaagactttataatttcatgcttcgttttttattcagataagccaatcccacggaaaacagggatataaacagttgttgatttacatttttaaaaagattattagcaggaaagggtcattctgtttttgaattatacagtgagcatgttcttgcctaaaccaagagacagtttattcattggtggtgtcaacatttaggtagaggccagagtgtgagctttggaatgagacctggggtgcttcctaaccactctgggaaaattagttagctattcttgagtttcctgtttcttcatttgttaaggcataactctgtgaggataaaatgagatacatttaaggtaccaagcgtataagattaccaatcactggccatatcctccccattcttttcaaataggtatgttggttggttgaaagaatttaccaaagtagattggagagaagcaataaagctaaatgattaagaacttttaaatgcaaatatgtgtttctgaaaaccagagctaggcataatgtttatgaaaaatagagatattttagtcatctttgtcaaactgcctttgtgtccttaagcaagtcattttcctttccaggacctcatttcttcattataaaacaagaaaattgggctaaatgtcctcttgggtctctcttggctctaagattctttttattttttttttttagatggagtctggctctgtcagtcaggctggagtgctagagtgcagtggtgcgatctcagctcactgcaagctccacctcccgggttcacgccattctcctgcctcagcctcccgagtagctgggactacaggcgcccgccactacgcccggcaattttttgtatatatatatatataattttttttttttttttttagtagagacgggtttcactgtgttagccaggatggtctcaatctcctgacctcatgatctgcccgcctcggcctcccagagtgctgggattacaggcgtgagccaccgcgcccagccggctctaagattcttaatgttagagaaccgaatgtgttaggaaacagttggaaacgatgttccacatccttgagcactcctagtccaaggaatttgagatcagcagctttccacagttaattacccaggtttgatttggtcagtggtaaagagtgcaggagttagaggtttaatctgaacacaagagatgactgagtgagaagattgttttgattttactgcgcccctaggactcaaaatagtgccttcttcatagcaggcatttgctgttgactgactgactgaatgcatgaatatcaatttcctagactatggatggatgctacaagaaagatgggttttctcattcacctcactgcagagcctttcagggcagccttaagtcagctagagcaccagctaaacatgcaggtcctgacaacaaaatcattttgattgcatgccataaactctttgattaagaggattgattaagataatctggccttgctgagtggtggtggttttaccttgagctttaccagttattttgtcaggtagcattccattaaattaggatgcatcatctttgagactgatggatttttgattcatttttccgagttttattgaatttggaatgacaccgagatcccaatagcctgtacaaagtgaagacagtaggtcaacaacagagccattcttgataatacagaatatttcacaccaggcacagtggctcacacctctaatcccaacatttgggaagccaagggaagaggattgcttgaggccaggagttcgagaacagcctaggcaacatagtaagaccccatctctgag

SEQ ID NO: 153904 - DNA, 1085 bp, Homo sapiens
  Payload ID: 10253
  Gene Symbol: MACF1
  Gene Name: microtubule-actin crosslinking factor 1
  ENST ID: ENST00000482035
  CDS Start-End: 1-1085
ccatccctgctgcttcagtgcccaccccagaggtgcctgccatcccagctgctgcagtgcctcctatggaggaagtttcccccattggtgtgcccttcctgggagtttctgcccacactgactcagtgcctatttcagaagaaggaacacctgttctagaggaggcttcctccactggaatgtggatcaaggaggaccttgattccctagtatttggcataaaagaggtgaccagcacagtgctacatgggaaagtgcctctggctgcaaccgctggattaaattcagatgagatgtttcagaaagaacaagtggatcctcttcagatgaaattgcagcaggtgaatggacttggccagggattaattcagagtgcaggaaaagactgtgatgtacagggtttagaacatgacatggaagagatcaatgctcgatggaatacattgaataaaaaggtcgcacaaagaattgcacagctacaggaagctttgttgcattgtgggaagtttcaagatgccttggagccattgctcagctggttggcagataccgaggagctcatagccaatcagaaacctccatctgctgagtataaagtggtgaaagcacagatccaagaacagaagttgctccagcggctcctagatgatcgaaaggccacagtagacatgcttcaagcagaaggaggcagaatagcccagtcagcagagctggctgatagagagaaaatcactggacagctggagagtcttgaaagtagatggactgaactactcagtaaggcagcagccaggcaaaaacagctggaagacatcctggttctggccaaacagttccatgagacagctgagcctatttctgacttcttatctgtcacagagaaaaagcttgctaactcagaacctgttggcactcagactgccaaaatacagcagcagatcattcggcacaaggctctggaagaagacatagaaaaccatgcaacagatgtgcaccaggcagtcaaaattgggcagtccctctcctccctgacatctcctgcagaacagggtgtgctgtcagaaaagatagactcattgcaggcc

SEQ ID NO: 153905 - DNA, 834 bp, Homo sapiens
  Payload ID: 10253
  Gene Symbol: MACF1
  Gene Name: microtubule-actin crosslinking factor 1
  ENST ID: ENST00000484793
  CDS Start-End: 336-701
cgctgggagtgggggagcgggttgggcggctgcgccggctctgcttcagccgctgccgctagggcgcggggggcggggggctcggcgccgcgagctcggccattgtgggagccgctcccctcggctccgccacgctcccctcgactgcgctccagcctggggcgcgcccggccgccgccgccttcgctgccgccacgggcccgtcttcttcctccttcggctcccaggatgaagaaactgagtctcagagaggtgaagtgacttgcccaagatcacagcaattatcacttctccctgggctcccaggccctcctgcagcagcccccgcctgggccatgtcttcctcagatgaagagacgctcagtgagcggtcatgtcggagtgagcggtcttgtcggagtgagcgatcttacaggagcgagcggtcggggagcctgtctccctgtcccccaggggacaccttgccctggaacctgccactgcatgagcagaaaaagcggaaaagccaggattcggtgctggaccctgcagagcgtgctgtggtcagagtcgctgatgcccttccgagtacatccttctgcttcccccattgcagccttcttagaaatgcagcagcagtctcacccatcaggagcaaaagaaaatcaaagaccaaaaggagaaagcctcagagcttttgcgactgtgtggtctggctataaatttagactgttgcttgaaagaagcgaaaaacctccccttcatagacttccttcttcccatcccccctggcagccgctttgttcctctagccttgtaaaattttctctgtataaaacaggaacatcagccaaa

SEQ ID NO: 153906 - DNA, 4338 bp, Homo sapiens
  Payload ID: 10253
  Gene Symbol: MACF1
  Gene Name: microtubule-actin crosslinking factor 1
  ENST ID: ENST00000524432
  CDS Start-End: 214-4338
ggaccggcggagcgcgagcgggccgggtgcgagcggactgaggagcggagcgcgactgccgggccgggcgaggcgggcggacggcggagagcgagggcgccgtcgccgtctctgagacgcacaaagggtcgaggctggggccgccgccgcctcagcgcgcgggcctggaaccggcagcccccggggctcggcgagaaggcggtgcgggcggccatggccggctacgtgccgggtcagcagccggccaaccgcagccaggagaaggagttcgtgcaggcgtacgaggatgtgctggagcggtacaaagatgaacgggaccgggttcagaagaaaacgttcaccaagtgggtcaacaagcacttaatgaaggtccgcaagcacatcaatgatctttatgaagatctgcgggatggccataacctgatctctctgttggaggtcctctcaggcatcaaactgccccgggagaagggcaggatgcgttttcataggctgcagaatgtgcagattgccctggacttcctaaagcagcgacaggtgaaactagtgaatattcgcaatgatgacatcacagatggcaaccccaagttgaccctgggtctgatctggaccattattttgcatttccagatctctgacatctacattagtggagaatcaggggatatgtcagccaaggagaaactactcctgtggacccagaaggtgacagctggttacacaggaatcaaatgcaccaacttttcctcctgctggagtgatgggaagatgttcaatgcactcattcaccgataccgacccgatctagtagacatggagagggtgcaaatccaaagtaaccgagagaatctggaacaggcttttgaagtggcagaaagactgggggtcactcgcctgctggatgcagaagatgtggatgtgccatctccagatgaaaagtctgtaatcacttatgtgtcttcgatttatgatgccttccctaaagttcctgagggtggagaagggatcagtgctacggaagtggactccaggtggcaagaataccaaagccgagtggactccctcattccctggatcaaacagcatacaatactgatgtcagataaaacttttccccaaaaccctgttgaactaaaggcactttataaccaatatatacacttcaaagaaacagaaattctggccaaggagagagaaaaaggaagaattgaggaattatataaattactagaggtgtggattgaatttggccgaattaaactgcctcaaggttatcaccctaatgatgtggaagaagagtggggaaagctcatcatagagatgctggaacgagagaaatcacttcggccggctgtggagaggctggaattgctgctacagattgcaaacaaaatccagaatggtgctttgaactgtgaagaaaaactgacactagctaagaatacactgcaggctgatgctgctcacctggaatcaggacaaccggtacaatgtgagtcagatgtcattatgtacattcaggagtgtgaaggtctcatcaggcagctgcaggtggatctccagatcctgcgggatgagaattactaccagctagaagagctggcttttagggtcatgcgtcttcaggatgagctggtcaccttgcgtctagagtgtacaaacctgtaccggaagggtcatttcacttcacttgaattggttccaccctctactttaaccaccactcatctgaaagcagaacccttaaccaaggcaacccattcttcttctacctcctggttccgaaagcctatgactcgggctgaacttgtggccatcagctcctctgaagatgaaggcaatctccgatttgtgtatgaactactgtcttgggtagaagagatgcagatgaaactggagcgagcagagtggggcaatgacctgcctagtgtggagttgcagctagaaacacagcagcacatccatacgagtgtagaagagctgggctcaagtgtcaaggaggccaggttgtatgagggaaagatgtcccagaatttccataccagctatgctgaaactcttggaaagctggagacacagtattgtaaattgaaggaaacttctagcttccggatgaggcaccttcagagcctgcataaatttgtttccagagctacagctgagttgatctggttgaatgagaaggaggaggaggaactagcatatgactggagtgacaacaattccaatatctcagccaagagaaattacttctctgagttgacaatggaactggaggagaaacaggatgtgtttcgttctctacaagatacagcagaactactttcacttgagaaccacccagccaagcagacagtggaggcttacagtgctgctgtccagtcccagttgcagtggatgaagcagctgtgcctgtgtgttgagcagcatgtgaaagagaatactgcttattttcagttcttcagtgatgcacgagagctggagtcattcttgaggaacctccaagattccattaaacgaaaatattcctgtgaccacaacaccagcttatcccgccttgaagacctgctccaggactccatggatgaaaaggagcagcttatacagtccaagagttccgttgccagtctcgttgggagatcaaaaaccatcgttcagctaaaaccacgcagtccagaccatgtgttaaagaacaccatttctgtcaaggctgtctgtgactacaggcagatcgagattactatttgcaaaaatgatgaatgtgtgctagaagataattctcagcggaccaaatggaaagtgatcagccccacagggaacgaggcaatggtgccgtcagtctgcttcctcatccccccacccaataaggatgccattgagatggccagcagggtcgaacaatcttatcagaaggttatggccctttggcatcagctgcatgttaacaccaaaagccttatctcttggaactatctgcgtaaagaccttgaccttgtacagacctggaacctagaaaagcttcgatcctcagcaccaggggagtgccatcagattatgaagaaccttcaggcccactatgaagactttctgcaggatagtcgtgactctgtgctgttctcagtggctgatcgcttgcgcttggaagaggaggtggaagcttgtaaagcccgcttccagcacctgatgaagtccatggagaatgaggacaaagaggagactgtggccaagatgtacatttcagagttgaagaacatccggctacgcctggaggagtatgaacagagggtggtcaaacgaattcagtctctagccagctctaggactgacagagatgcctggcaggacaatgcattaaggattgcagagcaagagcacacccaggaggatttacagcaattgaggtcagacttggatgcagtttctatgaaatgtgacagctttctccatcagtctccatctagttcaagtgtcccaactctgcgctcagaactgaatctgctggtggagaagatggaccatgtctatggtctctctactgtatatctgaataagttaaagacagttgatgttatagtacgtagcatacaggatgctgaactcttggtcaaaggttatgagattaagctgagtcaagaagaagtagtactggcagatctctcagctctggaggcccattggtcgacattacggcactggcttagtgatgtgaaggacaagaattcagtgttttcagtcctggatgaggaaattgccaaggccaaggtagtggcagagcagatgagtcgtctgacaccagagcgaaatctggatttggagcgctatcaggaaaaaggctcccagctgcaggagcgttggcaccgagtcattgcccagctcgagattcgccaatctgagctagaaagtatccaggaagttctgggagattaccgagcctgccatggaactctcatcaagtggattgaggaaaccactgcccagcaggaaatgatgaagccaggccaggcagaggatagcagagtgctttcggagcagctcagccagcagacggccctatttgcagaaattgagagaaatcagacaaaactggatcaatgtcaaaaattttcccagcagtactctactattgtaaaggactatgaattgcaactgatgacatacaaggcctttgtggaatcgcagcagaaatcccctggcaagcgccgtcgcatgctttcctcttcagatgccatcactcaagagttcatggacttaaggactcgctacacggcattggtgactttaacaactcagcacgtgaaatacatcagtgatgcactccggcgtctggaggaggaggag

SEQ ID NO: 153907 - DNA, 5065 bp, Homo sapiens
  Payload ID: 10253
  Gene Symbol: MACF1
  Gene Name: microtubule-actin crosslinking factor 1
  ENST ID: ENST00000496804
  CDS Start-End: 234-3422
atgctttgaatttgtcttgttgcagctctgagcctgtaagatggctgtctgaatcggcagcggctggaagagacagagagaggcggggagggagggagaaagaattggagggattgccggcatagtgcatgtttttaaatgtgcatcgaatccgatgaggccaaggttgggatttctgtgggatcccaggactggcttagctgcgtttttgctgagattaggagaggaaggaaatgggaaattcactgggctgttttaaggagccgaaagagtcaatagctattcctgagaaggctcccatatctcctaagaaaagggttcggttcaaaaggaggtggagagggaagaaaatccctactccagaggcatctcaccaggaagaaacctcagaaggaactggagtcattgaagagactgaaaccctaacgaagttaacagagagtctccaaaaggaagacggagtgggaggggtagagcatacccccccagatattttgctgcctggggactcagcccccaactcacgggtagtcgatcgggggatgatagtacaggtaaaggagagattccaaggggaggtccagaccgcccaccttttgttagagaatgagtcatcagttgctggaggggtctgggattccctggaagaggggatgactgtcattgctcacctgcttgataacccagcagaaaggaactgcgagaagtcagtgagccaactggtggaatttcctaggacagcatcctgcagcagcagggctgtgttgctgcctttgcaaggagagactgcagtggagaaaggaaatattcagcgtgggtttcggagctgtgctttgcctaggacagactaccccactgataaaggaaatcaagaacaattttcagagggctggagtgtggaggaaggaaccaagagtgtttcaggtgcccctcagacagcttcctggattatagaatgttctgtttcttcattactactggaccagcctggaggccaaagacgcacggagccttcccatgtgggtcaagtgcccccccaggattccagactgcctacttctcagagtgatttgtccatcagtggtgtgactgtgagcattttgccctcctcctctggctatggcagtgatgggccacacatacatgggatccagcctaaagatacagaacctgaaaagagctctacttccttctcagaagaggatggcactctttctctggaggcaagccacaccccatcatggggtctggaagagatctctgacatctacattagtggagaatcaggggatatgtcagccaaggagaaactactcctgtggacccagaaggtgacagctggttacacaggaatcaaatgcaccaacttttcctcctgctggagtgatgggaagatgttcaatgcactcattcaccgataccgacccgatctagtagacatggagagggtgcaaatccaaagtaaccgagagaatctggaacaggcttttgaagtggcagaaagactgggggtcactcgcctgctggatgcagaagatgtggatgtgccatctccagatgaaaagtctgtaatcacttatgtgtcttcgatttatgatgccttccctaaagttcctgagggtggagaagggatcagtgctacggaagtggactccaggtggcaagaataccaaagccgagtggactccctcattccctggatcaaacagcatacaatactgatgtcagataaaacttttccccaaaaccctgttgaactaaaggcactttataaccaatatatacacttcaaagaaacagaaattctggccaaggagagagaaaaaggaagaattgaggaattatataaattactagaggtgtggattgaatttggccgaattaaactgcctcaaggttatcaccctaatgatgtggaagaagagtggggaaagctcatcatagagatgctggaacgagagaaatcacttcggccggctgtggagaggctggaattgctgctacagattgcaaacaaaatccagaatggtgctttgaactgtgaagaaaaactgacactagctaagaatacactgcaggctgatgctgctcacctggaatcaggacaaccggtacaatgtgagtcagatgtcattatgtacattcaggagtgtgaaggtctcatcaggcagctgcaggtggatctccagatcctgcgggatgagaattactaccagctagaagagctggcttttagggtcatgcgtcttcaggatgagctggtcaccttgcgtctagagtgtacaaacctgtaccggaagggtcatttcacttcacttgaattggttccaccctctactttaaccaccactcatctgaaagcagaacccttaaccaaggcaacccattcttcttctacctcctggttccgaaagcctatgactcgggctgaacttgtggccatcagctcctctgaagatgaaggcaatctccgatttgtgtatgaactactgtcttgggtagaagagatgcagatgaaactggagcgagcagagtggggcaatgacctgcctagtgtggagttgcagctagaaacacagcagcacatccatacgagtgtagaagagctgggctcaagtgtcaaggaggccaggttgtatgagggaaagatgtcccagaatttccataccagctatgctgaaactcttggaaagctggagacacagtattgtaaattgaaggaaacttctagcttccggatgaggcaccttcagagcctgcataaatttgtttccagagctacagctgagttgatctggttgaatgagaaggaggaggaggaactagcatatgactggagtgacaacaattccaatatctcagccaagagaaattacttctctgagttgacaatggaactggaggagaaacaggatgtgtttcgttctctacaagatacagcagaactactttcacttgagaaccacccagccaagcagacagtggaggcttacagtgctgctgtccagtcccagttgcagtggatgaagcagctgtgcctgtgtgttgagcagcatgtgaaagagaatactgcttattttcagttcttcagtgatgcacgagagctggagtcattcttgaggaacctccaagattccattaaacgaaaatattcctgtgaccacaacaccagcttatcccgccttgaagacctgctccaggactccatggcacaggatgaaaaggagcagcttatacagtccaagagttccgttgccagtctcgttgggagatcaaaaaccatcgttcagctaaaaccacgcagtccagaccatgtgttaaagaacaccatttctgtcaaggctgtctgtgactacaggcagatcgagggtcgaacaatcttatcagaaggttatggccctttggcatcagctgcatgttaacaccaaaagccttatctcttggaactatctgcgtaaagaccttgaccttgtacagacctggaacctagaaaagcttcgatcctcagcaccaggggagtgccatcagattatgaagaaccttcaggcccactatgaagactttctgcaggatagtcgtgactctgtgctgttctcagtggctgatcgcttgcgcttggaagaggaggtggaagcttgtaaagcccgcttccagcacctgatgaagtccatggagaatgaggacaaagaggagactgtggccaagatgtacatttcagagttgaagaacatccggctacgcctggaggagtatgaacagagggtggtcaaacgaattcagtctctagccagctctaggactgacagagatgcctggcaggacaatgcattaaggattgcagagcaagagcacacccaggaggatttacagcaattgaggtcagacttggatgcagtttctatgaaatgtgacagctttctccatcagtctccatctagttcaagtgtcccaactctgcgctcagaactgaatctgctggtggagaagatggaccatgtctatggtctctctactgtatatctgaataagttaaagacagttgatgttatagtacgtagcatacaggatgctgaactcttggtcaaaggttatgagattaagctgagtcaagaagaagtagtactggcagatctctcagctctggaggcccattggtcgacattacggcactggcttagtgatgtgaaggacaagaattcagtgttttcagtcctggatgaggaaattgccaaggccaaggtagtggcagagcagatgagtcgtctgacaccagagcgaaatctggatttggagcgctatcaggaaaaaggctcccagctgcaggagcgttggcaccgagtcattgcccagctcgagattcgccaatctgagctagaaagtatccaggaagttctgggagattaccgagcctgccatggaactctcatcaagtggattgaggaaaccactgcccagcaggaaatgatgaagccaggccaggcagaggatagcagagtgctttcggagcagctcagccagcagacggccctatttgcagaaattgagagaaatcagacaaaactggatcaatgtcaaaaattttcccagcagtactctactattgtaaaggactatgaattgcaactgatgacatacaaggcctttgtggaatcgcagcagaaatcccctggcaagcgccgtcgcatgctttcctcttcagatgccatcactcaagagttcatggacttaaggactcgctacacggcattggtgactttaacaactcagcacgtgaaatacatcagtgatgcactccggcgtctggaggaggaggagaaagtggtagaagaggagaaacaagaacatgtggagaaggttaaagaacttttgggctgggtgtctaccctagcgaggaatacacaaggaaaagctacctcatccgagaccaaagaatcaacagacattgaaaaagctattttggaacagcaggttctgtcagaagagctgacaacaaagaaagaacaagtctctgaagctattaaaacatcacagatcttcttggccaagcatggtcataagctctcag

SEQ ID NO: 153908 - DNA, 667 bp, Homo sapiens
  Payload ID: 10253
  Gene Symbol: MACF1
  Gene Name: microtubule-actin crosslinking factor 1
  ENST ID: ENST00000494012
  CDS Start-End: 329-667
agaggtttgagtcagcttgacactggcttaggcgctccttttcactctccttgttccttcttccctttcccctcccccgctggccagttgtttcctgggctttgtctgagatacactgtacagttttagtcccagtctactagcgcctgctgaaaaacagtcagaagtgagatggaggagaagctgccaggaagtttctgacaacactaagctccggcctctgcctctgctgatagtacaggacaacagtaacctcaggagaaaggcatccagaggcctgcgctgagcttgtggctaactcaagggaggagaaaggacgggcctggaaatgcccctcttagattcatcttatttaccaccaaccatctttattttgactcacgttcttggagttgctggtgttctatactggaagaggcatgccagaggtagagcagatgaacgggaccgggttcagaagaaaacgttcaccaagtgggtcaacaagcacttaatgaaggtccgcaagcacatcaatgatctttatgaagatctgcgggatggccataacctgatctctctgttggaggtcctctcaggcatcaaactgccccgggagaagggcaggatgcgttttcataggctgcagaatgtgcagattgccctggacttcctaaagcagcgacag

SEQ ID NO: 153909 - DNA, 6257 bp, Homo sapiens
  Payload ID: 10253
  Gene Symbol: MACF1
  Gene Name: microtubule-actin crosslinking factor 1
  ENST ID: ENST00000530262
  CDS Start-End: 172-6257
gctggaagagacagagagaggcggggagggagggagaaagaattggagggattgccggcatagtgcatgtttttaaatgtgcatcgaatccgatgaggccaaggttgggatttctgtgggatcccaggactggcttagctgcgtttttgctgagattaggagaggaaggaaatgggaaattcactgggctgttttaaggagccgaaagagtcaatagctattcctgagaaggctcccatatctcctaagaaaagggttcggttcaaaaggaggtggagagggaagaaaatccctactccagaggcatctcaccaggaagaaacctcagaaggaactggagtcattgaagagactgaaaccctaacgaagttaacagagagtctccaaaaggaagacggagtgggaggggtagagcatacccccccagatattttgctgcctggggactcagcccccaactcacgggtagtcgatcgggggatgatagtacaggtaaaggagagattccaaggggaggtccagaccgcccaccttttgttagagaatgagtcatcagttgctggaggggtctgggattccctggaagaggggatgactgtcattgctcacctgcttgataacccagcagaaaggaactgcgagaagtcagtgagccaactggtggaatttcctaggacagcatcctgcagcagcagggctgtgttgctgcctttgcaaggagagactgcagtggagaaaggaaatattcagcgtgggtttcggagctgtgctttgcctaggacagactaccccactgataaaggaaatcaagaacaattttcagagggctggagtgtggaggaaggaaccaagagtgtttcaggtgcccctcagacagcttcctggattatagaatgttctgtttcttcattactactggaccagcctggaggccaaagacgcacggagccttcccatgtgggtcaagtgcccccccaggattccagactgcctacttctcagagtgatttgtccatcagtggtgtgactgtgagcattttgccctcctcctctggctatggcagtgatgggccacacatacatgggatccagcctaaagatacagaacctgaaaagagctctacttccttctcagaagaggatggcactctttctctggagatctctgacatctacattagtggagaatcaggggatatgtcagccaaggagaaactactcctgtggacccagaaggtgacagctggttacacaggaatcaaatgcaccaacttttcctcctgctggagtgatgggaagatgttcaatgcactcattcaccgataccgacccgatctagtagacatggagagggtgcaaatccaaagtaaccgagagaatctggaacaggcttttgaagtggcagaaagactgggggtcactcgcctgctggatgcagaagatgtggatgtgccatctccagatgaaaagtctgtaatcacttatgtgtcttcgatttatgatgccttccctaaagttcctgagggtggagaagggatcagtgctacggaagtggactccaggtggcaagaataccaaagccgagtggactccctcattccctggatcaaacagcatacaatactgatgtcagataaaacttttccccaaaaccctgttgaactaaaggcactttataaccaatatatacacttcaaagaaacagaaattctggccaaggagagagaaaaaggaagaattgaggaattatataaattactagaggtgtggattgaatttggccgaattaaactgcctcaaggttatcaccctaatgatgtggaagaagagtggggaaagctcatcatagagatgctggaacgagagaaatcacttcggccggctgtggagaggctggaattgctgctacagattgcaaacaaaatccagaatggtgctttgaactgtgaagaaaaactgacactagctaagaatacactgcaggctgatgctgctcacctggaatcaggacaaccggtacaatgtgagtcagatgtcattatgtacattcaggagtgtgaaggtctcatcaggcagctgcaggtggatctccagatcctgcgggatgagaattactaccagctagaagagctggcttttagggtcatgcgtcttcaggatgagctggtcaccttgcgtctagagtgtacaaacctgtaccggaagggtcatttcacttcacttgaattggttccaccctctactttaaccaccactcatctgaaagcagaacccttaaccaaggcaacccattcttcttctacctcctggttccgaaagcctatgactcgggctgaacttgtggccatcagctcctctgaagatgaaggcaatctccgatttgtgtatgaactactgtcttgggtagaagagatgcagatgaaactggagcgagcagagtggggcaatgacctgcctagtgtggagttgcagctagaaacacagcagcacatccatacgagtgtagaagagctgggctcaagtgtcaaggaggccaggttgtatgagggaaagatgtcccagaatttccataccagctatgctgaaactcttggaaagctggagacacagtattgtaaattgaaggaaacttctagcttccggatgaggcaccttcagagcctgcataaatttgtttccagagctacagctgagttgatctggttgaatgagaaggaggaggaggaactagcatatgactggagtgacaacaattccaatatctcagccaagagaaattacttctctgagttgacaatggaactggaggagaaacaggatgtgtttcgttctctacaagatacagcagaactactttcacttgagaaccacccagccaagcagacagtggaggcttacagtgctgctgtccagtcccagttgcagtggatgaagcagctgtgcctgtgtgttgagcagcatgtgaaagagaatactgcttattttcagttcttcagtgatgcacgagagctggagtcattcttgaggaacctccaagattccattaaacgaaaatattcctgtgaccacaacaccagcttatcccgccttgaagacctgctccaggactccatggatgaaaaggagcagcttatacagtccaagagttccgttgccagtctcgttgggagatcaaaaaccatcgttcagctaaaaccacgcagtccagaccatgtgttaaagaacaccatttctgtcaaggctgtctgtgactacaggcagatcgagattactatttgcaaaaatgatgaatgtgtgctagaagataattctcagcggaccaaatggaaagtgatcagccccacagggaacgaggcaatggtgccgtcagtctgcttcctcatccccccacccaataaggatgccattgagatggccagcagggtcgaacaatcttatcagaaggttatggccctttggcatcagctgcatgttaacaccaaaagccttatctcttggaactatctgcgtaaagaccttgaccttgtacagacctggaacctagaaaagcttcgatcctcagcaccaggggagtgccatcagattatgaagaaccttcaggcccactatgaagactttctgcaggatagtcgtgactctgtgctgttctcagtggctgatcgcttgcgcttggaagaggaggtggaagcttgtaaagcccgcttccagcacctgatgaagtccatggagaatgaggacaaagaggagactgtggccaagatgtacatttcagagttgaagaacatccggctacgcctggaggagtatgaacagagggtggtcaaacgaattcagtctctagccagctctaggactgacagagatgcctggcaggacaatgcattaaggattgcagagcaagagcacacccaggaggatttacagcaattgaggtcagacttggatgcagtttctatgaaatgtgacagctttctccatcagtctccatctagttcaagtgtcccaactctgcgctcagaactgaatctgctggtggagaagatggaccatgtctatggtctctctactgtatatctgaataagttaaagacagttgatgttatagtacgtagcatacaggatgctgaactcttggtcaaaggttatgagattaagctgagtcaagaagaagtagtactggcagatctctcagctctggaggcccattggtcgacattacggcactggcttagtgatgtgaaggacaagaattcagtgttttcagtcctggatgaggaaattgccaaggccaaggtagtggcagagcagatgagtcgtctgacaccagagcgaaatctggatttggagcgctatcaggaaaaaggctcccagctgcaggagcgttggcaccgagtcattgcccagctcgagattcgccaatctgagctagaaagtatccaggaagttctgggagattaccgagcctgccatggaactctcatcaagtggattgaggaaaccactgcccagcaggaaatgatgaagccaggccaggcagaggatagcagagtgctttcggagcagctcagccagcagacggccctatttgcagaaattgagagaaatcagacaaaactggatcaatgtcaaaaattttcccagcagtactctactattgtaaaggactatgaattgcaactgatgacatacaaggcctttgtggaatcgcagcagaaatcccctggcaagcgccgtcgcatgctttcctcttcagatgccatcactcaagagttcatggacttaaggactcgctacacggcattggtgactttaacaactcagcacgtgaaatacatcagtgatgcactccggcgtctggaggaggaggagaaagtggtagaagaggagaaacaagaacatgtggagaaggttaaagaacttttgggctgggtgtctaccctagcgaggaatacacaaggaaaagctacctcatccgagaccaaagaatcaacagacattgaaaaagctattttggaacagcaggttctgtcagaagagctgacaacaaagaaagaacaagtctctgaagctattaaaacatcacagatcttcttggccaagcatggtcataagctctcagaaaaagagaagaaacaaatatctgagcaattgaatgccctaaacaaggcttaccatgacctttgtgatggttctgcaaatcagcttcagcagcttcagagccagttggctcaccagacagaacaaaagaccctgcagaaacaacaaaatacctgtcaccagcaactggaggatctttgcagttgggtaggacaggcagaaagagcactggcaggccaccaaggcagaaccacccagcaggatctctctgctttgcagaagaaccaaagtgacttgaaggatttacaggatgacattcagaatcgtgccacctcatttgccactgttgtcaaggacattgaggggttcatggaagagaatcagaccaagctgagcccacgtgagttgacagctcttcgggaaaagcttcatcaggctaaggagcaatatgaggcgctccaggaagagacacgtgtggcccagaaggaactggaggaagcagtgacctccgccttacagcaggagactgaaaagagtaaagcagcaaaggaactggcagagaacaagaagaagatcgatgctctcctggattgggtaacttcagtaggatcatctggtggacagctgctgaccaaccttccaggaatggagcagctctcgggagctagcttggagaaaggagccttggacaccactgatggttacatgggggtgaatcaagccccagagaaactggacaagcaatgtgagatgatgaaggcccgtcaccaagaattgctgtcccagcagcaaaatttcattctggccacccagtcagctcaggccttcttggatcagcatggccacaatctcacacctgaggagcaacagatgctgcaacagaagctgggagagctaaaggaacaatactctacttccctggcccaatcagaggcagaactgaagcaggtgcagacacttcaggatgagttgcagaaatttctgcaggatcataaagagtttgaaagctggttggaacgatccgagaaagagctggagaacatgcataagggaggcagcagccccgagacccttccctccctgctaaagcggcaaggaagcttctcagaggatgtcatttcccacaaaggagacttgagatttgtgactatctcaggaca

SEQ ID NO: 153910 - DNA, 24828 bp, Homo sapiens
  Payload ID: 10253
  Gene Symbol: MACF1
  Gene Name: microtubule-actin crosslinking factor 1
  ENST ID: ENST00000564288
  CDS Start-End: 778-23445
gggattacagccatgaaccactgcgcccagccagacggatttttttaacccttgagaagtaccccctaaatgagcagtttgctctcctcgctgatcttcatcacacctagatgtcaggtctgcttcatgggagcttgctctgtatgtatcctccctggactgatgttcaggctccttgcttctcctcccgggttgtgggtatggagggtttgccctctgacaactccagggtacttgtggtgctcatacatcctcatgtactttgctttctccccgcaagaggttccctaatgcttctgtgacttttttcttctggctacatcctgaagtctggccttgcaggcaggctgggaatggaaagttaagagtgtgacgtcctctgacaccctcccttcttgtagaagggtctgaggtttgtttatttaagctgagcagaggatgccaaagatagaggtttgagtcagcttgacactggcttaggcgctccttttcactctccttgttccttcttccctttcccctcccccgctggccagttgtttcctgggctttgtctgagatacactgtacagttttagtcccagtctactagcgcctgctgaaaaacagtcagaagtgagatggaggagaagctgccaggaagtttctgacaacactaagctccggcctctgcctctgctgatagtacaggacaacagtaacctcaggagaaaggcatccagaggcctgcgctgagcttgtggctaactcaagggaggagaaaggacgggcctggaaatgcccctcttagattcatcttatttaccaccaaccatctttattttgactcacgttcttggagttgctggtgttctatactggaagaggcatgccagaggtagagcagatgaacgggaccgggttcagaagaaaacgttcaccaagtgggtcaacaagcacttaatgaaggtccgcaagcacatcaatgatctttatgaagatctgcgggatggccataacctgatctctctgttggaggtcctctcaggcatcaaactggagccagcagggctgaagaccctccgtctggtgagcatgccctcctggtgccatacaaacaacgaggagcaggcggaggaagatgatgatgatgtaccccgggagaagggcaggatgcgttttcataggctgcagaatgtgcagattgccctggacttcctaaagcagcgacaggtgaaactagtgaatattcgcaatgatgacatcacagatggcaaccccaagttgaccctgggtctgatctggaccattattttgcatttccagatctctgacatctacattagtggagaatcaggggatatgtcagccaaggagaaactactcctgtggacccagaaggtgacagctggttacacaggaatcaaatgcaccaacttttcctcctgctggagtgatgggaagatgttcaatgcactcattcaccgataccgacccgatctagtagacatggagagggtgcaaatccaaagtaaccgagagaatctggaacaggcttttgaagtggcagaaagactgggggtcactcgcctgctggatgcagaagatgtggatgtgccatctccagatgaaaagtctgtaatcacttatgtgtcttcgatttatgatgccttccctaaagttcctgagggtggagaagggatcagtgctacggaagtggactccaggtggcaagaataccaaagccgagtggactccctcattccctggatcaaacagcatacaatactgatgtcagataaaacttttccccaaaaccctgttgaactaaaggcactttataaccaatatatacacttcaaagaaacagaaattctggccaaggagagagaaaaaggaagaattgaggaattatataaattactagaggtgtggattgaatttggccgaattaaactgcctcaaggttatcaccctaatgatgtggaagaagagtggggaaagctcatcatagagatgctggaacgagagaaatcacttcggccggctgtggagaggctggaattgctgctacagattgcaaacaaaatccagaatggtgctttgaactgtgaagaaaaactgacactagctaagaatacactgcaggctgatgctgctcacctggaatcaggacaaccggtacaatgtgagtcagatgtcattatgtacattcaggagtgtgaaggtctcatcaggcagctgcaggtggatctccagatcctgcgggatgagaattactaccagctagaagagctggcttttagggtcatgcgtcttcaggatgagctggtcaccttgcgtctagagtgtacaaacctgtaccggaagggtcatttcacttcacttgaattggttccaccctctactttaaccaccactcatctgaaagcagaacccttaaccaaggcaacccattcttcttctacctcctggttccgaaagcctatgactcgggctgaacttgtggccatcagctcctctgaagatgaaggcaatctccgatttgtgtatgaactactgtcttgggtagaagagatgcagatgaaactggagcgagcagagtggggcaatgacctgcctagtgtggagttgcagctagaaacacagcagcacatccatacgagtgtagaagagctgggctcaagtgtcaaggaggccaggttgtatgagggaaagatgtcccagaatttccataccagctatgctgaaactcttggaaagctggagacacagtattgtaaattgaaggaaacttctagcttccggatgaggcaccttcagagcctgcataaatttgtttccagagctacagctgagttgatctggttgaatgagaaggaggaggaggaactagcatatgactggagtgacaacaattccaatatctcagccaagagaaattacttctctgagttgacaatggaactggaggagaaacaggatgtgtttcgttctctacaagatacagcagaactactttcacttgagaaccacccagccaagcagacagtggaggcttacagtgctgctgtccagtcccagttgcagtggatgaagcagctgtgcctgtgtgttgagcagcatgtgaaagagaatactgcttattttcagttcttcagtgatgcacgagagctggagtcattcttgaggaacctccaagattccattaaacgaaaatattcctgtgaccacaacaccagcttatcccgccttgaagacctgctccaggactccatggatgaaaaggagcagcttatacagtccaagagttccgttgccagtctcgttgggagatcaaaaaccatcgttcagctaaaaccacgcagtccagaccatgtgttaaagaacaccatttctgtcaaggctgtctgtgactacaggcagatcgagattactatttgcaaaaatgatgaatgtgtgctagaagataattctcagcggaccaaatggaaagtgatcagccccacagggaacgaggcaatggtgccgtcagtctgcttcctcatccccccacccaataaggatgccattgagatggccagcagggtcgaacaatcttatcagaaggttatggccctttggcatcagctgcatgttaacaccaaaagccttatctcttggaactatctgcgtaaagaccttgaccttgtacagacctggaacctagaaaagcttcgatcctcagcaccaggggagtgccatcagattatgaagaaccttcaggcccactatgaagactttctgcaggatagtcgtgactctgtgctgttctcagtggctgatcgcttgcgcttggaagaggaggtggaagcttgtaaagcccgcttccagcacctgatgaagtccatggagaatgaggacaaagaggagactgtggccaagatgtacatttcagagttgaagaacatccggctacgcctggaggagtatgaacagagggtggtcaaacgaattcagtctctagccagctctaggactgacagagatgcctggcaggacaatgcattaaggattgcagagcaagagcacacccaggaggatttacagcaattgaggtcagacttggatgcagtttctatgaaatgtgacagctttctccatcagtctccatctagttcaagtgtcccaactctgcgctcagaactgaatctgctggtggagaagatggaccatgtctatggtctctctactgtatatctgaataagttaaagacagttgatgttatagtacgtagcatacaggatgctgaactcttggtcaaaggttatgagattaagctgagtcaagaagaagtagtactggcagatctctcagctctggaggcccattggtcgacattacggcactggcttagtgatgtgaaggacaagaattcagtgttttcagtcctggatgaggaaattgccaaggccaaggtagtggcagagcagatgagtcgtctgacaccagagcgaaatctggatttggagcgctatcaggaaaaaggctcccagctgcaggagcgttggcaccgagtcattgcccagctcgagattcgccaatctgagctagaaagtatccaggaagttctgggagattaccgagcctgccatggaactctcatcaagtggattgaggaaaccactgcccagcaggaaatgatgaagccaggccaggcagaggatagcagagtgctttcggagcagctcagccagcagacggccctatttgcagaaattgagagaaatcagacaaaactggatcaatgtcaaaaattttcccagcagtactctactattgtaaaggactatgaattgcaactgatgacatacaaggcctttgtggaatcgcagcagaaatcccctggcaagcgccgtcgcatgctttcctcttcagatgccatcactcaagagttcatggacttaaggactcgctacacggcattggtgactttaacaactcagcacgtgaaatacatcagtgatgcactccggcgtctggaggaggaggagaaagtggtagaagaggagaaacaagaacatgtggagaaggttaaagaacttttgggctgggtgtctaccctagcgaggaatacacaaggaaaagctacctcatccgagaccaaagaatcaacagacattgaaaaagctattttggaacagcaggttctgtcagaagagctgacaacaaagaaagaacaagtctctgaagctattaaaacatcacagatcttcttggccaagcatggtcataagctctcagaaaaagagaagaaacaaatatctgagcaattgaatgccctaaacaaggcttaccatgacctttgtgatggttctgcaaatcagcttcagcagcttcagagccagttggctcaccagacagaacaaaaggaatgcagagcagttgctggggtgattgacctaggcacagtggagatatttcccatcttcaaagccatgcaaaagggcctccttgaccaagacacaggcctagtgcttctggaatctcaggttatcatgtctggcctcattgcccctgagacgggtgaaaacctctctttggaggagggcatagccagaaacctcattaatccccagatgtaccagcagctccgggagctacaggatgccctggccttaataagcaggcttactgagagcagaggccctctttctgtggtggaagcaattgaaaagagaataatcagtgagacagttggactgaaaatcttagaagctcacctggcaactggaggtttcagtctttcccctagtgagaactgtattaacctggaagaggcttttcatcaaggcctcatttctgcatggcttcattcagtattagagtcttatcttagaacatccaagaatttgatagaccctaacacagctgagaaaattggtttgctggatctgatgcagcgatgtattgtccaccaggaatcaggattcaaattactgcctgtcaaacaattggcaggggggatggtgagcttgaaatcaggccggaaggttagcattttccgtgcagttcaggaagggctaatagataggcaggtcactgtccggttgctggaagctcagctttttgctggtggcatagtagatccaagaacaggacacagacttacagtggaagaggctgtaagacataatctgattgaccaagatatggcctgtgctatcctcataaggcagcttcagacaggaggcatcatagacactgtcacggggcaaaggctaacaatagatgaagcagtgagcaatgatctagtagctgctaagatcgcccttgtgattctggagtccctctggtcattcatggggttgctgtggcctgaatctggagagatcctcccaattacagatgccctagaacaaggtattgtgtctactgaactagcacataaaatccttagtaaccgacagcatattaaggctctgtttctaccagcaaccacagagattttgtcctggaagaaagcaatagaaagtggtatcctggatagagatcttgccaataacttaaaatcgatttgtatacctgatgtgatgccccacatgcaactagcagactctgcagaacaaaatattaatcctggagcagcagttctaccgtgcagcaagagccaccctaaggccacagcaagccagagtgagaatctgttgttccagctgatgactcacagctatattaatgtgcaaaatggacagaggctgcttctgttagataaagagctgatggagacactaacatccagagatgagtatcaaacaagtcctccaaaagtggttgaaattgggcatcaaaggcaaaaaactcctgagggattgcaagaatcagctaatgtgaaaatctcaggaactttcagcagtgggtggactgtgaggctgcctgagttccagttttcttctcagaacaaagaatatcccgatcgggaagattgcactacagaaaaaggcaaaaagaccactgtagaaacagaagattcttctgtagagaaccctgaacaggatctgtttgtagaacaaaaagagagaaatccaaacattgatgctttgaaggtaataaataaagtcaaattagaggtacaaaggcagttgataggtacccaaagggaagaccaaacagcagtgtctgtcagagaaaatgccagcaggggacacctcctgaccatacctcctgctgaggcggaaggtgtgccgttggtggttgacaaagatgttttttctgttgaaacaccaaagaaagaacatcaacctctaagaaacacttcctttacatgtcagaatgaacaagcacacactcttgagactgaatatattcatgatgaaactggaggatctcacataaaaccccaaagcaaaaagttacaagttcaggtaaagaaaactctaggtataaagttagaactaaagtctgaaactgatgggaatgttcatcctctggacaaaaaggaaatgttaaagaaaacatttctggctaaggatgaccataaagaaagtcaagaagcacagaacatcgcaggtggtagtatgatgatgtcagaaaagaccgatgaggaagatagtggcagggaaatttttctgtcatgcagtcatccattagaattgcttgaagaagctaccttaaatgtattatctgcacagttactagatggtggtatctttcatgaacaaacaggtcaaaagctcttactaaatgaagcaatatcccgaggcattgtgccaagtcacactgccgtgaagcttatggagaagctgaacatgtttcaggggttctttgactctcagacttgtgagtctttgacaactgaagaagtcattaatgaaggtctgatggatgagaaattattacataatgtcctcatggcagacaaagctataagtggtgtcttagacccccgtacccagacactgtgctctgtaaaggatgcagttacagttggacttcttgacaaggaaacagccaccagaattttagagaggcaggtggtgactggtggaattattgatctgaaacgaggcaaaaaagtttcagtaactttggcctcaactcttggcttggtggacgttgctgaccagccagaacttataaatctggagaaagcttccaaaggtagagatgctgaaaaaacagttagggagagattaattagtttacaaatggaaacaacaggacttatagaccctgatagtaaagcacctttaacagttgtgcagtccattgacagaggtcttttggagagagaggaggccgttcgtttgttgactaagcaagtggtagatggaggtatcattcaccatatatctgggatgagactttctgttgataatgccttcagacatggcttaattggtgaagatttagccgagaaactcaaaagagttgagaacttaaacatccatcagatttttaatcctgaaacgaaggaaaatatttccctccctaaagccataaaattagatcttattacctcagacctgaaaagagaaatccaggaggttcaggcctttactggaaactttgtggatctcatttctggtcagagattgaccttggcagaagctaaaaaagaaggactgttaactaatgaagcagtattgtctccaggaatgatgcatggcattgtagatcccgagaactgcagaattgtcccctactcagaattagtcaagaaatgtaagattgatattgaatctggacagagatatctagaagtaattcccttctcagacattaaagatggggtgagcgacaaagtgcttacattgtctcaagcaattcagcttggaaaagtagactttgcatctacgctgaaggttctagaagcccaggcaaatactggtggaatcatagatactgctactggaaaaagactgacattggcatcagctttggaagagaaactggtggatgaaaacatggtcagaattattgcatctcatcaggtgttaaatggaggaattgttgacatatttagtgatcagagagtgactttagtagaagctattgagaaaagactgatcagccctgaactggcaaatatgatccaaatagatagttcagagttcagcgatcacagggctcagattgaaaagcaagaagggattgaagtgtgtgcattacaaaatgaatttctaggaaaggatatgttaattgcttgtaatcagactgctgaaatgagttgtaataaagtagaagagagtgagagattatttcaagttgaaaatcagtctgcacaagaaaaggttaaagtgagagtttctgatggggagcaggcaaaaaagagcagggaaatttccttaaaggaatttgggtgcaaggatcaacgtaagccaagaatgtcttcagatgctaaagaatttatcagtatcataaatcctcataatcttaaaggtaaatccttgggccaagtgtcattgacacacccttactctgaatgtgattttaaacttaaagaagtggctagaaataacatgggaaatgatacaaatgaagagcaggaaaaagcagtgacaaaaatagaaattatttctcatatgaagcagtctacctcatgtctagattctgaagaaataagagaaaatcaaggggaagtgattttggaagtacaagaaacatattgtgaaacgtcaggcaaattgccgagtgagcaggttttgcagcaaccaatgaatgctcgggtgaaaagtaagagagagaagagggaggtgattgtagaagaaagtatcagaacatgcaaaccagcatttctttctgaagaaaagttgtatcaggaaactgccattagagatgagcatgactcccatataaagagccaacctagggaaatgacctcaagtgaaaaagggaaagaagctgatacagaaatgggattttctattacttttaaaattgaagagtcctcttcccaagtggtacctcaaggaatttctgtaaaacatttagatgctttaacactcttcagctctaaacaggccaatgaaggaaaagtaaacaatttaagtctctgcttgactttaaaaccagaagaaaacttatctcgagaaattgcctgtggggcccagagtgaaccattcccttgtatgaccccaagacctgaaggattgcactaccaggaatcagatggaaaagcccaagtgacaggcccatcccaaatttccaaaacagacaagtctttccaaggaaccaccagacaggagaccaactatcaagattcctgggttacttcgaaaactaaggaaaccaaacatcaaatttcctcatctaatgaatgtaaagaaaagtcataccaagaagtatcttttgacccagcaagaggtcttaaattggaagaaatcacagtttctagaccagattcaaaagaagtcaggtatctagaattctcagacagaaaagaccttcatcatcagggcagcaaaagtgatgataaactttgtggaactctcaaatctgaaatagcaacacaggaactaactggagagaaatttctagaaatggcaaaccctaatgttgcaggtctagaagcaggatccattgaggacatagtgactcagagaggttccagagtcttgggatcctttcttccagagaaactgttcaaaggagtgtctcaaaaagagaatacagggcaacagaatgccatcattagtcctactgttctagagaccagtgaagaaaagacagtgtccctaacagtatgctctgcagtgaagacagagaagacaccacaggaaaagctcagagaaagccctggcagtgaacaaactcccttcatgactgcacctgaaggaaagggaaatggaggtgtaaacccagagcccttcagagcaactcagaatgtatttacccggcaactctgtttagaacatgatgaaaagctagtatcctatctgtctctgttacggaacattgaaatgaggaccaaacagattcaacctttggagctaaacctggcagaactacaggatctgctgtgtcaggccaaggtattagaaagggagttaaaggatctgaccaccttggtcagtcaggagctggagtgtgtgaatcagattatcatcagccagcctcaagaagttcctgctcaactgttgaaggctctagagaaagatgccaagaatcttcagaagtctctcagctctgtgagtgacacttggaattccaggctactccacttccagaatgctgtggaaatagaaaagactaaagtgttaaatcagcacacacagctagaaggccgacttcaagatctgagagcctgggttggcaataaaaatcttattctgaacagcaagggatctaacagtgaaatagatgttgacagcctgaacctctgcctccaacagtatgaggatttgaaacagcccatggctgaaaggaaagctcagctggatgctcttgcttttgatattcagttctttatctcagaacatgcccaggacttgtcccctcagcagaatcgacagatgctgaggcttctgaatgaactgcagaggtccttccaggacattttggaacagactgccgctcaggtggatgccttgcagggccatcttcaacaaatggagcaggaagccctggtgaagaccctgcagaaacaacaaaatacctgtcaccagcaactggaggatctttgcagttgggtaggacaggcagaaagagcactggcaggccaccaaggcagaaccacccagcaggatctctctgctttgcagaagaaccaaagtgacttgaaggatttacaggatgacattcagaatcgtgccacctcatttgccactgttgtcaaggacattgaggggttcatggaagagaatcagaccaagctgagcccacgtgagttgacagctcttcgggaaaagcttcatcaggctaaggagcaatatgaggcgctccaggaagagacacgtgtggcccagaaggaactggaggaagcagtgacctccgccttacagcaggagactgaaaagagtaaagcagcaaaggaactggcagagaacaagaagaagatcgatgctctcctggattgggtaacttcagtaggatcatctggtggacagctgctgaccaaccttccaggaatggagcagctctcgggagctagcttggagaaaggagccttggacaccactgatggttacatgggggtgaatcaagccccagagaaactggacaagcaatgtgagatgatgaaggcccgtcaccaagaattgctgtcccagcagcaaaatttcattctggccacccagtcagctcaggccttcttggatcagcatggccacaatctcacacctgaggagcaacagatgctgcaacagaagctgggagagctaaaggaacaatactctacttccctggcccaatcagaggcagaactgaagcaggtgcagacacttcaggatgagttgcagaaatttctgcaggatcataaagagtttgaaagctggttggaacgatccgagaaagagctggagaacatgcataagggaggcagcagccccgagacccttccctccctgctaaagcggcaaggaagcttctcagaggatgtcatttcccacaaaggagacttgagatttgtgactatctcaggacagaaagtcttggacatggaaaacagttttaaggaaggcaaagaaccatcagaaattggaaacttagtaaaggacaagttgaaggatgcaacagaaagatacactgctctccactcaaagtgtacacgattaggatctcacctgaatatgctgttaggccagtatcatcaattccaaaacagtgctgacagcctgcaggcctggatgcaggcttgtgaggccaacgtggagaagctcctctcagatactgttgcctctgaccctggagttctccaggagcagcttgcaacaacaaagcagttgcaggaggaattggctgagcaccaagtacctgtggaaaaactccaaaaagtagctcgtgacataatggaaattgaaggggagccagccccagaccacaggcatgttcaagaaactacagattccatactcagccacttccaaagcctctcctatagcctggctgagcgatcttctctgctgcagaaagcaattgcccaatctcagagtgtccaggaaagcctggagagcctgttgcagtctattggggaagttgaacaaaacctggaagggaagcaggtgtcatcactctcatcaggagtcatccaggaagccttagccacaaatatgaaattgaagcaggacattgctcggcaaaagagcagcttggaggccacccgtgagatggtgacccgattcatggagacagcagacagtactacagcagcagtgctgcagggcaaactggcagaggtgagccagcggttcgaacagctctgtctacagcagcaagaaaaggagagctccctaaagaagcttctaccccaggcagagatgtttgaacacctctctggtaagctgcagcagttcatggaaaacaaaagtcggatgctggcctctggaaatcagccagatcaagatattacacatttcttccaacagatccaggagctcaatttggaaatggaagaccaacaggagaacctagatactcttgagcacctggtcactgaactgagctcttgtggctttgcgctggacttgtgccagcatcaggacagggtacagaatctaagaaaagacttcacagagctacagaagacagttaaagagagagagaaagatgcatcatcttgccaggaacagttggatgaattccggaagctggtcaggaccttccagaaatggttgaaagaaactgaagggagtattccacctacggaaacttctatgagtgctaaagagttagaaaagcagattgaacacctgaagagtctactagatgactgggcaagtaagggaactctggtggaagaaatcaattgcaaaggtacttctttagaaaatctcatcatggaaatcacagcacctgattcccaaggcaagacaggttccatactgccctctgtaggaagctctgtaggcagtgtaaacggataccacacctgcaaagatctgacggagatccagtgtgacatgtcagatgtaaacttgaagtatgagaaactagggggagtacttcatgaacgccaggaaagccttcaggctatcctcaacagaatggaggaggttcacaaggaggcaaactctgtgctgcagtggctggaatcaaaagaggaagtcctgaaatccatggatgccatgtcatctccaaccaagacagaaacagtgaaagcccaagctgaatctaacaaggccttcctggctgagttggaacagaattctccaaaaattcaaaaagtaaaggaagccctggctggattactggtgacatatcccaactcacaggaagcagaaaattggaagaaaattcaggaagaactcaattcccgatgggaaagggccactgaggttactgtggctcggcaaaggcagctagaggaatctgcaagtcatctggcctgcttccaggctgcagaatcccagctccggccgtggctgatggagaaagaactgatgatgggagtgctggggcccctgtctattgaccccaacatgttgaatgcacaaaagcaacaggtccagtttatgctaaaggaatttgaagcacgcaggcaacagcatgagcaactgaatgaggcagctcagggcatcctaacaggccctggagatgtctctctgtccaccagccaagtacagaaagaactccagagcatcaatcagaaatgggttgagctgactgacaaactcaactcccgttccagccaaattgaccaagctattgttaagagcacccagtaccaggaactgctccaggacttatcagagaaggtgagggcagttggacaacggctgagtgtccagtcagctatcagcacccaaccagaggctgtaaagcagcaattggaagagaccagtgaaattcgatctgacttggagcagttagaccacgaggttaaggaggctcagacactgtgcgatgaactctcagtgctcattggtgagcagtacctcaaggatgaactgaagaagcgtttggagacagttgccctgcctctccaaggtttagaagaccttgcagccgatcgcattaacagactccaggcagctcttgccagcacccagcagttccagcaaatgtttgatgagttgaggacctggttggatgataaacaaagccagcaagcaaaaaactgcccaatttctgcaaaattggagcggctacagtctcagctacaggagaatgaagagtttcagaaaagtcttaatcaacacagtggctcctatgaggtgattgtggctgaaggggaatctctacttctttctgtacctcctggagaagagaaaaggactctacaaaaccagttggttgagctcaaaaaccattgggaagagcttagtaaaaaaactgcagacagacaatccaggctcaaggattgtatgcagaaagctcagaaatatcagtggcatgtggaagaccttgtgccatggatagaagattgtaaagctaagatgtctgagttgcgagtcactctggatccagtgcagctagagtccagtctcctaagatcaaaggctatgctgaatgaggtggagaagcgccgctccctgctggaaatattgaatagtgctgctgacattctgatcaattcttcagaagcagatgaggatggaatccgggatgagaaggctgggatcaaccagaacatggatgctgttacagaagagctgcaggccaaaacagggtcactcgaagaaatgactcagaggctcagggagttccaggaaagctttaagaatattgaaaagaaggttgaaggagccaaacaccaacttgagatctttgatgctctgggttctcaagcctgtagcaacaagaacctggagaagctaagagctcaacaggaagtgctgcaggccctagagcctcaggtagactatctgaggaactttactcagggtctggtagaagatgccccagatggatctgatgcttctcaacttctccaccaagctgaggtcgcccagcaagagttcctcgaagttaagcaaagagtgaacagtggttgtgtgatgatggaaaacaagctggaggggattggccagtttcactgccgggtccgagagatgttctctcaattggcagacctggatgatgagctagatggcatgggtgctattggcagagacactgatagcctccagtcccaaatcgaggatgtccggctattccttaacaaaattcacgtcctcaaattagacatagaggcctctgaagcagagtgtcgacatatgctagaagaagaggggactctggatttgttaggtctcaaaagggagctagaagccctgaacaaacagtgtggcaaactgacagagagggggaaagctcgtcaggaacagctggaactgacactaggccgtgtagaggacttctacaggaaattgaaaggactcaatgacgcgaccacagcagcagaggaggcagaggccctccagtgggtagtggggaccgaagtggaaatcatcaaccaacaattagcagattttaaaatgtttcagaaagaacaagtggatcctcttcagatgaaattgcagcaggtgaatggacttggccagggattaattcagagtgcaggaaaagactgtgatgtacagggtttagaacatgacatggaagagatcaatgctcgatggaatacattgaataaaaaggtcgcacaaagaattgcacagctacaggaagctttgttgcattgtgggaagtttcaagatgccttggagccattgctcagctggttggcagataccgaggagctcatagccaatcagaaacctccatctgctgagtataaagtggtgaaagcacagatccaagaacagaagttgctccagcggctcctagatgatcgaaaggccacagtagacatgcttcaagcagaaggaggcagaatagcccagtcagcagagctggctgatagagagaaaatcactggacagctggagagtcttgaaagtagatggactgaactactcagtaaggcagcagccaggcaaaaacagctggaagacatcctggttctggccaaacagttccatgagacagctgagcctatttctgacttcttatctgtcacagagaaaaagcttgctaactcagaacctgttggcactcagactgccaaaatacagcagcagatcattcggcacaaggctctggaagaagacatagaaaaccatgcaacagatgtgcaccaggcagtcaaaattgggcagtccctctcctccctgacatctcctgcagaacagggtgtgctgtcagaaaagatagactcattgcaggcccgatacagtgaaattcaagaccgctgttgtcggaaggcagccctacttgaccaagctctgtctaatgctaggctgtttggggaggatgaggtggaggtgctcaactggctggctgaggttgaggacaagctcagttcagtgttcgtaaaggatttcaaacaggatgtcctgcacaggcagcatgctgaccacctggctttaaatgaagaaattgttaatagaaagaagaatgtagatcaagctattaaaaatggtcaggctcttctaaaacaaaccacaggtgaggaggtgttacttatccaggaaaaactagatggtataaagactcgttacgcagacatcacagttactagctccaaggccctcagaactttagagcaagcccggcagctggccaccaagttccagtctacttatgaggaactgaccgggtggctgagggaggtggaggaggagctggcaaccagtggaggacagtctcccacaggggaacagataccccagtttcagcagagacagaaggaattaaagaaggaggtcatggagcacaggctggtgttggacacagtgaatgaggtgagccgtgctctcttagagctggtgccctggagagccagagaagggctggataaacttgtgtccgatgctaacgagcagtacaaactagtcagtgacactattggacaaagggtggatgaaattgatgctgctattcagagatcacaacagtatgagcaagctgccgatgcagaactagcttgggttgctgaaacaaaacggaaactgatggctctgggtccaattcgcctggaacaggaccagaccacagctcagcttcaggtacagaaggctttctccattgacattattcgacacaaagattcaatggatgaactcttcagtcaccgtagtgaaatctttggcacatgtggggaggagcaaaaaactgtattacaggaaaagacagagtctctaatacagcaatatgaagccattagcctactcaattcagagcgttatgcccgcctagagcgggcccaggtcttagtaaaccagttttgggaaacttatgaagagctcagcccctggattgaggaaactcgggcactaatagcacagttaccctctccagccattgatcatgagcagctcaggcagcaacaagaggaaatgaggcaattaagggaatctattgctgaacacaaacctcatattgacaaactactaaagataggcccacaactaaaggaattaaaccctgaggaaggggaaatggtggaagaaaaataccagaaagcagaaaacatgtatgcccaaataaaggaggaggtgcgccagcgagccctggctctggatgaagccgtgtcccagtccacacagtttcatgataaaattgagcctatgttggagacactggagaatctttcctctcgcctgcgtatgccaccactgatccctgctgaagtagacaagatcagagagtgcatcagtgacaataagagtgccaccgtggagctagaaaaactgcagccatcctttgaggccttgaagcgccgtggagaggagcttattggacgatctcagggagcagacaaggatctggctgcaaaagaaatccaggataaattggatcaaatggtattcttctgggaggacatcaaagctcgggctgaagaacgagaaatcaaatttcttgatgtccttgaattagcagagaagttctggtatgacatggcagctctcctgaccaccatcaaagacacccaggatattgtccatgacttggaaagcccaggcattgatccttccatcatcaaacaacaggttgaagctgctgagactattaaggaagagacagatggtctgcatgaagagctggagtttattcggatccttggagcagatttgatttttgcctgtggagaaactgagaagcctgaagtgaggaagagcattgatgagatgaataatgcttgggagaacttaaacaaaacatggaaagagaggctagaaaaacttgaggatgctatgcaagctgctgtgcagtatcaggacactcttcaggctatgtttgactggctagataacactgtgattaaactctgcaccatgccccctgttggcactgacctcaatactgttaaagatcagttaaatgaaatgaaggagttcaaagtagaagtttaccaacagcaaattgagatggagaagcttaatcaccagggtgaactgatgttaaagaaagctactgatgagacggacagagacattatacgagaaccactgacagaactcaaacacctctgggagaacctgggtgagaaaattgcccaccgacagcacaaactagaaggggctctgttggcccttggtcagttccagcatgccttagaggaactaatgagttggctgactcataccgaagagttgttagatgctcagagaccaataagtggagacccaaaagtcattgaagttgagctcgcaaagcaccatgtcctaaaaaatgatgttttggctcatcaagccacagtggaaacagtcaacaaagctggcaatgagcttcttgaatccagtgctggagatgatgccagcagcttaaggagccgtttggaagccatgaaccaatgctgggagtcagtgttacagaaaacagaggagagggagcagcagcttcagtcaactctgcagcaggcccagggcttccacagtgaaattgaagatttcctcttggaacttactagaatggagagccagctttctgcatctaagcccacaggaggacttcctgaaactgctagggaacagcttgatacacatatggaactctattcccagctgaaagccaaggaagagacttataatcaactacttgacaagggcagactcatgcttctaagccgtgacgactctgggtctggctccaagacagaacagagtgtagcacttttggagcagaagtggcatgtggtcagcagtaagatggaagaaagaaagtcaaagctggaagaggccctcaacttggcaacagaattccagaattccctacaagaatttatcaactggctcactctagcagagcagagtttaaacatcgcttctccaccaagcctgattctaaatactgtcctttcccagatagaagagcacaaggtttttgctaatgaagtaaatgctcatcgagaccagatcattgagctggatcaaactgggaatcaattaaagttccttagccaaaagcaggatgttgttctgatcaagaatttgttggtgagcgtgcagtctcgatgggagaaggttgtccagcgatctattgaaagagggcgatcactagatgatgccaggaagcgggcaaaacaattccatgaagcttggaaaaaactgattgactggctagaagatgcagagagtcacctggactcagaactagagatatccaatgacccagacaaaattaaacttcagctttctaagcataaggagtttcagaagactcttggtggcaagcagcctgtgtatgataccacaattagaactggcagagcactgaaagaaaagactttgcttcccgaagatagtcagaaacttgacaatttcctaggagaagtcagagacaaatgggatactgtttgtggcaagtctgtggagcggcagcacaagttggaggaagccctgctcttttcgggtcagttcatggatgctttgcaggcattggttgactggttatacaaggtggagccacagctggctgaggaccagcccgtgcacggggaccttgacctcgtcatgaacctcatggatgcacacaaggttttccagaaggaactgggaaagcgaacaggaaccgttcaggtcctgaagcggtcaggccgagagctgattgagaatagtcgagatgacaccacttgggtaaaaggacagctccaggaactgagcactcgctgggacactgtctgtaaactctctgtttccaaacaaagccggcttgagcaggccttaaaacaagcggaagtgtttcgagacacagtccacatgctgttggagtggctttctgaagcagagcaaacgcttcgctttcggggagcacttcctgatgacacagaggccctgcagtctctcattgacacccataaggaattcatgaagaaagtagaagaaaagcgagtggacgttaactcagcagtagccatgggagaagtcatcctggctgtctgccaccccgattgcatcacaaccatcaaacactggatcaccatcatccgagctcgcttcgaggaggtcctgacatgggctaagcagcaccagcagcgtcttgaaacggccttgtcagaactggtggctaatgctgagctcctggaagaacttctggcatggatccagtgggctgagaccaccctcattcagcgggatcaggagccaatcccgcagaacattgaccgagttaaagcccttatcgctgagcatcagacatttatggaggagatgactcgcaaacagcctgacgtggaccgggtcaccaagacatacaaaaggaaaaacatagagcctactcacgcgcctttcatagagaaatcccgcagcggaggcaggaaatccctaagtcagccaacccctcctcccatgccaatcctttcacagtctgaagcaaaaaacccacggatcaaccagctttctgcccgctggcagcaggtgtggctgttagcactggagcggcaaaggaaactgaatgatgccttggatcggctggaggagttgaaagaatttgccaactttgactttgatgtctggaggaaaaagtatatgcgttggatgaatcacaaaaagtctcgagtgatggatttcttccggcgcattgataaggaccaggatgggaagataacacgtcaggagtttatcgatggcattttagcatccaagttccccaccaccaagttagagatgactgctgtggctgacattttcgaccgagatggggatggttacattgattattatgaatttgtggctgctcttcatcccaacaaggatgcgtatcgaccaacaaccgatgcagataaaatcgaagatgaggttacaagacaagtggctcagtgcaaatgtgcaaaaaggtttcaggtggagcagatcggagagaataaataccggttcttcctcggcaatcagtttggggattctcagcagttgcggctggtccgtattctgcgcagcaccgtgatggttcgcgttggtggaggatggatggccttggatgaatttttagtgaaaaatgatccctgccgagttcaccatcctgggagtaaaataaagcgctctgattccagctcttcgatttccagtcagtctcccatagcacgaggtagaactaacattgaacttagagagaaattcatcctaccagagggagcatcccagggaatgacccccttccgctcacggggtcgaaggtccaaaccatcttcccgggcagcttcccctactcgttccagctccagtgctagtcagagtaaccacagctgtacatccatgccatcttctccagccaccccagccagtggaaccaagacttcacttcagttctctcgctgttatgacaaaccctggttggtaaacagtaaagctggcacccctatcagggacagccattctcctgacctccagctgcccacccccgaggttatcccatcatcaggtagcaagttgaaacgaccaacaccaacttttcattctagtcggacatcccttgctggtgataccagcaatagttcttccccggcctccacaggtgccaaaactaatcgggcagaccctaaaaagtctgccagtcgccctgggagtcgggctgggagtcgagccgggagtcgagccagcagccggcgaggaagtgacgcttctgactttgacctcttagagacgcagtctgcttgttccgacacttcagaaagcagcgctgcagggggccaaggcaactccaggagagggctaaacaaaccttccaaaatcccaaccatgtctaagaagaccaccactgcctcccccaggactccaggtcccaagcgataacactgtctaagcacccccaagccactatccactttgaatcctgctccatacattgggtgtatatttattctgaacgggagaagttatattgttaaaagtgtaaaagaataattgtgttatgaagctgccttattttttttctttttgtaagttactattttcatgtgaatatttatgtagataaaatttgcctcctggtaaccctgtaatggatggggcccagaaatgaaatatttgagaaaaacaagtgaaaaggtcaagatacaaatgtgtattaaaaaaaaaaaagcctattaatagggtttctgcgcggtgcagggttgtaaacctgctttatcttttaggattattcctaaatgcatcttctttataaacttgacttgctatctcagcaagataaattatattaaaaaaataagaatcctgcagtgtttaaggaactctttttttgtaaatcacggacacctcaattagcaagaactgaggggagggctttttccattgtttaatgttttgtgatttttagctaaagagagggaacctcatctaagtaacatttgcacatgatacagcaaaaggagttcattgcaatactgtctttggatattgtttcagtactgggtgtttaaaggacaaatagctgctagaattcaggggtaaatgtaagtgttcagaaaacgtcagaacatttggggttttaaactgatttgttgctccctatccagcctagacaccagtaactcttgtgttcaccaggacccagacccttggcaagggataggctcgttggtgacattgtgaatttcagatttgttttatccactttttttgctatttatttaaatggtcgatcaacttcccacaaactgaggaatgaattccacgagcctgttctgaaaatgtggacgtaagacaaacacgtgctcgtcctttaatggagttcaccagcacacttgttaaccagtcctgtttgctttcgtctttttttgtgcgtaataaagtcaactgaccaagtgaccatgaaaaggggctgtctggggctcctgttttttagctgctgttcttcagctccgaccatgttgctgtgtgattatctcaattggttttaattgaggcagaaactgaagctctaccaatgaactgtttagaaacaagacacacttttgtattaaaattgcttgcagtaacaaatattttgtatttcctgattttcttttcaactattaccttatctataaatgttaccctggggtataatcatgttgtaggtacttaaatgcattccgcaaatcaaaatatcttgatggataaattatagagcttaatagatcttgttttatttcatccttgttaattttgtttaatatggctgggcatggtggc

SEQ ID NO: 153911 - DNA, 24319 bp, Homo sapiens
  Payload ID: 10253
  Gene Symbol: MACF1
  Gene Name: microtubule-actin crosslinking factor 1
  ENST ID: ENST00000567887
  CDS Start-End: 158-22936
gaaactgaggtacagataggcaggactagaacctctgcttcccaagtcccagtgttccttatgggaccccttttgtctgctcacattcacccctttctccttcagatcacttctccctgggctcccaggccctcctgcagcagcccccgcctgggccatgtcttcctcagatgaagagacgctcagtgagcggtcatgtcggagtgagcggtcttgtcggagtgagcgatcttacaggagcgagcggtcggggagcctgtctccctgtcccccaggggacaccttgccctggaacctgccactgcatgagcagaaaaagcggaaaagccaggattcggtgctggaccctgcagagcgtgctgtggtcagagtcgctgatgaacgggaccgggttcagaagaaaacgttcaccaagtgggtcaacaagcacttaatgaaggtccgcaagcacatcaatgatctttatgaagatctgcgggatggccataacctgatctctctgttggaggtcctctcaggcatcaaactggagccagcagggctgaagaccctccgtctggtgagcatgccctcctggtgccatacaaacaacgaggagcaggcggaggaagatgatgatgatgtaccccgggagaagggcaggatgcgttttcataggctgcagaatgtgcagattgccctggacttcctaaagcagcgacaggtgaaactagtgaatattcgcaatgatgacatcacagatggcaaccccaagttgaccctgggtctgatctggaccattattttgcatttccagatctctgacatctacattagtggagaatcaggggatatgtcagccaaggagaaactactcctgtggacccagaaggtgacagctggttacacaggaatcaaatgcaccaacttttcctcctgctggagtgatgggaagatgttcaatgcactcattcaccgataccgacccgatctagtagacatggagagggtgcaaatccaaagtaaccgagagaatctggaacaggcttttgaagtggcagaaagactgggggtcactcgcctgctggatgcagaagatgtggatgtgccatctccagatgaaaagtctgtaatcacttatgtgtcttcgatttatgatgccttccctaaagttcctgagggtggagaagggatcagtgctacggaagtggactccaggtggcaagaataccaaagccgagtggactccctcattccctggatcaaacagcatacaatactgatgtcagataaaacttttccccaaaaccctgttgaactaaaggcactttataaccaatatatacacttcaaagaaacagaaattctggccaaggagagagaaaaaggaagaattgaggaattatataaattactagaggtgtggattgaatttggccgaattaaactgcctcaaggttatcaccctaatgatgtggaagaagagtggggaaagctcatcatagagatgctggaacgagagaaatcacttcggccggctgtggagaggctggaattgctgctacagattgcaaacaaaatccagaatggtgctttgaactgtgaagaaaaactgacactagctaagaatacactgcaggctgatgctgctcacctggaatcaggacaaccggtacaatgtgagtcagatgtcattatgtacattcaggagtgtgaaggtctcatcaggcagctgcaggtggatctccagatcctgcgggatgagaattactaccagctagaagagctggcttttagggtcatgcgtcttcaggatgagctggtcaccttgcgtctagagtgtacaaacctgtaccggaagggtcatttcacttcacttgaattggttccaccctctactttaaccaccactcatctgaaagcagaacccttaaccaaggcaacccattcttcttctacctcctggttccgaaagcctatgactcgggctgaacttgtggccatcagctcctctgaagatgaaggcaatctccgatttgtgtatgaactactgtcttgggtagaagagatgcagatgaaactggagcgagcagagtggggcaatgacctgcctagtgtggagttgcagctagaaacacagcagcacatccatacgagtgtagaagagctgggctcaagtgtcaaggaggccaggttgtatgagggaaagatgtcccagaatttccataccagctatgctgaaactcttggaaagctggagacacagtattgtaaattgaaggaaacttctagcttccggatgaggcaccttcagagcctgcataaatttgtttccagagctacagctgagttgatctggttgaatgagaaggaggaggaggaactagcatatgactggagtgacaacaattccaatatctcagccaagagaaattacttctctgagttgacaatggaactggaggagaaacaggatgtgtttcgttctctacaagatacagcagaactactttcacttgagaaccacccagccaagcagacagtggaggcttacagtgctgctgtccagtcccagttgcagtggatgaagcagctgtgcctgtgtgttgagcagcatgtgaaagagaatactgcttattttcagttcttcagtgatgcacgagagctggagtcattcttgaggaacctccaagattccattaaacgaaaatattcctgtgaccacaacaccagcttatcccgccttgaagacctgctccaggactccatggatgaaaaggagcagcttatacagtccaagagttccgttgccagtctcgttgggagatcaaaaaccatcgttcagctaaaaccacgcagtccagaccatgtgttaaagaacaccatttctgtcaaggctgtctgtgactacaggcagatcgagattactatttgcaaaaatgatgaatgtgtgctagaagataattctcagcggaccaaatggaaagtgatcagccccacagggaacgaggcaatggtgccgtcagtctgcttcctcatccccccacccaataaggatgccattgagatggccagcagggtcgaacaatcttatcagaaggttatggccctttggcatcagctgcatgttaacaccaaaagccttatctcttggaactatctgcgtaaagaccttgaccttgtacagacctggaacctagaaaagcttcgatcctcagcaccaggggagtgccatcagattatgaagaaccttcaggcccactatgaagactttctgcaggatagtcgtgactctgtgctgttctcagtggctgatcgcttgcgcttggaagaggaggtggaagcttgtaaagcccgcttccagcacctgatgaagtccatggagaatgaggacaaagaggagactgtggccaagatgtacatttcagagttgaagaacatccggctacgcctggaggagtatgaacagagggtggtcaaacgaattcagtctctagccagctctaggactgacagagatgcctggcaggacaatgcattaaggattgcagagcaagagcacacccaggaggatttacagcaattgaggtcagacttggatgcagtttctatgaaatgtgacagctttctccatcagtctccatctagttcaagtgtcccaactctgcgctcagaactgaatctgctggtggagaagatggaccatgtctatggtctctctactgtatatctgaataagttaaagacagttgatgttatagtacgtagcatacaggatgctgaactcttggtcaaaggttatgagattaagctgagtcaagaagaagtagtactggcagatctctcagctctggaggcccattggtcgacattacggcactggcttagtgatgtgaaggacaagaattcagtgttttcagtcctggatgaggaaattgccaaggccaaggtagtggcagagcagatgagtcgtctgacaccagagcgaaatctggatttggagcgctatcaggaaaaaggctcccagctgcaggagcgttggcaccgagtcattgcccagctcgagattcgccaatctgagctagaaagtatccaggaagttctgggagattaccgagcctgccatggaactctcatcaagtggattgaggaaaccactgcccagcaggaaatgatgaagccaggccaggcagaggatagcagagtgctttcggagcagctcagccagcagacggccctatttgcagaaattgagagaaatcagacaaaactggatcaatgtcaaaaattttcccagcagtactctactattgtaaaggactatgaattgcaactgatgacatacaaggcctttgtggaatcgcagcagaaatcccctggcaagcgccgtcgcatgctttcctcttcagatgccatcactcaagagttcatggacttaaggactcgctacacggcattggtgactttaacaactcagcacgtgaaatacatcagtgatgcactccggcgtctggaggaggaggagaaagtggtagaagaggagaaacaagaacatgtggagaaggttaaagaacttttgggctgggtgtctaccctagcgaggaatacacaaggaaaagctacctcatccgagaccaaagaatcaacagacattgaaaaagctattttggaacagcaggttctgtcagaagagctgacaacaaagaaagaacaagtctctgaagctattaaaacatcacagatcttcttggccaagcatggtcataagctctcagaaaaagagaagaaacaaatatctgagcaattgaatgccctaaacaaggcttaccatgacctttgtgatggttctgcaaatcagcttcagcagcttcagagccagttggctcaccagacagaacaaaaggaatgcagagcagttgctggggtgattgacctaggcacagtggagatatttcccatcttcaaagccatgcaaaagggcctccttgaccaagacacaggcctagtgcttctggaatctcaggttatcatgtctggcctcattgcccctgagacgggtgaaaacctctctttggaggagggcatagccagaaacctcattaatccccagatgtaccagcagctccgggagctacaggatgccctggccttaataagcaggcttactgagagcagaggccctctttctgtggtggaagcaattgaaaagagaataatcagtgagacagttggactgaaaatcttagaagctcacctggcaactggaggtttcagtctttcccctagtgagaactgtattaacctggaagaggcttttcatcaaggcctcatttctgcatggcttcattcagtattagagtcttatcttagaacatccaagaatttgatagaccctaacacagctgagaaaattggtttgctggatctgatgcagcgatgtattgtccaccaggaatcaggattcaaattactgcctgtcaaacaattggcaggggggatggtgagcttgaaatcaggccggaaggttagcattttccgtgcagttcaggaagggctaatagataggcaggtcactgtccggttgctggaagctcagctttttgctggtggcatagtagatccaagaacaggacacagacttacagtggaagaggctgtaagacataatctgattgaccaagatatggcctgtgctatcctcataaggcagcttcagacaggaggcatcatagacactgtcacggggcaaaggctaacaatagatgaagcagtgagcaatgatctagtagctgctaagatcgcccttgtgattctggagtccctctggtcattcatggggttgctgtggcctgaatctggagagatcctcccaattacagatgccctagaacaaggtattgtgtctactgaactagcacataaaatccttagtaaccgacagcatattaaggctctgtttctaccagcaaccacagagattttgtcctggaagaaagcaatagaaagtggtatcctggatagagatcttgccaataacttaaaatcgatttgtatacctgatgtgatgccccacatgcaactagcagactctgcagaacaaaatattaatcctggagcagcagttctaccgtgcagcaagagccaccctaaggccacagcaagccagagtgagaatctgttgttccagctgatgactcacagctatattaatgtgcaaaatggacagaggctgcttctgttagataaagagctgatggagacactaacatccagagatgagtatcaaacaagtcctccaaaagtggttgaaattgggcatcaaaggcaaaaaactcctgagggattgcaagaatcagctaatgtgaaaatctcaggaactttcagcagtgggtggactgtgaggctgcctgagttccagttttcttctcagaacaaagaatatcccgatcgggaagattgcactacagaaaaaggcaaaaagaccactgtagaaacagaagattcttctgtagagaaccctgaacaggatctgtttgtagaacaaaaagagagaaatccaaacattgatgctttgaaggtaataaataaagtcaaattagaggtacaaaggcagttgataggtacccaaagggaagaccaaacagcagtgtctgtcagagaaaatgccagcaggggacacctcctgaccatacctcctgctgaggcggaaggtgtgccgttggtggttgacaaagatgttttttctgttgaaacaccaaagaaagaacatcaacctctaagaaacacttcctttacatgtcagaatgaacaagcacacactcttgagactgaatatattcatgatgaaactggaggatctcacataaaaccccaaagcaaaaagttacaagttcaggtaaagaaaactctaggtataaagttagaactaaagtctgaaactgatgggaatgttcatcctctggacaaaaaggaaatgttaaagaaaacatttctggctaaggatgaccataaagaaagtcaagaagcacagaacatcgcaggtggtagtatgatgatgtcagaaaagaccgatgaggaagatagtggcagggaaatttttctgtcatgcagtcatccattagaattgcttgaagaagctaccttaaatgtattatctgcacagttactagatggtggtatctttcatgaacaaacaggtcaaaagctcttactaaatgaagcaatatcccgaggcattgtgccaagtcacactgccgtgaagcttatggagaagctgaacatgtttcaggggttctttgactctcagacttgtgagtctttgacaactgaagaagtcattaatgaaggtctgatggatgagaaattattacataatgtcctcatggcagacaaagctataagtggtgtcttagacccccgtacccagacactgtgctctgtaaaggatgcagttacagttggacttcttgacaaggaaacagccaccagaattttagagaggcaggtggtgactggtggaattattgatctgaaacgaggcaaaaaagtttcagtaactttggcctcaactcttggcttggtggacgttgctgaccagccagaacttataaatctggagaaagcttccaaaggtagagatgctgaaaaaacagttagggagagattaattagtttacaaatggaaacaacaggacttatagaccctgatagtaaagcacctttaacagttgtgcagtccattgacagaggtcttttggagagagaggaggccgttcgtttgttgactaagcaagtggtagatggaggtatcattcaccatatatctgggatgagactttctgttgataatgccttcagacatggcttaattggtgaagatttagccgagaaactcaaaagagttgagaacttaaacatccatcagatttttaatcctgaaacgaaggaaaatatttccctccctaaagccataaaattagatcttattacctcagacctgaaaagagaaatccaggaggttcaggcctttactggaaactttgtggatctcatttctggtcagagattgaccttggcagaagctaaaaaagaaggactgttaactaatgaagcagtattgtctccaggaatgatgcatggcattgtagatcccgagaactgcagaattgtcccctactcagaattagtcaagaaatgtaagattgatattgaatctggacagagatatctagaagtaattcccttctcagacattaaagatggggtgagcgacaaagtgcttacattgtctcaagcaattcagcttggaaaagtagactttgcatctacgctgaaggttctagaagcccaggcaaatactggtggaatcatagatactgctactggaaaaagactgacattggcatcagctttggaagagaaactggtggatgaaaacatggtcagaattattgcatctcatcaggtgttaaatggaggaattgttgacatatttagtgatcagagagtgactttagtagaagctattgagaaaagactgatcagccctgaactggcaaatatgatccaaatagatagttcagagttcagcgatcacagggctcagattgaaaagcaagaagggattgaagtgtgtgcattacaaaatgaatttctaggaaaggatatgttaattgcttgtaatcagactgctgaaatgagttgtaataaagtagaagagagtgagagattatttcaagttgaaaatcagtctgcacaagaaaaggttaaagtgagagtttctgatggggagcaggcaaaaaagagcagggaaatttccttaaaggaatttgggtgcaaggatcaacgtaagccaagaatgtcttcagatgctaaagaatttatcagtatcataaatcctcataatcttaaaggtaaatccttgggccaagtgtcattgacacacccttactctgaatgtgattttaaacttaaagaagtggctagaaataacatgggaaatgatacaaatgaagagcaggaaaaagcagtgacaaaaatagaaattatttctcatatgaagcagtctacctcatgtctagattctgaagaaataagagaaaatcaaggggaagtgattttggaagtacaagaaacatattgtgaaacgtcaggcaaattgccgagtgagcaggttttgcagcaaccaatgaatgctcgggtgaaaagtaagagagagaagagggaggtgattgtagaagaaagtatcagaacatgcaaaccagcatttctttctgaagaaaagttgtatcaggaaactgccattagagatgagcatgactcccatataaagagccaacctagggaaatgacctcaagtgaaaaagggaaagaagctgatacagaaatgggattttctattacttttaaaattgaagagtcctcttcccaagtggtacctcaaggaatttctgtaaaacatttagatgctttaacactcttcagctctaaacaggccaatgaaggaaaagtaaacaatttaagtctctgcttgactttaaaaccagaagaaaacttatctcgagaaattgcctgtggggcccagagtgaaccattcccttgtatgaccccaagacctgaaggattgcactaccaggaatcagatggaaaagcccaagtgacaggcccatcccaaatttccaaaacagacaagtctttccaaggaaccaccagacaggagaccaactatcaagattcctgggttacttcgaaaactaaggaaaccaaacatcaaatttcctcatctaatgaatgtaaagaaaagtcataccaagaagtatcttttgacccagcaagaggtcttaaattggaagaaatcacagtttctagaccagattcaaaagaagtcaggtatctagaattctcagacagaaaagaccttcatcatcagggcagcaaaagtgatgataaactttgtggaactctcaaatctgaaatagcaacacaggaactaactggagagaaatttctagaaatggcaaaccctaatgttgcaggtctagaagcaggatccattgaggacatagtgactcagagaggttccagagtcttgggatcctttcttccagagaaactgttcaaaggagtgtctcaaaaagagaatacagggcaacagaatgccatcattagtcctactgttctagagaccagtgaagaaaagacagtgtccctaacagtatgctctgcagtgaagacagagaagacaccacaggaaaagctcagagaaagccctggcagtgaacaaactcccttcatgactgcacctgaaggaaagggaaatggaggtgtaaacccagagcccttcagagcaactcagaatgtatttacccggcaactctgtttagaacatgatgaaaagctagtatcctatctgtctctgttacggaacattgaaatgaggaccaaacagattcaacctttggagctaaacctggcagaactacaggatctgctgtgtcaggccaaggtattagaaagggagttaaaggatctgaccaccttggtcagtcaggagctggagtgtgtgaatcagattatcatcagccagcctcaagaagttcctgctcaactgttgaaggctctagagaaagatgccaagaatcttcagaagtctctcagctctgtgagtgacacttggaattccaggctactccacttccagaatgctgtggaaatagaaaagactaaagtgttaaatcagcacacacagctagaaggccgacttcaagatctgagagcctgggttggcaataaaaatcttattctgaacagcaagggatctaacagtgaaatagatgttgacagcctgaacctctgcctccaacagtatgaggatttgaaacagcccatggctgaaaggaaagctcagctggatgctcttgcttttgatattcagttctttatctcagaacatgcccaggacttgtcccctcagcagaatcgacagatgctgaggcttctgaatgaactgcagaggtccttccaggacattttggaacagactgccgctcaggtggatgccttgcagggccatcttcaacaaatggagcaggaagccctggtgaagaccctgcagaaacaacaaaatacctgtcaccagcaactggaggatctttgcagttgggtaggacaggcagaaagagcactggcaggccaccaaggcagaaccacccagcaggatctctctgctttgcagaagaaccaaagtgacttgaaggatttacaggatgacattcagaatcgtgccacctcatttgccactgttgtcaaggacattgaggggttcatggaagagaatcagaccaagctgagcccacgtgagttgacagctcttcgggaaaagcttcatcaggctaaggagcaatatgaggcgctccaggaagagacacgtgtggcccagaaggaactggaggaagcagtgacctccgccttacagcaggagactgaaaagagtaaagcagcaaaggaactggcagagaacaagaagaagatcgatgctctcctggattgggtaacttcagtaggatcatctggtggacagctgctgaccaaccttccaggaatggagcagctctcgggagctagcttggagaaaggagccttggacaccactgatggttacatgggggtgaatcaagccccagagaaactggacaagcaatgtgagatgatgaaggcccgtcaccaagaattgctgtcccagcagcaaaatttcattctggccacccagtcagctcaggccttcttggatcagcatggccacaatctcacacctgaggagcaacagatgctgcaacagaagctgggagagctaaaggaacaatactctacttccctggcccaatcagaggcagaactgaagcaggtgcagacacttcaggatgagttgcagaaatttctgcaggatcataaagagtttgaaagctggttggaacgatccgagaaagagctggagaacatgcataagggaggcagcagccccgagacccttccctccctgctaaagcggcaaggaagcttctcagaggatgtcatttcccacaaaggagacttgagatttgtgactatctcaggacagaaagtcttggacatggaaaacagttttaaggaaggcaaagaaccatcagaaattggaaacttagtaaaggacaagttgaaggatgcaacagaaagatacactgctctccactcaaagtgtacacgattaggatctcacctgaatatgctgttaggccagtatcatcaattccaaaacagtgctgacagcctgcaggcctggatgcaggcttgtgaggccaacgtggagaagctcctctcagatactgttgcctctgaccctggagttctccaggagcagcttgcaacaacaaagcagttgcaggaggaattggctgagcaccaagtacctgtggaaaaactccaaaaagtagctcgtgacataatggaaattgaaggggagccagccccagaccacaggcatgttcaagaaactacagattccatactcagccacttccaaagcctctcctatagcctggctgagcgatcttctctgctgcagaaagcaattgcccaatctcagagtgtccaggaaagcctggagagcctgttgcagtctattggggaagttgaacaaaacctggaagggaagcaggtgtcatcactctcatcaggagtcatccaggaagccttagccacaaatatgaaattgaagcaggacattgctcggcaaaagagcagcttggaggccacccgtgagatggtgacccgattcatggagacagcagacagtactacagcagcagtgctgcagggcaaactggcagaggtgagccagcggttcgaacagctctgtctacagcagcaagaaaaggagagctccctaaagaagcttctaccccaggcagagatgtttgaacacctctctggtaagctgcagcagttcatggaaaacaaaagtcggatgctggcctctggaaatcagccagatcaagatattacacatttcttccaacagatccaggagctcaatttggaaatggaagaccaacaggagaacctagatactcttgagcacctggtcactgaactgagctcttgtggctttgcgctggacttgtgccagcatcaggacagggtacagaatctaagaaaagacttcacagagctacagaagacagttaaagagagagagaaagatgcatcatcttgccaggaacagttggatgaattccggaagctggtcaggaccttccagaaatggttgaaagaaactgaagggagtattccacctacggaaacttctatgagtgctaaagagttagaaaagcagattgaacacctgaagagtctactagatgactgggcaagtaagggaactctggtggaagaaatcaattgcaaaggtacttctttagaaaatctcatcatggaaatcacagcacctgattcccaaggcaagacaggttccatactgccctctgtaggaagctctgtaggcagtgtaaacggataccacacctgcaaagatctgacggagatccagtgtgacatgtcagatgtaaacttgaagtatgagaaactagggggagtacttcatgaacgccaggaaagccttcaggctatcctcaacagaatggaggaggttcacaaggaggcaaactctgtgctgcagtggctggaatcaaaagaggaagtcctgaaatccatggatgccatgtcatctccaaccaagacagaaacagtgaaagcccaagctgaatctaacaaggccttcctggctgagttggaacagaattctccaaaaattcaaaaagtaaaggaagccctggctggattactggtgacatatcccaactcacaggaagcagaaaattggaagaaaattcaggaagaactcaattcccgatgggaaagggccactgaggttactgtggctcggcaaaggcagctagaggaatctgcaagtcatctggcctgcttccaggctgcagaatcccagctccggccgtggctgatggagaaagaactgatgatgggagtgctggggcccctgtctattgaccccaacatgttgaatgcacaaaagcaacaggtccagtttatgctaaaggaatttgaagcacgcaggcaacagcatgagcaactgaatgaggcagctcagggcatcctaacaggccctggagatgtctctctgtccaccagccaagtacagaaagaactccagagcatcaatcagaaatgggttgagctgactgacaaactcaactcccgttccagccaaattgaccaagctattgttaagagcacccagtaccaggaactgctccaggacttatcagagaaggtgagggcagttggacaacggctgagtgtccagtcagctatcagcacccaaccagaggctgtaaagcagcaattggaagagaccagtgaaattcgatctgacttggagcagttagaccacgaggttaaggaggctcagacactgtgcgatgaactctcagtgctcattggtgagcagtacctcaaggatgaactgaagaagcgtttggagacagttgccctgcctctccaaggtttagaagaccttgcagccgatcgcattaacagactccaggcagctcttgccagcacccagcagttccagcaaatgtttgatgagttgaggacctggttggatgataaacaaagccagcaagcaaaaaactgcccaatttctgcaaaattggagcggctacagtctcagctacaggagaatgaagagtttcagaaaagtcttaatcaacacagtggctcctatgaggtgattgtggctgaaggggaatctctacttctttctgtacctcctggagaagagaaaaggactctacaaaaccagttggttgagctcaaaaaccattgggaagagcttagtaaaaaaactgcagacagacaatccaggctcaaggattgtatgcagaaagctcagaaatatcagtggcatgtggaagaccttgtgccatggatagaagattgtaaagctaagatgtctgagttgcgagtcactctggatccagtgcagctagagtccagtctcctaagatcaaaggctatgctgaatgaggtggagaagcgccgctccctgctggaaatattgaatagtgctgctgacattctgatcaattcttcagaagcagatgaggatggaatccgggatgagaaggctgggatcaaccagaacatggatgctgttacagaagagctgcaggccaaaacagggtcactcgaagaaatgactcagaggctcagggagttccaggaaagctttaagaatattgaaaagaaggttgaaggagccaaacaccaacttgagatctttgatgctctgggttctcaagcctgtagcaacaagaacctggagaagctaagagctcaacaggaagtgctgcaggccctagagcctcaggtagactatctgaggaactttactcagggtctggtagaagatgccccagatggatctgatgcttctcaacttctccaccaagctgaggtcgcccagcaagagttcctcgaagttaagcaaagagtgaacagtggttgtgtgatgatggaaaacaagctggaggggattggccagtttcactgccgggtccgagagatgttctctcaattggcagacctggatgatgagctagatggcatgggtgctattggcagagacactgatagcctccagtcccaaatcgaggatgtccggctattccttaacaaaattcacgtcctcaaattagacatagaggcctctgaagcagagtgtcgacatatgctagaagaagaggggactctggatttgttaggtctcaaaagggagctagaagccctgaacaaacagtgtggcaaactgacagagagggggaaagctcgtcaggaacagctggaactgacactaggccgtgtagaggacttctacaggaaattgaaaggactcaatgacgcgaccacagcagcagaggaggcagaggccctccagtgggtagtggggaccgaagtggaaatcatcaaccaacaattagcagattttaaaatgtttcagaaagaacaagtggatcctcttcagatgaaattgcagcaggtgaatggacttggccagggattaattcagagtgcaggaaaagactgtgatgtacagggtttagaacatgacatggaagagatcaatgctcgatggaatacattgaataaaaaggtcgcacaaagaattgcacagctacaggaagctttgttgcattgtgggaagtttcaagatgccttggagccattgctcagctggttggcagataccgaggagctcatagccaatcagaaacctccatctgctgagtataaagtggtgaaagcacagatccaagaacagaagttgctccagcggctcctagatgatcgaaaggccacagtagacatgcttcaagcagaaggaggcagaatagcccagtcagcagagctggctgatagagagaaaatcactggacagctggagagtcttgaaagtagatggactgaactactcagtaaggcagcagccaggcaaaaacagctggaagacatcctggttctggccaaacagttccatgagacagctgagcctatttctgacttcttatctgtcacagagaaaaagcttgctaactcagaacctgttggcactcagactgccaaaatacagcagcagatcattcggcacaaggctctggaagaagacatagaaaaccatgcaacagatgtgcaccaggcagtcaaaattgggcagtccctctcctccctgacatctcctgcagaacagggtgtgctgtcagaaaagatagactcattgcaggcccgatacagtgaaattcaagaccgctgttgtcggaaggcagccctacttgaccaagctctgtctaatgctaggctgtttggggaggatgaggtggaggtgctcaactggctggctgaggttgaggacaagctcagttcagtgttcgtaaaggatttcaaacaggatgtcctgcacaggcagcatgctgaccacctggctttaaatgaagaaattgttaatagaaagaagaatgtagatcaagctattaaaaatggtcaggctcttctaaaacaaaccacaggtgaggaggtgttacttatccaggaaaaactagatggtataaagactcgttacgcagacatcacagttactagctccaaggccctcagaactttagagcaagcccggcagctggccaccaagttccagtctacttatgaggaactgaccgggtggctgagggaggtggaggaggagctggcaaccagtggaggacagtctcccacaggggaacagataccccagtttcagcagagacagaaggaattaaagaaggaggtcatggagcacaggctggtgttggacacagtgaatgaggtgagccgtgctctcttagagctggtgccctggagagccagagaagggctggataaacttgtgtccgatgctaacgagcagtacaaactagtcagtgacactattggacaaagggtggatgaaattgatgctgctattcagagatcacaacagtatgagcaagctgccgatgcagaactagcttgggttgctgaaacaaaacggaaactgatggctctgggtccaattcgcctggaacaggaccagaccacagctcagcttcaggtacagaaggctttctccattgacattattcgacacaaagattcaatggatgaactcttcagtcaccgtagtgaaatctttggcacatgtggggaggagcaaaaaactgtattacaggaaaagacagagtctctaatacagcaatatgaagccattagcctactcaattcagagcgttatgcccgcctagagcgggcccaggtcttagtaaaccagttttgggaaacttatgaagagctcagcccctggattgaggaaactcgggcactaatagcacagttaccctctccagccattgatcatgagcagctcaggcagcaacaagaggaaatgaggcaattaagggaatctattgctgaacacaaacctcatattgacaaactactaaagataggcccacaactaaaggaattaaaccctgaggaaggggaaatggtggaagaaaaataccagaaagcagaaaacatgtatgcccaaataaaggaggaggtgcgccagcgagccctggctctggatgaagccgtgtcccagtccacacagtttcatgataaaattgagcctatgttggagacactggagaatctttcctctcgcctgcgtatgccaccactgatccctgctgaagtagacaagatcagagagtgcatcagtgacaataagagtgccaccgtggagctagaaaaactgcagccatcctttgaggccttgaagcgccgtggagaggagcttattggacgatctcagggagcagacaaggatctggctgcaaaagaaatccaggataaattggatcaaatggtattcttctgggaggacatcaaagctcgggctgaagaacgagaaatcaaatttcttgatgtccttgaattagcagagaagttctggtatgacatggcagctctcctgaccaccatcaaagacacccaggatattgtccatgacttggaaagcccaggcattgatccttccatcatcaaacaacaggttgaagctgctgagactattaaggaagagacagatggtctgcatgaagagctggagtttattcggatccttggagcagatttgatttttgcctgtggagaaactgagaagcctgaagtgaggaagagcattgatgagatgaataatgcttgggagaacttaaacaaaacatggaaagagaggctagaaaaacttgaggatgctatgcaagctgctgtgcagtatcaggacactcttcaggctatgtttgactggctagataacactgtgattaaactctgcaccatgccccctgttggcactgacctcaatactgttaaagatcagttaaatgaaatgaaggagttcaaagtagaagtttaccaacagcaaattgagatggagaagcttaatcaccagggtgaactgatgttaaagaaagctactgatgagacggacagagacattatacgagaaccactgacagaactcaaacacctctgggagaacctgggtgagaaaattgcccaccgacagcacaaactagaaggggctctgttggcccttggtcagttccagcatgccttagaggaactaatgagttggctgactcataccgaagagttgttagatgctcagagaccaataagtggagacccaaaagtcattgaagttgagctcgcaaagcaccatgtcctaaaaaatgatgttttggctcatcaagccacagtggaaacagtcaacaaagctggcaatgagcttcttgaatccagtgctggagatgatgccagcagcttaaggagccgtttggaagccatgaaccaatgctgggagtcagtgttacagaaaacagaggagagggagcagcagcttcagtcaactctgcagcaggcccagggcttccacagtgaaattgaagatttcctcttggaacttactagaatggagagccagctttctgcatctaagcccacaggaggacttcctgaaactgctagggaacagcttgatacacatatggaactctattcccagctgaaagccaaggaagagacttataatcaactacttgacaagggcagactcatgcttctaagccgtgacgactctgggtctggctccaagacagaacagagtgtagcacttttggagcagaagtggcatgtggtcagcagtaagatggaagaaagaaagtcaaagctggaagaggccctcaacttggcaacagaattccagaattccctacaagaatttatcaactggctcactctagcagagcagagtttaaacatcgcttctccaccaagcctgattctaaatactgtcctttcccagatagaagagcacaaggtttttgctaatgaagtaaatgctcatcgagaccagatcattgagctggatcaaactgggaatcaattaaagttccttagccaaaagcaggatgttgttctgatcaagaatttgttggtgagcgtgcagtctcgatgggagaaggttgtccagcgatctattgaaagagggcgatcactagatgatgccaggaagcgggcaaaacaattccatgaagcttggaaaaaactgattgactggctagaagatgcagagagtcacctggactcagaactagagatatccaatgacccagacaaaattaaacttcagctttctaagcataaggagtttcagaagactcttggtggcaagcagcctgtgtatgataccacaattagaactggcagagcactgaaagaaaagactttgcttcccgaagatagtcagaaacttgacaatttcctaggagaagtcagagacaaatgggatactgtttgtggcaagtctgtggagcggcagcacaagttggaggaagccctgctcttttcgggtcagttcatggatgctttgcaggcattggttgactggttatacaaggtggagccacagctggctgaggaccagcccgtgcacggggaccttgacctcgtcatgaacctcatggatgcacacaaggttttccagaaggaactgggaaagcgaacaggaaccgttcaggtcctgaagcggtcaggccgagagctgattgagaatagtcgagatgacaccacttgggtaaaaggacagctccaggaactgagcactcgctgggacactgtctgtaaactctctgtttccaaacaaagccggcttgagcaggccttaaaacaagcggaagtgtttcgagacacagtccacatgctgttggagtggctttctgaagcagagcaaacgcttcgctttcggggagcacttcctgatgacacagaggccctgcagtctctcattgacacccataaggaattcatgaagaaagtagaagaaaagcgagtggacgttaactcagcagtagccatgggagaagtcatcctggctgtctgccaccccgattgcatcacaaccatcaaacactggatcaccatcatccgagctcgcttcgaggaggtcctgacatgggctaagcagcaccagcagcgtcttgaaacggccttgtcagaactggtggctaatgctgagctcctggaagaacttctggcatggatccagtgggctgagaccaccctcattcagcgggatcaggagccaatcccgcagaacattgaccgagttaaagcccttatcgctgagcatcagacatttatggaggagatgactcgcaaacagcctgacgtggaccgggtcaccaagacatacaaaaggaaaaacatagagcctactcacgcgcctttcatagagaaatcccgcagcggaggcaggaaatccctaagtcagccaacccctcctcccatgccaatcctttcacagtctgaagcaaaaaacccacggatcaaccagctttctgcccgctggcagcaggtgtggctgttagcactggagcggcaaaggaaactgaatgatgccttggatcggctggaggagttgaaagaatttgccaactttgactttgatgtctggaggaaaaagtatatgcgttggatgaatcacaaaaagtctcgagtgatggatttcttccggcgcattgataaggaccaggatgggaagataacacgtcaggagtttatcgatggcattttagcatccaagttccccaccaccaagttagagatgactgctgtggctgacattttcgaccgagatggggatggttacattgattattatgaatttgtggctgctcttcatcccaacaaggatgcgtatcgaccaacaaccgatgcagataaaatcgaagatgaggttacaagacaagtggctcagtgcaaatgtgcaaaaaggtttcaggtggagcagatcggagagaataaataccggttcttcctcggcaatcagtttggggattctcagcagttgcggctggtccgtattctgcgcagcaccgtgatggttcgcgttggtggaggatggatggccttggatgaatttttagtgaaaaatgatccctgccgagttcaccatcctgggagtaaaataaagcgctctgattccagctcttcgatttccagtcagtctcccatagcacgaggtagaactaacattgaacttagagagaaattcatcctaccagagggagcatcccagggaatgacccccttccgctcacggggtcgaaggtccaaaccatcttcccgggcagcttcccctactcgttccagctccagtgctagtcagagtaaccacagctgtacatccatgccatcttctccagccaccccagccagtggaaccaagacttcacttcagttctctcgctgttatgacaaaccctggttggtaaacagtaaagctggcacccctatcagggacagccattctcctgacctccagctgcccacccccgaggttatcccatcatcaggtagcaagttgaaacgaccaacaccaacttttcattctagtcggacatcccttgctggtgataccagcaatagttcttccccggcctccacaggtgccaaaactaatcgggcagaccctaaaaagtctgccagtcgccctgggagtcgggctgggagtcgagccgggagtcgagccagcagccggcgaggaagtgacgcttctgactttgacctcttagagacgcagtctgcttgttccgacacttcagaaagcagcgctgcagggggccaaggcaactccaggagagggctaaacaaaccttccaaaatcccaaccatgtctaagaagaccaccactgcctcccccaggactccaggtcccaagcgataacactgtctaagcacccccaagccactatccactttgaatcctgctccatacattgggtgtatatttattctgaacgggagaagttatattgttaaaagtgtaaaagaataattgtgttatgaagctgccttattttttttctttttgtaagttactattttcatgtgaatatttatgtagataaaatttgcctcctggtaaccctgtaatggatggggcccagaaatgaaatatttgagaaaaacaagtgaaaaggtcaagatacaaatgtgtattaaaaaaaaaaaagcctattaatagggtttctgcgcggtgcagggttgtaaacctgctttatcttttaggattattcctaaatgcatcttctttataaacttgacttgctatctcagcaagataaattatattaaaaaaataagaatcctgcagtgtttaaggaactctttttttgtaaatcacggacacctcaattagcaagaactgaggggagggctttttccattgtttaatgttttgtgatttttagctaaagagagggaacctcatctaagtaacatttgcacatgatacagcaaaaggagttcattgcaatactgtctttggatattgtttcagtactgggtgtttaaaggacaaatagctgctagaattcaggggtaaatgtaagtgttcagaaaacgtcagaacatttggggttttaaactgatttgttgctccctatccagcctagacaccagtaactcttgtgttcaccaggacccagacccttggcaagggataggctcgttggtgacattgtgaatttcagatttgttttatccactttttttgctatttatttaaatggtcgatcaacttcccacaaactgaggaatgaattccacgagcctgttctgaaaatgtggacgtaagacaaacacgtgctcgtcctttaatggagttcaccagcacacttgttaaccagtcctgtttgctttcgtctttttttgtgcgtaataaagtcaactgaccaagtgaccatgaaaaggggctgtctggggctcctgttttttagctgctgttcttcagctccgaccatgttgctgtgtgattatctcaattggttttaattgaggcagaaactgaagctctaccaatgaactgtttagaaacaagacacacttttgtattaaaattgcttgcagtaacaaatattttgtatttcctgattttcttttcaactattaccttatctataaatgttaccctggggtataatcatgttgtaggtacttaaatgcattccgcaaatcaaaatatcttgatggataaattatagagcttaatagatcttgttttatttcatccttgttaattttgtttaatatggctgggcatggtggc

SEQ ID NO: 153912 - DNA, 1423 bp, Homo sapiens
  Payload ID: 10253
  Gene Symbol: MACF1
  Gene Name: microtubule-actin crosslinking factor 1
  ENST ID: ENST00000602421
  CDS Start-End: 180-545
attgtgggagccgctcccctcggctccgccacgctcccctcgactgcgctccagcctggggcgcgcccggccgccgccgccttcgctgccgccacgggcccgtcttcttcctccttcggctcccaggatcacttctccctgggctcccaggccctcctgcagcagcccccgcctgggccatgtcttcctcagatgaagagacgctcagtgagcggtcatgtcggagtgagcggtcttgtcggagtgagcgatcttacaggagcgagcggtcggggagcctgtctccctgtcccccaggggacaccttgccctggaacctgccactgcatgagcagaaaaagcggaaaagccaggattcggtgctggaccctgcagagcgtgctgtggtcagagtcgctgatgcccttccgagtacatccttctgcttcccccattgcagccttcttagaaatgcagcagcagtctcacccatcaggagcaaaagaaaatcaaagaccaaaaggagaaagcctcagagcttttgcgactgtgtggtctggctataaatttagactgttgcttgaaagaagcgaaaaacctccccttcatagacttccttcttcccatcccccctggcagccgctttgttcctctagccttgtaaaattttctctgtataaaacaggaacatcagccaaacatgtggacttccccactttccattcattagaagaatgcattatttcaaaatctcctgggagcatttaaatgcaaattttgtcaagaaagcaatttgagtcttagagaagctctctagccacaacctaaagcagaagtttcttctttgatttgtgtgtttcttaaaaggaatctcaaccccttgccttctccctgcaacgcccccaggtcttctctgattctcacagcggactcttcccctttttgcccctgttctttcttcacctttggcaagcatcagtcacacatcttgaggaacctgctcacaaagtggcgcgtgtagcagccccaggtgggaatggagggacttttctatgtagtgtaatggacataaggaggcagatgtctgtgtgggggtgagatgtctgtgtggaggtgtttgtatgcgtgatttctgtctgggccttcttaggcctgctggtataaaataatatgggaaatgcagatgactcagcactgacacagtcaagatccccagagttagcatttctatattctctgctgtttacgaaaaatgtgcttgtgccatcaatcagcaactcatcctgcattttccgctaaaagccttttactgaaaaatgcatatacttcaaacttattccccttctttttgtaaactgagctcattagcagctgacaccaaactgagaactagttttgtttgtttgtttgttttagcacggaggattaaactggaaggaaatga

SEQ ID NO: 153913 - DNA, 1574 bp, Homo sapiens
  Payload ID: 10254
  Gene Symbol: MAP1LC3A
  Gene Name: microtubule-associated protein 1 light chain 3 alpha
  Uniprot ID: Q9H492
  ENST ID: ENST00000360668
  CDS Start-End: 762-1127
attccccatcacctgtctctctggtgagctgcttccgatcagcctccaggtccacgatttctcttctgttgtccttttctgccttctcacctcatcctctgagacctgaatttcgatggctctacttttcaattatattattctttttcaaacctgggcgttcatttctagcatcctgttctatcctgtgtctgactgtgcctcccgcaccttctcccttctctcgccctaagccccgtgaaggcgccgggcctttggctccggctgtttcccacggcgcccagaaccgcgtcagtcctgacacagactcggtgagggcgggaagtggtgccgtggggctgcagcctggcccgcccgctccatcggcctagggcggccccaccgccctccgggccttaccttgagttcgggctgcgggagaagctcccgcgctgcccatgacgtcacgggactgtgacgcgcccagaagccccgcccctcgcgtcccggtccgcggacccaggctctctgcgccgtgacgtcacgggtccgggcgggcgggttgtgcgtcggcccaatgggagcggcgcactggcctcccctttaaggaatgttgtgacctgacgtcaccgggcgagttacctcccgcagccgcagccgccgtgctcagcgcgagccccggagcccttgagcgcgaggcgcggagcccccggagcccccaaaccgcagacacatccccgcgccccagagccccggcctgcgcgcccagccgggcccgcgcgatgccctcagaccggcctttcaagcagcggcggagcttcgccgaccgctgtaaggaggtacagcagatccgcgaccagcaccccagcaaaatcccggtgatcatcgagcgctacaagggtgagaagcagctgcccgtcctggacaagaccaagtttttggtcccggaccatgtcaacatgagcgagttggtcaagatcatccggcgccgcctgcagctgaaccccacgcaggccttcttcctgctggtgaaccagcacagcatggtgagtgtgtccacgcccatcgcggacatctacgagcaggagaaagacgaggacggcttcctctatatggtctacgcctcccaggaaaccttcggcttctgagccagcagtaggggggctcggcctgggagtcgggcggccccggtcaggccctgcccagagagctcctggttcctgaactgagctgcctctaccgtggtgggctgggcaggcatgtgcccccctagtcagagggcaccaacccacctactctgcccctgggtggatcctgggccggtcgtgttagggttgtccctctgggtgctggctggtgggatgggggagggtggggagcagctcccagcacccctgctgtgtggttcatcttttttttaggcccctgcctgtctgcccatctgcccctcacccacccgaggctctgcccaccgcctggacctgcccacccctgaaagactggcccctggctccccgcccctcggtctccacgtggtgtatggatctgtggtcattgtccctctgcagaataaagattgctcaggcctgcctggc

SEQ ID NO: 153914 - DNA, 961 bp, Homo sapiens
  Payload ID: 10254
  Gene Symbol: MAP1LC3A
  Gene Name: microtubule-associated protein 1 light chain 3 alpha
  Uniprot ID: Q9H492
  ENST ID: ENST00000374837
  CDS Start-End: 137-514
cagccacctgccactcctgactgcatggaagccaggtgcaaggagaaaggattttgaggaggggactccatggcttccgagttgctgactgaccctccacctcagaggtagttctgacactgtctcagttttgcagatgaagatgagattcttcagttctccatgtggaaaagcagctgtggacccagccgaccgctgtaaggaggtacagcagatccgcgaccagcaccccagcaaaatcccggtgatcatcgagcgctacaagggtgagaagcagctgcccgtcctggacaagaccaagtttttggtcccggaccatgtcaacatgagcgagttggtcaagatcatccggcgccgcctgcagctgaaccccacgcaggccttcttcctgctggtgaaccagcacagcatggtgagtgtgtccacgcccatcgcggacatctacgagcaggagaaagacgaggacggcttcctctatatggtctacgcctcccaggaaaccttcggcttctgagccagcagtaggggggctcggcctgggagtcgggcggccccggtcaggccctgcccagagagctcctggttcctgaactgagctgcctctaccgtggtgggctgggcaggcatgtgcccccctagtcagagggcaccaacccacctactctgcccctgggtggatcctgggccggtcgtgttagggttgtccctctgggtgctggctggtgggatgggggagggtggggagcagctcccagcacccctgctgtgtggttcatcttttttttaggcccctgcctgtctgcccatctgcccctcacccacccgaggctctgcccaccgcctggacctgcccacccctgaaagactggcccctggctccccgcccctcggtctccacgtggtgtatggatctgtggtcattgtccctctgcagaataaagattgctcaggcctgcctggc

SEQ ID NO: 153915 - DNA, 698 bp, Homo sapiens
  Payload ID: 10254
  Gene Symbol: MAP1LC3A
  Gene Name: microtubule-associated protein 1 light chain 3 alpha
  Uniprot ID: Q9H492
  ENST ID: ENST00000397709
  CDS Start-End: 152-517
gggcgagttacctcccgcagccgcagccgccgtgctcagcgcgagccccggagcccttgagcgcgaggcgcggagcccccggagcccccaaaccgcagacacatccccgcgccccagagccccggcctgcgcgcccagccgggcccgcgcgatgccctcagaccggcctttcaagcagcggcggagcttcgccgaccgctgtaaggaggtacagcagatccgcgaccagcaccccagcaaaatcccggtgatcatcgagcgctacaagggtgagaagcagctgcccgtcctggacaagaccaagtttttggtcccggaccatgtcaacatgagcgagttggtcaagatcatccggcgccgcctgcagctgaaccccacgcaggccttcttcctgctggtgaaccagcacagcatggtgagtgtgtccacgcccatcgcggacatctacgagcaggagaaagacgaggacggcttcctctatatggtctacgcctcccaggaaaccttcggcttctgagccagcagcccctgcctgtctgcccatctgcccctcacccacccgaggctctgcccaccgcctggacctgcccacccctgaaagactggcccctggctccccgcccctcggtctccacgtggtgtatggatctgtggtcattgtccctctgcagaataaagattgctcaggcctgcctggc

SEQ ID NO: 153916 - DNA, 2688 bp, Homo sapiens
  Payload ID: 10255
  Gene Symbol: MAP1LC3B
  Gene Name: microtubule-associated protein 1 light chain 3 beta
  Uniprot ID: Q9GZQ8
  ENST ID: ENST00000268607
  CDS Start-End: 629-1006
acgggcgagcggcgaccctgcctcccggagacggcgcggcctgccctgcgcgcctcagccccgggtgccggcgtctcgggcagcaccaccaagtctctctggaggggaaaggatggtcggatttgccccatgtcccttcctctgacccctccctcaagagtgccccgggacaccccgcctgtggctcagcctcccccgccccgcgctgccatctcctcagggccgggcagcaggctcccgagcgcccacagacccggggtgcggcccagcccacaaccgtcacctcaggggcctcaggcgcccagcggtgctgggcggggctggggcacgaccgggagcatgcgcagagcgcgcgtttcgcccatcgcgcacgcgcacacacctgctccgcccccacgctgcgtgccgctgctgggttccgccacgcccgtcatggcggcggccccggccggctctggccccgcccctcggtgacgcgtcgcgagtcacctgaccaggctgcgggctgaggagatacaagggaagtggctatcgccagagtcggattcgccgccgcagcagccgccgcccccgggagccgccgggaccctcgcgtcgtcgccgccgccgccgcccagatccctgcaccatgccgtcggagaagaccttcaagcagcgccgcaccttcgaacaaagagtagaagatgtccgacttattcgagagcagcatccaaccaaaatcccggtgataatagaacgatacaagggtgagaagcagcttcctgttctggataaaacaaagttccttgtacctgaccatgtcaacatgagtgagctcatcaagataattagaaggcgcttacagctcaatgctaatcaggccttcttcctgttggtgaacggacacagcatggtcagcgtctccacaccaatctcagaggtgtatgagagtgagaaagatgaagatggattcctgtacatggtctatgcctcccaggagacgttcgggatgaaattgtcagtgtaaaaccagaaaaaatgcagctcttctagaattgtttaaacccttaccaaggaaaaaaaagggatgttaccaactgagatcgatcagttcatccaatcacagatcatgaaacagtagtgttcccacctaggagtgttaggaagttgtgtttgtgtttcaagcagaaaaactgagctccaagtgagcacattcagctttggaaactatattatttaatgtaggctagcttgttttcaaattttaaaagtttaaaaataaaatactttgcattctaagttgccaataaaatagaccttcaagttattttaatgctcttttctcactaataggaacttgtaattccagcagtaatttaaaggctttcagagagaccctgagtcttctcttcaggttcacaaaacccgccgcctttttgggtagaagttttctactcagctagagagatctccctaagaggatctttaggcctgagttgtgaagcgcaacccccgcaaaacgcatttgccatcacagttggcacaaacgcagggtaaacgggctgtgtgagaaaacggccctgactgtaaactgctgaaggtccctgactcctaagagaaccacacccaaagtcctcactcttgcaggggtagacatttctggtttggtttgttctctagatagttacacacataaagacaccactcaaaaggaaacttgaataatttataattttgatcgagtttcttaaaagaccctggagaaagagtggcatttcttctgtttcaggttttgtctgagttcaaactagtgcctgtgttgttacggaaagcagcagtgtaccagtgtcactctggagtacagcgggagaaacacaaaatagtataactgaaaacattaacattcagacacactcccttctgccttccggcttaaagctgtggatgatccacgtttttgtttttttaatgttaaatgtgtaactcagtattactgaaaaggtacccacattttgaatagtagttatcactcttaggtcagacagccatcagaattctcccacaccaagtgcatgtcagttgtggagaaaacatagcaaaaagagccgtacgctctttacagatactaatgtcaagagttaaacctcctcaggttcaacctgtgataaaagactagtgcttcccagtacttgcatggggttcactatttatagttttcttgggagtatcacaggaaaatcacaattacaccactttagaccctatgtgtagcaggtcacaacttacccttgtgtgtttagatgtgtatgaaatacctgtatacgttagtgaaagctgtttactgtaacggggaaaaccagattctttgcatctgggccctctactgattgttaaaggagttcctgtcacctgctccccccacccccgcatgcgtctgtccacttggctaacttttaatatgtgtatttttacattatgtatattcttaactggactgtctcgtttagactgtatacatcatatctgacattattgtaactaccgtgtgatcagtaagattcctgtaagaaatactgctttttaagaaaaaaaataacatgctgaggggtgacctatatcccatgtgagtggtcactttatttataggatctttaaaacatttttaatgaactaagttgaataaaggcacaattaaaaactgtcatcaaa

SEQ ID NO: 153917 - DNA, 3085 bp, Homo sapiens
  Payload ID: 10255
  Gene Symbol: MAP1LC3B
  Gene Name: microtubule-associated protein 1 light chain 3 beta
  ENST ID: ENST00000564844
  CDS Start-End: 85-291
attcgccgccgcagcagccgccgcccccgggagccgccgggaccctcgcgtcgtcgccgccgccgccgcccagatccctgcaccatgccgtcggagaagaccttcaagcagcgccgcaccttcggtgagtgtcgccgcgagggcggcgggtgcggcggggccggggtccgagctgtggagggcggcagggcctgggacgccgtgaggggtcggggccgagccgggaggccgagcggggccggtggctgccggccggcggggccgagggatgcggggcccggggccccgtgagggacccaggccgggaccgagccgggagggccaggggctggtctgggccggggcggcctgcggacctctcggaggcctgggaggaggcagccggcggagggcgggcgggggccggtgcgctcggggccccgggcctgctgaatcaccccgcgccctccgcggcggggtgcctgccgtaccccggccaccgccgcccccgcaagcgcgctgcgggcgagggtcgcgcttctggggcccaacagcccccggggccgcgctgggccgttcggctctgaagcggggctgcgccgggacccagcgcgtcaccttcagggctggttttcccgtcgagggagcccgcccgggtgcgagtgcctcttacagacctcagtgcctcggtcgagaggaggggaatgtgctgggccccggcctcgccgcgcccgggacggcccacagcggtgttgccagttcctgtctgtagcccaggagctggggtgggagacttctcttgggtttgcgattacgttctcaccttggcaccaggaataccgaatacatcccttttctgccggttcagactggaaacccagcttaggtgtgctggcatttggttaaacgtgcaggtgtcaccatcacaatatttactccacgcagatgatgcgaagtgattatttcccgcttgagcaagagaacgccgcagatccagaacaaagagtagaagatgtccgacttattcgagagcagcatccaaccaaaatcccgggtggaagaattactgtatatagaaaagatgtccgcagcgttcagtaaacacagacactaatgagactcagaggctcatctgtggtcaggtgataatagaacgatacaagggtgagaagcagcttcctgttctggataaaacaaagttccttgtacctgaccatgtcaacatgagtgagctcatcaagataattagaaggcgcttacagctcaatgctaatcaggccttcttcctgttggtgaacggacacagcatggtcagcgtctccacaccaatctcagaggtgtatgagagtgagaaagatgaagatggattcctgtacatggtctatgcctcccaggagacgttcgggatgaaattgtcagtgtaaaaccagaaaaaatgcagctcttctagaattgtttaaacccttaccaaggaaaaaaaagggatgttaccaactgagatcgatcagttcatccaatcacagatcatgaaacagtagtgttcccacctaggagtgttaggaagttgtgtttgtgtttcaagcagaaaaactgagctccaagtgagcacattcagctttggaaactatattatttaatgtaggctagcttgttttcaaattttaaaagtttaaaaataaaatactttgcattctaagttgccaataaaatagaccttcaagttattttaatgctcttttctcactaataggaacttgtaattccagcagtaatttaaaggctttcagagagaccctgagtcttctcttcaggttcacaaaacccgccgcctttttgggtagaagttttctactcagctagagagatctccctaagaggatctttaggcctgagttgtgaagcgcaacccccgcaaaacgcatttgccatcacagttggcacaaacgcagggtaaacgggctgtgtgagaaaacggccctgactgtaaactgctgaaggtccctgactcctaagagaaccacacccaaagtcctcactcttgcaggggtagacatttctggtttggtttgttctctagatagttacacacataaagacaccactcaaaaggaaacttgaataatttataattttgatcgagtttcttaaaagaccctggagaaagagtggcatttcttctgtttcaggttttgtctgagttcaaactagtgcctgtgttgttacggaaagcagcagtgtaccagtgtcactctggagtacagcgggagaaacacaaaatagtataactgaaaacattaacattcagacacactcccttctgccttccggcttaaagctgtggatgatccacgtttttgtttttttaatgttaaatgtgtaactcagtattactgaaaaggtacccacattttgaatagtagttatcactcttaggtcagacagccatcagaattctcccacaccaagtgcatgtcagttgtggagaaaacatagcaaaaagagccgtacgctctttacagatactaatgtcaagagttaaacctcctcaggttcaacctgtgataaaagactagtgcttcccagtacttgcatggggttcactatttatagttttcttgggagtatcacaggaaaatcacaattacaccactttagaccctatgtgtagcaggtcacaacttacccttgtgtgtttagatgtgtatgaaatacctgtatacgttagtgaaagctgtttactgtaacggggaaaaccagattctttgcatctgggccctctactgattgttaaaggagttcctgtcacctgctccccccacccccgcatgcgtctgtccacttggctaacttttaatatgtgtatttttacattatgtatattcttaactggactgtctcgtttagactgtatacatcatatctgacattattgtaactaccgtgtgatcagtaagattcctgtaagaaatactgctttttaagaaaaaaaataacatgctgaggggtgacctatatcccatgtgagtggtcactttatttataggatctttaaaacatttttaatgaactaagttgaataaaggcacaattaaaaactgtcatcaaa

SEQ ID NO: 153918 - DNA, 1259 bp, Homo sapiens
  Payload ID: 10255
  Gene Symbol: MAP1LC3B
  Gene Name: microtubule-associated protein 1 light chain 3 beta
  ENST ID: ENST00000570189
  CDS Start-End: 112-255
aagggaagtggctatcgccagagtcggattcgccgccgcagcagccgccgcccccgggagccgccgggaccctcgcgtcgtcgccgccgccgccgcccagatccctgcaccatgccgtcggagaagaccttcaagcagcgccgcaccttcgaacaaagagtagaagatgtccgacttattcgagagcagcatccaaccaaaatcccgggtggaagaattactgtatatagaaaagatgtccgcagcgttcagtaaacacagacactaatgagactcagaggctcatctgtggtcaggtgataatagaacgatacaagggtgagaagcagcttcctgttctggataaaacaaagttccttgtacctgaccatgtcaacatgagtgagctcatcaagataattagaaggcgcttacagctcaatgctaatcaggccttcttcctgttggtgaacggacacagcatggtcagcgtctccacaccaatctcagaggtgtatgagagtgagaaagatgaagatggattcctgtacatggtctatgcctcccaggagacgttcgggatgaaattgtcagtgtaaaaccagaaaaaatgcagctcttctagaattgtttaaacccttaccaaggaaaaaaaagggatgttaccaactgagatcgatcagttcatccaatcacagatcatgaaacagtagtgttcccacctaggagtgttaggaagttgtgtttgtgtttcaagcagaaaaactgagctccaagtgagcacattcagctttggaaactatattatttaatgtaggctagcttgttttcaaattttaaaagtttaaaaataaaatactttgcattctaagttgccaataaaatagaccttcaagttattttaatgctcttttctcactaataggaacttgtaattccagcagtaatttaaaggctttcagagagaccctgagtcttctcttcaggttcacaaaacccgccgcctttttgggtagaagttttctactcagctagagagatctccctaagaggatctttaggcctgagttgtgaagcgcaacccccgcaaaacgcatttgccatcacagttggcacaaacgcagggtaaacgggctgtgtgagaaaacggccctgactgtaaactgctgaaggtccctgactcctaagagaaccacacccaaagtcctcactcttgcaggggtagacatttctggtttggtttgttctctagatagttacacacataaagacaccactca

SEQ ID NO: 153919 - DNA, 625 bp, Homo sapiens
  Payload ID: 10255
  Gene Symbol: MAP1LC3B
  Gene Name: microtubule-associated protein 1 light chain 3 beta
  ENST ID: ENST00000565788
  CDS Start-End: 95-322
ccagagtcggattcgccgccgcagcagccgccgcccccgggagccgccgggaccctcgcgtcgtcgccgccgccgccgcccagatccctgcaccatgccgtcggagaagaccttcaagcagcgccgcaccttcgaacaaagagtagaagatgtccgacttattcgagagcagcatccaaccaaaatcccggtgataatagaacgatacaagggtgagaagcagcttcctgttctggataaaacaaagttccttgtacctgaccatgtcaacatgagtgagctcatcaagataattaggtattcagtcacctttgtttcataatatatttcctttgagtaacttcttattctttatgaaacttacagttaaatctttagttctggttaaaatctttaaaaaatatttttcagctgaattcagttctgattcagttatgattaaaacaatttcaacttaaactataaaatgtttctttttttgaggttttatattacttgctagactgcagagcccgtttctttcatcataacatcgtttagatgtttcctgtttaaaatcagtgttacaagttattaaggtattgtacagcaaagctagttaaagagaatgtagactctgtgagtg

SEQ ID NO: 153920 - DNA, 660 bp, Homo sapiens
  Payload ID: 10256
  Gene Symbol: MAP1LC3B2
  Gene Name: microtubule-associated protein 1 light chain 3 beta 2
  Uniprot ID: A6NCE7
  ENST ID: ENST00000556529
  CDS Start-End: 155-532
gcaaggctcgcagccacctctcgggagtgcagggccagatcctgtgccagcggccttacacggccacagtcggattcgctgccgcagcagccgccacccccaggagccgccgggaccctcgcgtcgtcgccgccgcggcccagatccccacaccatgccgtcggagaagaccttcaagcagcggcgcaccttcgaacaaagagtagaagatgtccgacttattcgagagcagcatccaaccaaaatcccggtgataatagaacgatacaagggtgagaagcagcttcctgttctggataaaacaaagttccttgtacctgaccatgtcaacatgagtgagctcatcaagataattagaaggcgcttacagctcaatgctaatcaggccttcttcctgttggtgaacggacacagcatggtcagcgtctccacaccaatctcagaggtgtatgagagtgagaaagatgaagatggattcctgtacatggtctgtgcctcccaggagacgttcgggatgaaattgtcagtgtaaaaccagaaaaaatgcatctcttctagaattttttaaacccttaccaaggaaaaaaaaagggatgttaccaactgagatcgatcagttcatctaatcacagatcatcaaacagtagtgttcccacctag

SEQ ID NO: 153921 - DNA, 1182 bp, Homo sapiens
  Payload ID: 10257
  Gene Symbol: MAP1LC3C
  Gene Name: microtubule-associated protein 1 light chain 3 gamma
  Uniprot ID: Q9BXW4
  ENST ID: ENST00000357246
  CDS Start-End: 66-509
gttaggttcccggttgcgggacagtttttttttcttttttaaaacagacacagctactgagtgcaatgccgcctccacagaaaatcccaagcgtcagacccttcaagcagaggaaaagcttggcaatcagacaagaggaagttgctggaatccgggcaaagttccccaacaaaatcccggtggtagtggagcgctaccccagggagacgttcctgcccccgctggacaaaaccaagttcctggtcccgcaggagctgaccatgacccagttcctcagcatcatccggagccgcatggtcctgagagccacggaagccttttacttgctggtgaacaacaagagcctggtcagcatgagcgcaaccatggcagagatctacagagactacaaggatgaggatggcttcgtgtacatgacctacgcctcccaggagacatttggctgcctggagtcagcagcccccagggatgggagcagccttgaggacagaccctgcaatcctctctagcccatgtcgggaaggatgtgtgctctgacagacgtgtcagatgctggcagaagggattggttttctcctgtgtatacagtggaggagtctgagaagcagggatgcctggggtgatcagctccaaccagtggcagcagagtggtggctcttcctagtttagtttttgtgctccgtgttcttgtgtccttctaagaaaaatgtgggctgctcttgaaagttatataattatcatttttttttttttgaaacagggtcttgctctattgcctaggctggagcacagtggcatgatcttggctcactgcaacctccgcctcctgggttcaagtgattcttctgcctccaccccccgagtggctggtattacaagcacatgccaccacaccaggctaatttttgtatttttagtagagacggggtttcaccatgttggccaggctggtctcgaactcctgacctcaggtgatccacccacctcggcctcccaaagtgctgggattacaggcgtgagccactgcatccagccatataaccgtattctaaataagaaatggttggcttgtgtgatggttttgtgtaatgagctagagataatattttaagtgtcttctgtggtatatgtgggagggccattaaggagtgggtttcactccctgcatgtgggcaggtgtcc

SEQ ID NO: 153922 - DNA, 3516 bp, Homo sapiens
  Payload ID: 10258
  Gene Symbol: MAP10
  Gene Name: microtubule-associated protein 10
  Uniprot ID: Q9P2G4
  ENST ID: ENST00000418460
  CDS Start-End: 133-3276
tttttgccagtgtattcacactccgtgtgtgtgtggtgtgtctgtctcagtactactgtaattgatgaggcaggggctccctggccatcccagcagtgtcaccatcttttgggtagaacagcagacacagagatggcccactgtggacagttaactaactggctctgtttagcatgggaaaggaaggagagtcctgattttctttcaatattcctcaggtatattgatctgacccccaagttacataagatctgcagtgataaaaccattacccaaaaaactcactgtcttttaccacttatatcctcagcattatcatcaattgtcttaatacaaggttggtggcaaaaaacggctcacaagtatgcatacaaaggggccaaacacattgagcagcaaaacccccaaagcagacaccgcccgagacccgctggagcgcttccgcaaatctcgcgagatagcaggcagcgatgccttttgctccggtttctcgtgagaccccggggcttcagcttctcgtttgcggagcccgcggcggcgtttcctggggcaacagcaatggcggcctcgctgtccgagcggctcttctcgctggagctgctggtggactgggtgcgtttggaagcccggctgctgccgtcccccgctgccgcagtggagcaggaggaggaagaggaggaaaaggagcagggggaggcctcgtcgccgcgcggtctgtgccccgccgtggccttccgcctgctggacttccccacgctgttggtttaccctcctgacggccccggcgctcccgccgccgaaccgtggcccggtgtcatccgcttcggtcgcggcaagtcctgcctcttccgcctgcagcctgctaccctgcactgccggctcctgcggaccccgcttgccaccttgctgctgcagctgccccctgggcgcccgacgcccaccccacagctcctgggggcctgcgacatttcgctggccaccgcagcgcacagggtcgtggggccggccgcctccggatgctcccaccgtcaccggggacgtttccccctgcataatcgagtgggcgagcggactggggacattgcactggcctaccgcctgactgacctgggaagccgcctgctgagccaacttgagcggcccctcaccttcacccgcacaggaggaggagcggaggtcagtccccaaacccagcaggaaagacagcagctgcagcagccagcctcacagccaagcccaaaagaggctgataagccgctgggggagttagaaatcccagaggcacagaaggatttgaaggaaatggttaaaagtaaggccgaatgtgataatgtgggttctgtggagaatggcaaaaccaattctgttgttacatgttcaggtgctggcaatgggagaaatgttagctccctaaatgaggaagtcacagaattggacatggagaccaatatattttgccctcctcctttgtattacactaacttgacccaagaaaaaccgccccctgcacaggctaaaatcaccattgagcctcaaatgaatgcacctgaggaaatggatgatgcttctcctgaaaaaaagcgtgtaaatcccccagcacacaggagttgtctaaagcatccaagttctgcagcacacgaacatcctccaatgcttgtaaatcctccacatattcagaatataggagcaactaatcaaacatgtcaaactgaacaaaatcgaattaatacaataaggcagttgcctttgttaaatgctttgttagttgagttgtccttgttatatgaccaacctgtgacaagtcctgctcatatacatcctcacctagcctggttatataggactgaggataagaagtcacccgaatcttctgccaaatccacatgccggtctgaagccaagaaggataagcgttctgtggggggatgtgaaaagtcagtgagtcttcagtataaaaagaaccaaattgaaaactataaggaagataaatattctgaaaagagcagtggtgccctccataaaagagttccaaaagggaggctactttatggcttaacaaatacactaagactacgtttaaagctgacaaatcctgatatgttggtggtacatgaaaaaagagaactatatagaaaaagacaatcacaaatgttgggtacaaaattcagaattccgtcatccaaagttaaactattaagctctgcagaacaaagtcagaagccacaactgcctgaagataagtatttagattcagatgcatctttcactgaaaatagtgatacctcaagacaaatcagtggagtttttgatgagcccagcacaagtaaagaaactaaactgaaatatgcaactgaaaaaaagacagttgattgtagtaaaaatagaatcaataatgtttcattggaagaagttgtgagtcctgcaaattccattattccagaaaggcttacccctacaaatattctgggaggaaatgtggaaatgaaaatccaaagtccatgtgttttccaacaggatgctgttgttgacagaattgtagataaggaaatagatattagacaggtcaaaaccacagataatgacattcttatggctgatataagtgacaagagaacaggtaaaaatagttgctatgaaaacatctcagaactgaagtattcagatgatttgtctagcccttgctattctgaagatttctgtaccagtgaggacaccagcagaagtttcaaagctcatgatagcagttcaaggacagaaaatccaaaacatagtcaatatacaagcaagtctagtgacacaggagtgtccaaaaagaaaaatagtagtgacaggagttctatccttagcccacctttttcagccgggtcacctgtacactcatacagaaaatttcatatttcaaagactcaggataaaagtttggaggaagcatctagtatctctgctagtgatttatcttcaacacattggactgaacaaaaagaaaaccagatagatcaaaatagtatgcacaattctgaaattacaaagagagctcaagacatctctgttaaaacaagaagtagttggaaatctttagaaaaaagccagtcaccacaaacatcccaggtgagttcttacctgccttcaaatgtgtccgaacttaatgtcctggatagcagtacatcagatcactttgaagaaggcaatgatgatgttggttcactaaatatttccaagcaatgcaaagatatttgtgaattagtaataaataaacttccaggatacacaatgtaaaaatacatgcttttaaaaaactttcaaggacctatgtgtactgttagtgaaaaaaattttaaagctgttttagttcatgaattatgtgaataattttttaaagaaatatgaattaacgttattcctttgatgtttaaatggtattttaccattaaatctgataatattgattattaaatcatataaacagatttctttttaaattgtttaatcataagaataaaagtgtgtctttctaaa

SEQ ID NO: 153923 - DNA, 10258 bp, Homo sapiens
  Payload ID: 10259
  Gene Symbol: MAP1A
  Gene Name: microtubule-associated protein 1A
  Uniprot ID: P78559
  ENST ID: ENST00000300231
  CDS Start-End: 451-8862
tgcagactcttccctgaagctgccggctgaggccggagctgccgcctccatgagaggcttcctcctacaccccagggccagaggaccctttgccaccagagtgagatcctagagaccatcatcctggtaaatcccagtgcagacagcatcagctctgaggttcatcatcttcttagcagctcatcagcttataaactactaatcttgagtgggcaaagtttagagcctgggggagacctcatcctacagagtggcacctactcatatgaaaactttgcccaggtccttcacaaccccgagatttcccaattgctcagcaatagagaccctgggatacaggccttccttaccgtgtcctgcttaggggaaggtgattggagccacctgggattatccagttcccaagagaccctgcacctccggctaaaccctgagcccactctgcccaccatggacggcgtggctgagttctccgagtatgtctctgagactgtggacgtgccatccccatttgacctactagagccccccacctcagggggcttcctcaagctctccaagccttgttgctacatcttcccaggtggtcgtggggactctgccctctttgctgtcaatggtttcaacatcctggtggatggtggctctgatcgcaagtcctgtttttggaagctggtacggcacttggaccgcattgactcggtgctactcacacacattggggcagacaacctgccaggcatcaatggactactgcagcgcaaagtggcagagctagaggaggagcagtcccagggctctagcagttacagcgactgggtgaagaaccttatctctcctgagcttggagttgtctttttcaacgtgcctgagaagctgcggcttcctgatgcctcccggaaagccaagcgtagcattgaggaggcctgcctcactctgcagcacttaaaccgcctgggcatccaggctgagcctctatatcgtgtggtcagcaataccattgagccactgaccctcttccacaaaatgggtgtgggccggctggacatgtatgtcctcaaccctgtcaaggacagcaaggagatgcagttcctcatgcaaaagtgggcaggcaatagtaaagccaagacaggcatcgtgctgcccaatgggaaggaggctgagatctccgtgccctaccttacctctatcactgctctggtggtctggctaccagccaatcccactgagaagattgtgcgtgtgctttttccaggaaatgctccccaaaacaagatcttggagggcctagaaaagcttcggcatctggacttcctgcgttaccctgtggccacgcagaaggacctggcttctggggctgtgcctaccaacctcaagcccagcaaaatcaaacagcgggctgatagcaaggagagcctcaaagccactaccaagacggccgtgagcaagttggccaaacgggaggaggtggtagaagagggagccaaggaggcacgttcagagctggccaaggagttagccaagacagagaagaaggcaaaagagtcatctgagaagcccccagagaagcctgccaagcctgagagggtgaagacagagtcaagtgaggcactgaaggcagagaagcgaaagctgatcaaagacaaggtagggaaaaagcaccttaaagaaaagatatcaaagctggaagaaaaaaaagacaaggagaaaaaagagatcaaaaaggagaggaaagagctcaagaaggatgaaggaaggaaggaggagaagaaggatgccaagaaggaggagaagaggaaagataccaaacctgagctcaagaagatttccaagccagacctaaagccctttactcctgaggtacgtaagaccctctataaagccaaggtccctggaagagtcaaaatagacaggagccgtgctatccgtggggagaaggagctgtcttctgagccccagacacccccagcccagaagggaactgtaccactcccaaccatcagtgggcacagggagctggtcctatcctcaccagaggacctcacacaggactttgaggagatgaagcgtgaggagagggctttgctggctgaacaaagggacacaggactaggagataagccattccctctagacactgcagaggagggacccccaagtacagctatccagggaacaccaccctctgttccagggctgggacaagaagaacatgtgatgaaggagaaagagcttgtcccagaggtccctgaggaacaaggcagcaaggacagaggcctagactctggggctgaaacagaggaagagaaagatacctgggaggaaaagaagcagagggaagcagagaggctcccagacagaacagaagccagagaggaaagtgaacctgaagtaaaggaggatgtgatagaaaaggctgagttagaagaaatggaggaggtacacccttcagatgaggaggaagaggacgcgacaaaagctgagggtttttaccaaaaacatatgcaggaacccttgaaggtaactccaaggagccgggaggcttttgggggtcgggaattgggactccagggcaaggcccctgagaaggagacctcgttattcctaagcagcctgaccacacctgcaggagccactgagcatgtctcttacatccaggatgagacaatccctggctactcagagactgagcagaccatctcagatgaggagatccatgatgagccggaggagcgcccagctccacccagatttcatacaagtacatatgacctgcccgggcctgaaggtgctggcccattcgaagccagccaacctgccgatagtgctgttcctgctacctctggcaaagtctatggaacgccagagactgaactcacctaccccactaacatagtggctgcccctttggctgaagaggaacatgtgtcctcggccacttcaatcactgagtgtgacaaactttcttcctttgccacatcagtggctgaggaccaatctgtggcctcacttacagctccccagacagaggagacaggcaagagctccctgctgcttgacacagtcacaagcatcccttcctcccgtactgaagctacgcagggcttggactatgtgccatcagctggtaccatctcacccacctcctcactggaagaagacaagggcttcaaatcaccaccctgtgaggacttctctgtgactggggagtcagagaagagaggagagatcatagggaaaggcttgtctggagagagagctgtggaagaggaagaggaggagacagcaaacgtagagatgtctgagaaactttgcagtcaatatggaactccagtgtttagtgcccctgggcatgccctacatccaggagaaccagcccttggagaagcagaggagcggtgccttagcccagatgacagcacagtgaagatggcttctcctccaccatctggcccacccagtgccacccacacaccctttcatcagtccccagtggaagaaaagtctgagccccaagactttcaggaggcagactcctggggagacactaagcgcacaccaggtgtgggcaaagaagatgctgctgaggagacagtcaagccagggcctgaagagggcacactagagaaggaagagaaagttcctcctcccaggagcccccaggcccaggaagcacctgtcaacattgatgaggggcttacaggctgtaccattcaactgttgccagcacaggataaagcaatagtctttgagattatggaggcaggagagcccacaggcccaattctgggagcagaagcccttcccggaggtttgaggactttaccccaagaacctggcaaacctcagaaagatgaggtgctcagatatcctgaccgaagcctctctcctgaagatgcagaatccctctctgtcctcagcgtgccctccccagacactgccaaccaagagcctacccccaagtctccctgtggcctgacagaacagtacctacacaaagaccgttggccagaggtatctccagaagacacccagtcactttctctgtcagaagagagtcccagcaaggagacctccctggatgtctcttctaagcagctctctccagaaagccttggcaccctccagtttggggaactaaaccttgggaaggaagaaatggggcatctgatgcaggccgaggatacctctcaccacacagctcccatgtctgttccagagccccatgcagccacagcgtcacctcccacagatgggacaactcgatactctgcacagacagacatcacagatgacagccttgacaggaagtcacctgccagctcattctctcactctacaccttcaggaaatgggaagtacttacctggggcgatcacaagccctgatgaacacattctgacacctgatagctccttctccaagagtcctgagtctttgccaggccctgccttggaggacattgccataaagtgggaagataaagttccagggttgaaagacagaacctcagaacagaagaaggaacctgagccaaaggatgaagttttacagcagaaagacaaaactctggagcacaaggaggtggtagagccgaaggatacagccatctatcagaaagatgaggctctgcatgtaaagaatgaggctgtgaaacagcaggataaggctttagaacaaaagggcagagacttagagcaaaaagacacagccctagaacagaaggacaaggccctggaaccaaaagacaaagacttagaagaaaaagacaaggccctggaacagaaggataagattccagaagagaaagacaaagccttagaacaaaaggatacagccctggaacagaaggacaaggccctggaaccaaaagataaagacttggaacaaaaggacagggtcctagaacagaaggagaagatcccagaagagaaagacaaagccttagatcaaaaagtcagaagtgttgaacataaggctccggaggacacggtcgctgaaatgaaggacagagacctagaacagacagacaaagcccctgaacagaaacaccaggcccaggaacaaaaggataaagtctcagaaaagaaggatcaggccttagaacaaaaatactgggctttgggacagaaggatgaagccctggaacaaaacattcaggctctggaagagaaccaccaaactcaggagcaggagagcctagtgcaggaggataaaaccaggaaaccaaagatgctagaggaaaaatccccagaaaaggtcaaggccatggaagagaagttagaagctcttctggagaagaccaaagctctgggcctggaagagagcctagtgcaggagggcagggccagagagcaggaagaaaagtactggagggggcaggatgtggtccaggagtggcaagaaacatctcctaccagagaggagccggctggagaacagaaagagcttgccccggcatgggaggacacatctcctgagcaggacaataggtattggaggggcagagaggatgtggccttggaacaggacacatactggagggagctaagctgtgagcggaaggtctggttccctcacgagctggatggccagggggcccgcccacactacactgaggaacgggaaagcactttcctagatgagggcccagatgatgagcaagaagtacccctgcgggaacacgcaacccggagcccctgggcctcagacttcaaggatttccaggaatcctcaccacagaaggggctagaggtggagcgctggcttgctgaatcaccagttgggttgccaccagaggaagaggacaaactgacccgctctccctttgagatcatctcccctccagcttccccacctgagatggttggacaaagggttccttcagccccaggacaagagagtcctatcccagaccctaagctcatgccacacatgaagaatgaacccactactccctcatggctggctgacatcccaccctgggtgcccaaggacagacccctcccccctgcacccctctccccagctcctggtccccccacacctgccccggaatcccatactcctgcacccttctcttggggcacagccgagtatgacagtgtggtggctgcagtgcaggagggggcagctgagttggaaggtgggccatactcccccctggggaaggactaccgcaaggctgaaggggaaagggaagaagaaggtagggctgaggctcctgacaaaagctcacacagctcaaaggtaccagaggccagcaaaagccatgccaccacggagcctgagcagactgagccggagcagagagagcccacaccctatcctgatgagagaagctttcagtatgcagacatctatgagcagatgatgcttactgggcttggccctgcatgccccactagagagcctccacttggagcagctggggattggcccccatgcctctcaaccaaggaggcagctgccggccgaaacacatctgcagagaaggagctttcatctcctatctcacccaagagcctccagtctgacactccaaccttcagctatgcagccctggcaggacccactgtacccccaaggccagagccagggccaagtatggagcccagcctcaccccacctgcagttcccccccgtgctcctatcctgagcaaaggcccaagcccccctcttaatggtaacatcctgagctgcagcccagataggaggtccccatcccccaaggaatcaggccggagtcactgggatgacagcactagtgactcagaactggagaagggggctcgggaacagccagaaaaagaggcccaatccccaagtcctcctcaccccattcctatggggtcccccacattatggccagaaactgaggcacatgttagccctcccttggactcacacctggggcctgcccgacccagtctggacttccctgcttcagcctttggcttctcctcattgcagccagctcccccacagctgccctctccagctgaaccccgctcggcaccctgtggctcccttgccttctctggggatcgagctctggctctggctccaggaccccccaccagaacccggcatgatgaatacctggaagtgaccaaggcccccagcctggattcctcactgccccagctcccatcacccagttctcctggggcccctctcctctccaatctgccacgacctgcctcaccagccctgtctgagggctcctcctctgaggctaccacgcctgtgatttcaagtgtggcggagcgcttctctccaagccttgaggctgcagaacaggagtctggagagctggacccaggaatggaaccagctgcccacagcctctgggacctcactcctctgagcccagcacccccagcttcactggacttggccctagctccagctccaagcctgcctggagacatgggtgatggcatcctgccgtgccacctggagtgctcagaggcagccacggagaagccaagccccttccaggttccctctgaggattgtgcagccaatggcccaactgaaaccagccctaaccccccaggccctgccccagccaaggctgaaaatgaagaggctgcggcttgccctgcctgggaacgtggggcctggcctgaaggagctgagaggagctcccggcctgacacattgctctcccctgagcagccagtgtgtcctgcagggggctccgggggcccacccagcagtgcctctcctgaggtcgaagctgggccccagggatgtgccactgagcctcggccccatcgtggggagctctccccatccttcctgaacccacctctgcccccatccatagatgatagggacctctcaactgaggaagttcggctagtaggaagaggggggcggcgccgggtaggggggccagggaccactgggggcccatgccctgtgactgatgagacaccccctacatcagccagtgactcaggctcctcacagtcagattctgatgtcccgccagaaactgaggagtgtccgtccatcacagctgaggcagccctcgactcagatgaagatggagacttcctacctgtggacaaagctgggggtgtcagtggtactcaccaccccaggcctggccatgacccacctcctctcccacagccagacccccgcccatcccctccccgccctgatgtgtgcatggctgaccccgaggggctcagctcagagtctgggagagtagagaggctacgggagaaggaaaaggttcaggggcgagtagggcgcagggccccaggcaaggccaagccagcgtcccctgcacggcgtctggatcttcggggaaaacgctcacccacccctggtaaagggcctgcagatcgagcatcccgggccccacctcgaccacgcagcaccacaagccaggtcaccccagcagaggaaaaggatggacacagccccatgtccaaaggcctagtcaatggactcaaggcaggaccaatggccttgagttccaagggcagctctggtgcccctgtatatgtggatctcgcctacatcccgaatcattgcagtggcaagactgctgaccttgacttcttccgtcgagtgcgtgcatcctactatgtggtcagtgggaatgaccctgccaatggcgagccaagccgggctgtgctggatgccctgctggagggcaaggcccagtggggggagaatcttcaggtgactctgatccctactcatgacacggaggtgactcgtgagtggtaccaacaaactcatgagcagcagcaacaactgaatgtcctggtcctggctagcagcagcaccgtggtgatgcaggatgagtccttccctgcctgcaagattgagttctgaaagagccgccctcccttccccaaggatccactcccccagctcctttagagaatggctactgctgagtcctttggggttgagggagatgggagctagggggaggggagggagatgtcttgttgtggggacttgggctgggctaaatgggaggggttgtccctccccatcatccattcctgtgaggtgtctcaaaccaaagttaacagggagaggatgggggaggggacaaattagaataggatagcatctgatgcctgagaaccctctcctagcactgtcaaatgctggtattgaatggggactgaggatgggtctcagagagcaacctcctccctcgtagagggagattatatccccaactccagggacctctttatctcaatctatttatttggcatcctgggagggatttccaatagtaatttatgtgacctggggcaggataccgtcagtgaggtgcccagagctgcaccctttcctccatttcccatcccccatctcctcaaccaccagggtctgagttctagcagggtcctgggggtatcccactgctatactgttctactgcttccctcagtatctgaatgtctcaatttaaaacttgaagctctttagaccaatagactggtgagaggagaaaggagcttatcccccagaccctgctttataccattcacatcccagggctgtgtccagacagcacaaaacggcaaggagagcccaagccccaatgccagaattcttccaaactccctgactctttgaagtttttactcaccccatttcaattatcctgatcccttctcatcccctgcttggcttctctgcatgtggtcatctgctgtggcttggtgtttaatgggttaaaaataagccactgcctgacatcccaacatttgacaccccagcaatgtgtgactcccccaacattccactatgccatcctgcagctgaaatgggaacactggctgcctctccaaacccgctcttggacagaggatctgggaggtggaagccaggccagaggacttggggaaaatgagatggaggaaggaaaaagggagaagctgagccacagcttaactcctacagagtgaaatgaaaacgggctgaaaataccaccccaggagaggacctcgccccaagcaagccagtgagcagccctgccagactactgccagactgagaaacccagaagctggtagtcatgtgggcttgccttctctgccaaacgactgggaaaccaaaatgagcccaccttgtgttcttcctagctccaccctccccgtgctgctgtgttctgctcctccccacgcttccctgctatagttcccagctgctgtaacggagccacctccaactctaacaataaaccaagttcattgcagatagtgta

SEQ ID NO: 153924 - DNA, 10553 bp, Homo sapiens
  Payload ID: 10259
  Gene Symbol: MAP1A
  Gene Name: microtubule-associated protein 1A
  ENST ID: ENST00000382031
  CDS Start-End: 32-9157
gctgccggactaacactccgcgggtgtttccatggagaccgaggccgagcctgcgcggcctcacggcgttgccatggagacaactccggggctggggctccgaagtcccggcgcaccgctggctcagaaccccgcggagctgctgtgcgaggccggagccgcggtggcggctgcacgctgggacctgcagaagcactctttgctaattgtgatcggcgatatcggtacagagagtcagctgagggccgtgcgggcccaccttgaacaagggattctctcctggaacattgacctgtcatcctttgacttgaaccaacagttgagactcttcattacccggcacctagctcacttctcctcagaggtcaaaggccagaggaccctttgccaccagagtgagatcctagagaccatcatcctggtaaatcccagtgcagacagcatcagctctgaggttcatcatcttcttagcagctcatcagcttataaactactaatcttgagtgggcaaagtttagagcctgggggagacctcatcctacagagtggcacctactcatatgaaaactttgcccaggtccttcacaaccccgagatttcccaattgctcagcaatagagaccctgggatacaggccttccttaccgtgtcctgcttaggggaaggtgattggagccacctgggattatccagttcccaagagaccctgcacctccggctaaaccctgagcccactctgcccaccatggacggcgtggctgagttctccgagtatgtctctgagactgtggacgtgccatccccatttgacctactagagccccccacctcagggggcttcctcaagctctccaagccttgttgctacatcttcccaggtggtcgtggggactctgccctctttgctgtcaatggtttcaacatcctggtggatggtggctctgatcgcaagtcctgtttttggaagctggtacggcacttggaccgcattgactcggtgctactcacacacattggggcagacaacctgccaggcatcaatggactactgcagcgcaaagtggcagagctagaggaggagcagtcccagggctctagcagttacagcgactgggtgaagaaccttatctctcctgagcttggagttgtctttttcaacgtgcctgagaagctgcggcttcctgatgcctcccggaaagccaagcgtagcattgaggaggcctgcctcactctgcagcacttaaaccgcctgggcatccaggctgagcctctatatcgtgtggtcagcaataccattgagccactgaccctcttccacaaaatgggtgtgggccggctggacatgtatgtcctcaaccctgtcaaggacagcaaggagatgcagttcctcatgcaaaagtgggcaggcaatagtaaagccaagacaggcatcgtgctgcccaatgggaaggaggctgagatctccgtgccctaccttacctctatcactgctctggtggtctggctaccagccaatcccactgagaagattgtgcgtgtgctttttccaggaaatgctccccaaaacaagatcttggagggcctagaaaagcttcggcatctggacttcctgcgttaccctgtggccacgcagaaggacctggcttctggggctgtgcctaccaacctcaagcccagcaaaatcaaacagcgggctgatagcaaggagagcctcaaagccactaccaagacggccgtgagcaagttggccaaacgggaggaggtggtagaagagggagccaaggaggcacgttcagagctggccaaggagttagccaagacagagaagaaggcaaaagagtcatctgagaagcccccagagaagcctgccaagcctgagagggtgaagacagagtcaagtgaggcactgaaggcagagaagcgaaagctgatcaaagacaaggtagggaaaaagcaccttaaagaaaagatatcaaagctggaagaaaaaaaagacaaggagaaaaaagagatcaaaaaggagaggaaagagctcaagaaggatgaaggaaggaaggaggagaagaaggatgccaagaaggaggagaagaggaaagataccaaacctgagctcaagaagatttccaagccagacctaaagccctttactcctgaggtacgtaagaccctctataaagccaaggtccctggaagagtcaaaatagacaggagccgtgctatccgtggggagaaggagctgtcttctgagccccagacacccccagcccagaagggaactgtaccactcccaaccatcagtgggcacagggagctggtcctatcctcaccagaggacctcacacaggactttgaggagatgaagcgtgaggagagggctttgctggctgaacaaagggacacaggactaggagataagccattccctctagacactgcagaggagggacccccaagtacagctatccagggaacaccaccctctgttccagggctgggacaagaagaacatgtgatgaaggagaaagagcttgtcccagaggtccctgaggaacaaggcagcaaggacagaggcctagactctggggctgaaacagaggaagagaaagatacctgggaggaaaagaagcagagggaagcagagaggctcccagacagaacagaagccagagaggaaagtgaacctgaagtaaaggaggatgtgatagaaaaggctgagttagaagaaatggaggaggtacacccttcagatgaggaggaagaggacgcgacaaaagctgagggtttttaccaaaaacatatgcaggaacccttgaaggtaactccaaggagccgggaggcttttgggggtcgggaattgggactccagggcaaggcccctgagaaggagacctcgttattcctaagcagcctgaccacacctgcaggagccactgagcatgtctcttacatccaggatgagacaatccctggctactcagagactgagcagaccatctcagatgaggagatccatgatgagccggaggagcgcccagctccacccagatttcatacaagtacatatgacctgcccgggcctgaaggtgctggcccattcgaagccagccaacctgccgatagtgctgttcctgctacctctggcaaagtctatggaacgccagagactgaactcacctaccccactaacatagtggctgcccctttggctgaagaggaacatgtgtcctcggccacttcaatcactgagtgtgacaaactttcttcctttgccacatcagtggctgaggaccaatctgtggcctcacttacagctccccagacagaggagacaggcaagagctccctgctgcttgacacagtcacaagcatcccttcctcccgtactgaagctacgcagggcttggactatgtgccatcagctggtaccatctcacccacctcctcactggaagaagacaagggcttcaaatcaccaccctgtgaggacttctctgtgactggggagtcagagaagagaggagagatcatagggaaaggcttgtctggagagagagctgtggaagaggaagaggaggagacagcaaacgtagagatgtctgagaaactttgcagtcaatatggaactccagtgtttagtgcccctgggcatgccctacatccaggagaaccagcccttggagaagcagaggagcggtgccttagcccagatgacagcacagtgaagatggcttctcctccaccatctggcccacccagtgccacccacacaccctttcatcagtccccagtggaagaaaagtctgagccccaagactttcaggaggcagactcctggggagacactaagcgcacaccaggtgtgggcaaagaagatgctgctgaggagacagtcaagccagggcctgaagagggcacactagagaaggaagagaaagttcctcctcccaggagcccccaggcccaggaagcacctgtcaacattgatgaggggcttacaggctgtaccattcaactgttgccagcacaggataaagcaatagtctttgagattatggaggcaggagagcccacaggcccaattctgggagcagaagcccttcccggaggtttgaggactttaccccaagaacctggcaaacctcagaaagatgaggtgctcagatatcctgaccgaagcctctctcctgaagatgcagaatccctctctgtcctcagcgtgccctccccagacactgccaaccaagagcctacccccaagtctccctgtggcctgacagaacagtacctacacaaagaccgttggccagaggtatctccagaagacacccagtcactttctctgtcagaagagagtcccagcaaggagacctccctggatgtctcttctaagcagctctctccagaaagccttggcaccctccagtttggggaactaaaccttgggaaggaagaaatggggcatctgatgcaggccgaggatacctctcaccacacagctcccatgtctgttccagagccccatgcagccacagcgtcacctcccacagatgggacaactcgatactctgcacagacagacatcacagatgacagccttgacaggaagtcacctgccagctcattctctcactctacaccttcaggaaatgggaagtacttacctggggcgatcacaagccctgatgaacacattctgacacctgatagctccttctccaagagtcctgagtctttgccaggccctgccttggaggacattgccataaagtgggaagataaagttccagggttgaaagacagaacctcagaacagaagaaggaacctgagccaaaggatgaagttttacagcagaaagacaaaactctggagcacaaggaggtggtagagccgaaggatacagccatctatcagaaagatgaggctctgcatgtaaagaatgaggctgtgaaacagcaggataaggctttagaacaaaagggcagagacttagagcaaaaagacacagccctagaacagaaggacaaggccctggaaccaaaagacaaagacttagaagaaaaagacaaggccctggaacagaaggataagattccagaagagaaagacaaagccttagaacaaaaggatacagccctggaacagaaggacaaggccctggaaccaaaagataaagacttggaacaaaaggacagggtcctagaacagaaggagaagatcccagaagagaaagacaaagccttagatcaaaaagtcagaagtgttgaacataaggctccggaggacacggtcgctgaaatgaaggacagagacctagaacagacagacaaagcccctgaacagaaacaccaggcccaggaacaaaaggataaagtctcagaaaagaaggatcaggccttagaacaaaaatactgggctttgggacagaaggatgaagccctggaacaaaacattcaggctctggaagagaaccaccaaactcaggagcaggagagcctagtgcaggaggataaaaccaggaaaccaaagatgctagaggaaaaatccccagaaaaggtcaaggccatggaagagaagttagaagctcttctggagaagaccaaagctctgggcctggaagagagcctagtgcaggagggcagggccagagagcaggaagaaaagtactggagggggcaggatgtggtccaggagtggcaagaaacatctcctaccagagaggagccggctggagaacagaaagagcttgccccggcatgggaggacacatctcctgagcaggacaataggtattggaggggcagagaggatgtggccttggaacaggacacatactggagggagctaagctgtgagcggaaggtctggttccctcacgagctggatggccagggggcccgcccacactacactgaggaacgggaaagcactttcctagatgagggcccagatgatgagcaagaagtacccctgcgggaacacgcaacccggagcccctgggcctcagacttcaaggatttccaggaatcctcaccacagaaggggctagaggtggagcgctggcttgctgaatcaccagttgggttgccaccagaggaagaggacaaactgacccgctctccctttgagatcatctcccctccagcttccccacctgagatggttggacaaagggttccttcagccccaggacaagagagtcctatcccagaccctaagctcatgccacacatgaagaatgaacccactactccctcatggctggctgacatcccaccctgggtgcccaaggacagacccctcccccctgcacccctctccccagctcctggtccccccacacctgccccggaatcccatactcctgcacccttctcttggggcacagccgagtatgacagtgtggtggctgcagtgcaggagggggcagctgagttggaaggtgggccatactcccccctggggaaggactaccgcaaggctgaaggggaaagggaagaagaaggtagggctgaggctcctgacaaaagctcacacagctcaaaggtaccagaggccagcaaaagccatgccaccacggagcctgagcagactgagccggagcagagagagcccacaccctatcctgatgagagaagctttcagtatgcagacatctatgagcagatgatgcttactgggcttggccctgcatgccccactagagagcctccacttggagcagctggggattggcccccatgcctctcaaccaaggaggcagctgccggccgaaacacatctgcagagaaggagctttcatctcctatctcacccaagagcctccagtctgacactccaaccttcagctatgcagccctggcaggacccactgtacccccaaggccagagccagggccaagtatggagcccagcctcaccccacctgcagttcccccccgtgctcctatcctgagcaaaggcccaagcccccctcttaatggtaacatcctgagctgcagcccagataggaggtccccatcccccaaggaatcaggccggagtcactgggatgacagcactagtgactcagaactggagaagggggctcgggaacagccagaaaaagaggcccaatccccaagtcctcctcaccccattcctatggggtcccccacattatggccagaaactgaggcacatgttagccctcccttggactcacacctggggcctgcccgacccagtctggacttccctgcttcagcctttggcttctcctcattgcagccagctcccccacagctgccctctccagctgaaccccgctcggcaccctgtggctcccttgccttctctggggatcgagctctggctctggctccaggaccccccaccagaacccggcatgatgaatacctggaagtgaccaaggcccccagcctggattcctcactgccccagctcccatcacccagttctcctggggcccctctcctctccaatctgccacgacctgcctcaccagccctgtctgagggctcctcctctgaggctaccacgcctgtgatttcaagtgtggcggagcgcttctctccaagccttgaggctgcagaacaggagtctggagagctggacccaggaatggaaccagctgcccacagcctctgggacctcactcctctgagcccagcacccccagcttcactggacttggccctagctccagctccaagcctgcctggagacatgggtgatggcatcctgccgtgccacctggagtgctcagaggcagccacggagaagccaagccccttccaggttccctctgaggattgtgcagccaatggcccaactgaaaccagccctaaccccccaggccctgccccagccaaggctgaaaatgaagaggctgcggcttgccctgcctgggaacgtggggcctggcctgaaggagctgagaggagctcccggcctgacacattgctctcccctgagcagccagtgtgtcctgcagggggctccgggggcccacccagcagtgcctctcctgaggtcgaagctgggccccagggatgtgccactgagcctcggccccatcgtggggagctctccccatccttcctgaacccacctctgcccccatccatagatgatagggacctctcaactgaggaagttcggctagtaggaagaggggggcggcgccgggtaggggggccagggaccactgggggcccatgccctgtgactgatgagacaccccctacatcagccagtgactcaggctcctcacagtcagattctgatgtcccgccagaaactgaggagtgtccgtccatcacagctgaggcagccctcgactcagatgaagatggagacttcctacctgtggacaaagctgggggtgtcagtggtactcaccaccccaggcctggccatgacccacctcctctcccacagccagacccccgcccatcccctccccgccctgatgtgtgcatggctgaccccgaggggctcagctcagagtctgggagagtagagaggctacgggagaaggaaaaggttcaggggcgagtagggcgcagggccccaggcaaggccaagccagcgtcccctgcacggcgtctggatcttcggggaaaacgctcacccacccctggtaaagggcctgcagatcgagcatcccgggccccacctcgaccacgcagcaccacaagccaggtcaccccagcagaggaaaaggatggacacagccccatgtccaaaggcctagtcaatggactcaaggcaggaccaatggccttgagttccaagggcagctctggtgcccctgtatatgtggatctcgcctacatcccgaatcattgcagtggcaagactgctgaccttgacttcttccgtcgagtgcgtgcatcctactatgtggtcagtgggaatgaccctgccaatggcgagccaagccgggctgtgctggatgccctgctggagggcaaggcccagtggggggagaatcttcaggtgactctgatccctactcatgacacggaggtgactcgtgagtggtaccaacaaactcatgagcagcagcaacaactgaatgtcctggtcctggctagcagcagcaccgtggtgatgcaggatgagtccttccctgcctgcaagattgagttctgaaagagccgccctcccttccccaaggatccactcccccagctcctttagagaatggctactgctgagtcctttggggttgagggagatgggagctagggggaggggagggagatgtcttgttgtggggacttgggctgggctaaatgggaggggttgtccctccccatcatccattcctgtgaggtgtctcaaaccaaagttaacagggagaggatgggggaggggacaaattagaataggatagcatctgatgcctgagaaccctctcctagcactgtcaaatgctggtattgaatggggactgaggatgggtctcagagagcaacctcctccctcgtagagggagattatatccccaactccagggacctctttatctcaatctatttatttggcatcctgggagggatttccaatagtaatttatgtgacctggggcaggataccgtcagtgaggtgcccagagctgcaccctttcctccatttcccatcccccatctcctcaaccaccagggtctgagttctagcagggtcctgggggtatcccactgctatactgttctactgcttccctcagtatctgaatgtctcaatttaaaacttgaagctctttagaccaatagactggtgagaggagaaaggagcttatcccccagaccctgctttataccattcacatcccagggctgtgtccagacagcacaaaacggcaaggagagcccaagccccaatgccagaattcttccaaactccctgactctttgaagtttttactcaccccatttcaattatcctgatcccttctcatcccctgcttggcttctctgcatgtggtcatctgctgtggcttggtgtttaatgggttaaaaataagccactgcctgacatcccaacatttgacaccccagcaatgtgtgactcccccaacattccactatgccatcctgcagctgaaatgggaacactggctgcctctccaaacccgctcttggacagaggatctgggaggtggaagccaggccagaggacttggggaaaatgagatggaggaaggaaaaagggagaagctgagccacagcttaactcctacagagtgaaatgaaaacgggctgaaaataccaccccaggagaggacctcgccccaagcaagccagtgagcagccctgccagactactgccagactgagaaacccagaagctggtagtcatgtgggcttgccttctctgccaaacgactgggaaaccaaaatgagcccaccttgtgttcttcctagctccaccctccccgtgctgctgtgttctgctcctccccacgcttccctgctatagttcccagctgctgtaacggagccacctccaactctaacaataaaccaagttcattgcagatagtgta

SEQ ID NO: 153925 - DNA, 12036 bp, Homo sapiens
  Payload ID: 10260
  Gene Symbol: MAP1B
  Gene Name: microtubule-associated protein 1B
  Uniprot ID: P46821
  ENST ID: ENST00000296755
  CDS Start-End: 299-7705
gtgaggatgtgccgggtggtcctttcctcctcctcttcctcctcctcccggctccctgcctagtctccatataaaagcggcgccgcctccccgccctctctcactccccgctcctctccgccgcgcactctccgcggcgctgggagagggcggagggggaggcggcgcgcggcgccagaggaggggggacgcagggggcggagcggagacagtaccttcggagataatcctttctcctgccgcagtggagaggagcggccggagcgagacacttcgccgaggcacagcagccggcaggatggcgaccgtggtggtggaagccaccgagccggagccgtccggcagcatcgccaacccggcggcgtccacctcgcctagcctgtcgcaccgcttccttgacagcaagttctacttgctggtggtcgtcggcgagatcgtgaccgaggagcacctgcggcgtgccatcggcaacatcgagctcggaatccgatcatgggacacaaacctgattgaatgcaacttggaccaagaactcaaactttttgtatctcgacactctgcaagattctctcctgaagtcccaggacaaaagatccttcatcaccgaagtgacgttttagaaacagtggtcctgatcaacccttctgatgaagcagtcagcaccgaggtgcgcttaatgatcactgatgctgcccgacacaagctgctcgtgctgaccgggcagtgctttgaaaataccggagagctcattctccagtccggctctttctccttccagaacttcatagagattttcaccgatcaagagatcggggagttactaagcaccacccatcctgccaacaaagccagcttaaccctgttctgtcctgaagaaggggactggaagaactccaatcttgacagacacaatctccaagacttcatcaatattaaactcaattcagcttctatcttgccagaaatggaaggactttctgagtttaccgagtatctctcagaatcagtggaagtcccatctccctttgacatcttggaacctcccacatcgggtggatttctgaagctctccaagccctgctgttatatttttccaggagggaggggcgattctgccttgtttgcagtgaatggtttcaatatgctcatcaatggcggatcagagagaaaatcctgcttctggaagctcatccgacacttagaccgagtggactccatcctgctcacccacattggggatgacaatttgcctggaataaacagcatgttacagcggaaaattgcagagctcgaggaagaacagtcccagggctccaccacaaatagtgactggatgaaaaacctcatctcccctgacttaggagttgtatttctcaatgtacctgaaaatctcaaaaatccagagccaaacatcaagatgaagagaagcatagaagaagcctgcttcactctccagtacctaaacaaattgtccatgaaaccagaacctctgtttagaagtgtaggcaatactattgatcctgtcattcttttccaaaaaatgggagtaggtaaacttgagatgtatgtgcttaatccagtcaagagcagcaaggaaatgcagtattttatgcagcagtggactggtaccaacaaagacaaggctgaattcattctgcctaatggtcaagaagtagatctcccgatttcctacttaacttcagtctcatctttgattgtgtggcatccagcaaaccctgcggagaaaatcatccgagtcctgtttcctgggaacagcacccagtacaacatcctggaagggttggaaaagctcaaacatctagactttctgaagcagccactggccacccaaaaggatctcactggccaggtgcccactcctgtggtgaaacaaacaaaactgaaacagagggctgatagccgagaaagtctgaagccagccgcaaaaccacttcctagcaaatccgtgcgcaaggagtcaaaagaagaaacccctgaggtcacaaaagtgaatcacgtggaaaagccacccaaagttgaaagcaaagaaaaggtaatggtgaaaaaagacaagccaataaaaacagagaccaaaccttcagtgactgaaaaggaggttcccagcaaagaagagccatctccagtgaaagccgaggtggctgagaagcaagccacagatgtcaaacccaaagctgccaaggagaagacggtgaaaaaggaaacaaaggtaaagcctgaagacaagaaagaggagaaagaaaagccaaagaaagaagtggctaaaaaggaggacaaaacacctatcaagaaggaggaaaaaccaaaaaaggaagaggtgaaaaaagaagtcaaaaaagagatcaagaaagaagagaaaaaagaacccaagaaagaggttaagaaagaaacaccgccaaaggaagtcaagaaggaagttaagaaggaagagaagaaggaagtgaaaaaggaagaaaaggaacccaaaaaagaaattaagaagctccctaaagacgcaaagaaatcatctactcctctgtctgaagcaaaaaaaccagctgctttaaaaccaaaagtacccaagaaggaagagtctgtcaagaaagattctgttgctgccggaaagccaaaggagaaggggaaaataaaagtcattaagaaggaaggcaaggccgcagaggctgtcgctgcagctgtcggcactggagccaccacagcagctgtcatggcggcagctggaatagcagccattggccctgccaaagaactcgaagctgagaggtcccttatgtcatctcctgaggatctaaccaaggactttgaagagttaaaggctgaagaggtcgatgtaacaaaggacatcaagcctcagctggagctaatcgaagacgaagagaaactgaaggaaactgagccagtcgaagcctacgtcatccagaaggagagagaagtcaccaaaggtcctgccgagtcccctgatgagggaatcactaccactgaaggggagggcgaatgtgaacagacacctgaggagctggagcccgtcgagaagcagggagtagacgacattgaaaaatttgaagatgaaggagccggttttgaagaatcttcagagactggagactatgaagagaaggcagaaactgaggaggctgaggagccagaagaggatggggaggaacacgtatgtgtgagcgcctccaagcacagccccactgaggatgaggaaagtgccaaggcggaggctgatgcatacatcagggagaagagggagtctgtggccagtggggatgaccgagccgaagaagacatggatgaggccattgagaaaggagaggctgaacaatctgaagaggaggctgatgaggaggacaaagctgaagatgccagagaggaggaatatgagccggaaaaaatggaagctgaagactatgtgatggctgtggtcgacaaggctgcagaggctggtggtgccgaggagcagtatggattcctcaccacaccaaccaagcaactaggagcccagtctcctggccgagaacctgcatcttcaattcatgatgagactttacctggaggctcagagagcgaggccaccgcttctgatgaggagaatcgagaagaccagcctgaggaattcactgccacctctggctacactcagtctactattgagatatccagtgagcccacccccatggatgagatgtctacccctcgagacgtgatgagtgatgagaccaacaatgaagagacggagtccccttctcaggaattcgtaaatatcaccaaatatgaatcttcattgtattctcaggaatactctaaacctgctgatgttacaccgctcaacggattttctgaaggatcaaaaacagatgccactgatggcaaggattacaatgcttcagcctctaccatatcaccaccctcttccatggaggaagacaaattcagcagatctgctttacgtgatgcttactgctctgaagtgaaagccagcaccactttggacatcaaagatagcatctcagctgtttcaagtgaaaaggtcagcccatcgaagagcccgtccctgagtccatctccaccatcacccttagaaaagacccccctgggtgaacgtagtgtgaacttctctctgacgcccaatgagattaaagtctctgcagaggcagaagtagccccggtgtctcctgaggtgacccaagaagtagttgaagaacattgtgctagtcctgaggacaagactctggaagtggtgtcaccatctcagtccgtgactggcagtgctggtcacacaccttactatcaatctcctactgacgagaaatccagtcatctccctacagaagtcattgaaaaaccaccagcagttccagtgagttttgaattcagtgatgccaaagatgagaatgaaagggcttcagtaagccccatggatgagcccgtgcctgactcagagtctcctattgaaaaagttttgtctcctttacgcagcccgcccctcattggatccgagtctgcttatgaaagttttctaagtgctgatgacaaggcttctggcagaggtgccgaaagtccttttgaagaaaagagtggaaaacaaggctctccagaccaagtaagtccagtttctgaaatgacttctactagtctttaccaagacaaacaggaagggaaaagcacagactttgcaccaataaaagaagactttggccaagaaaagaaaactgatgatgttgaagccatgagttctcaaccagcactggctctggatgaaaggaaattaggagatgtttctcccacacaaatagatgtcagtcagtttggatcttttaaagaagacactaagatgtccatttctgaaggtactgtctcagacaagtcagctactcctgttgatgagggcgtagcagaagacacgtactctcatatggagggtgtggcctcagtgtccacagcctcagtggctacgagctcatttccagagccaacaacagatgatgtgtctccatctctgcatgctgaggttggctccccacattccacagaagtagatgactccctttcagtgtctgttgtgcaaacacctaccacattccaggaaacagaaatgtctccatctaaagaagaatgcccaagaccgatgtcaatttctccaccagatttctcccctaaaactgcaaagtccaggacacccgttcaagatcacagatctgaacagtcctcaatgtctattgaatttggccaagaatctcctgagcaatcccttgctatggacttcagtcgacagtctccagatcaccctacagtgggtgcaggcgtgcttcacatcactgaaaatgggccaactgaagtggactacagtccttctgacatgcaggactccagtttatcacataagataccacctatggaggagccgtcctacacccaagataatgatctttctgagctcatctcagtatctcaggtagaggcctccccgtccacctcttctgctcataccccttctcagatcgcttctcctctccaagaagatactctatccgatgttgctcctcccagagatatgtccttatatgcctcactcacctctgaaaaagtgcaaagtctggaaggagagaagctctctccaaaatctgatatctctccactcaccccacgagagtcctctcctttatattcacctactttttcagattctacctctgcagtcaaagagaaaacagcaacttgccacagttcctcttctccaccaatagatgcagcatccgcagagccctatggcttccgtgcctcagtgttattcgatacaatgcaacaccatctagccttgaatagagatttgtccacacctggcctggagaaggacagtggagggaagacacctggtgactttagctatgcctatcaaaagcctgaggaaacaaccaggtccccagatgaagaagattatgactatgagtcttatgagaagaccacccggacctcagatgtgggtggctattactatgagaagatagagagaaccacaaaatctccaagtgacagtggctactcctatgagaccattgggaaaactaccaagacccctgaagatggtgactattcctatgaaattattgagaagaccacacggacccctgaagagggtgggtactcatatgacataagtgaaaagaccaccagcccccccgaagtgagtggttacagctatgaaaagactgagaggtctagaaggcttctggatgacatcagcaatggctatgatgactctgaggatggtggccacacacttggggaccccagctactcttatgaaaccactgagaaaattaccagtttccctgagtctgaaggttattcctatgagacatctacaaagacaacacgaacccctgatacttccacatactgttacgagactgcagagaaaatcactagaacccctcaggcatccacatattcctacgagacttcagacctatgctacactgcagaaaagaagtccccctcagaagcccgtcaggatgtcgatttatgcctcgtgtcctcttgtgaatacaagcaccccaagacagagctttcaccctctttcattaatcccaatcctcttgagtggtttgccagtgaagaacccactgaagaatctgaaaagcccctcactcaatcagggggagccccaccgcctccaggaggaaagcaacagggccgacagtgtgatgaaacccctcccacctcagtcagcgagtcagccccatcccagaccgactctgatgttcccccggagactgaagagtgcccctccatcacggccgatgccaatatcgactctgaagacgagtcggaaaccatccccacagacaaaactgtcacgtacaaacacatggacccacctccagctcccgtgcaagaccgcagcccttcgccacgccaccctgatgtgtccatggtggacccagaggccttggccattgagcagaacctgggcaaagctctaaagaaagatctgaaagagaagaccaaaaccaaaaagccaggtacaaagaccaagtcatcttcacctgtcaaaaagagtgatgggaagtctaagcccttggcagcttcaccaaaaccagcgggcttgaaagaatcctcggataaagtgtccagggtggcttctcctaagaagaaagaatctgtggaaaaggcagcaaaacccaccaccactcctgaggtcaaagctgcacgtggggaagagaaagacaaggagaccaagaatgctgccaatgcctctgcatccaagtcggccaagaccgccactgcaggaccaggaactaccaagacgaccaagtcatctgctgtgcccccaggcctccctgtgtatttggacctgtgctacattcctaaccacagcaatagtaagaatgttgatgtggaatttttcaagagagtgcggtcttcctactacgtggtgagtgggaatgaccctgctgctgaggagcccagccgggctgtcctggacgctttgttggaaggaaaggctcagtggggcagcaacatgcaggtgacactgatcccaactcatgactcagaagtgatgagggaatggtaccaggagacccatgagaaacagcaagatctcaacatcatggttttagcaagcagcagcacagtggttatgcaagatgaatccttccctgcatgcaagattgaactgtaaaaaccaaggccagccacaccacaggatctgaactttgtttccagaaattcttcaatttgaaatcaccttttctaaaaagtcaattcatctagttaagtcgctgaacaattacctgccaaatgctatactgtgtcatggtgatgcaagtcactaaatttctcagtttttgctgattgctaagggaaataacagtatttccacaatagggttcaaattcctgcaaaattacctaccccagttcatctctgctgaacatttggaaaccatgcactagccaacccaactgacttctgctaggtagaggcatttgtcttagagagagagagagcgcgggagagagtgagagagagtgagagcacaaagataacgcaggagagagagagagaaagaatgagaaagaaaaggaatgcaagagaaggagatgtaatgacagagagttctggtgagatacccagagagaaaaagagagagcagggtggggtaaggaggagaaaataaaccaacaattaggtctgcattttctcaggcagtaggcattctttagtctacataggcaaagttttccatttttgtcagtctgagtcatcaaaaagagtcttaattttctaaaacaagttggctagaagaaagtaaaaagaacaacacttgttatgagggcatgtgatattttcacatcttaattaagctccttcagtttgaaggctgcacactgacataatgtagtgagtgtagactggccatgcaagtggtttgggccccattcagaactctcagactctaaacacacaagtagattgatctaaggcatgctcccagcatttgtccacccacttagtccactctgagtcgattaacctgcatgcagcaacacccaagtccaccccaattaactgaagcaaataccaaagcagttgggagtacatatggtagacaatttgccttaggaagtgacttgaatgtacaaagatacttgatgcacttattttttaatgtgagacagcaagtttataaaacatccatataggattatagatacttaaaggaacacgtgggtgagcgtgtgtgggggtactagaagctgatctgattggtccaacagtttgatgctgagtcatgcgtgttgaatcccacttcagtgcacctgtggcctctcagtcaaacaagttgtgcctttcacagcttctttactactgcaagttcaagactgaaatggcttctatgatcagaactgggaaaacagtgaatcttatggtggaagaggttctcagcaagtgtacagtatttaccttcctttgtcttacattggctttttaaattttccattaatttcaacataattatgggaacaagtgtacagaagaattttttttttaagatatgtgagaacttttcatagatgaactttttaacaaatgttttcatttacaggaaattgcaaagaaaattctcaagtgatagtctttttttttaagtgtttcgtaagacaaaaattgaataatgttttttgaagttctggcaagattgaagtctgatattgcagtaatgatatttattaaaaacccataactaccaggaataatgatacctcccaccccttgattcccataacataaaagtgctacttgagagtgggggagaatggcatggtaggctacttttcagggccttgacaagtacatcacccagtggtatcctacatacttctttcaagatcttcaaccatgaggtaaaagagccaagttcaaagaaccctagcacaaatttgctttgggattttcttttctggaaaaaaaaaataaaagaaatagtacattgaaaacaaatgaattctcaactcctacggttcatgtagagtttagagaaaatttccatcattgtcatcattgaactgtgaacctgggaagccagatcatgattaacactgacatcaagtttcaagttgcagatcaatgcacccagtgttcagatgaggcaaacttctccgtgacaactgtgctgtgctctgtcacattacatttcctgcagactctaagatctacggagtagagaacaatgacctcattttattttctatgttagttatttatttcaaaattaacattttagttgatttttgtctgataagtctatgttttgcactgctaactatgatgagggtttaaaaaaatgcttcttcagggtcctttcactgaggacctatgcagtctacttaatgctgtgaattacatttttcaaatgtttaattttttaaagaaaattaatattctatttttgttaggcttctctagaaatgcagcttttatttattaccccatttctttcaagtccttggaaaataacatattaagggtacaagaaattaacacatgatggaaaagtcattgtgacgccaatgaatttcattgagtataaactcatctacttcaaatttattttataacacaacctaagatactcaagataattatttaatggttagctcttaagttgaattggtctacataatgcgtgggaagaaaaccagatttttagccttcttgccaaatccagacctctggttgatttttctttgacagaagatgcaagttattttccaatttcacaattaaatgtatttaacctgaacattattttgctttaaaaactataaacattgtaggagaattatagccagtcttcagttataaccactccaccctcctcactttctctctctctctctctttttttttttttttttttttgctatgggatttaatgggaaaaatatgtaaaaactgtcactagtcagctggctctttttcctatgaaatctatcagtacctttctccatccgttgttctcaatatgaccacagagcctgagtataccaagaaaaccaatattcgcattacaggttgctcctgtccttccagacacctttcctgcctgtgtgactaacctaattttgctagttccataaatacacgattagtttagtaacagccatcacaatgtaccatgtacattcatggtgagagctaaagatcgacacagacttctaggagctttgttcatactgattacttaatccaattgtatagattgaatatttgagtggaaggaatttacactctgtttaaatgatgggattctatcgagatagcactcatgatcatgacctttttggtagtattcttaaacaaaattctacagagactaaatgttagcgatgatcctccattttcaattttaaccaattctgtcccctttctcaaaaccctgagccctgtgcatgctttctcagtcttgtggtgggactggatacaatgactaacttcccctcctcccctctttaaacaccattttccatggagttcaaaaaaattttttttcttaacgttacatatcatagtgaatggtttccccagtgtatatgaatgttttaagtgtctccaatagcttatgcagtctaggagctttccaatactcatttaattaagatttaatcatttgctaatggaaatcttaccacctttcattttccctctgttaccaaatttcagctcttaggagctgctctacaattctgaatttgcttttcttgcctctctttagtcacctgtcacaggaggttcctgctcagtaatgatattgtgagttaggataataactttttttttttgtgcttcagatttagaagaaaagatcctgtttccatttgaaaggaactgtaagcttttatcttttaaccaactgaacaatacaccaaaagcagcctagggatgagcatttctttgaaagcaattaggttattcacctggtattaaaactatttactgttaaaaaatctgtgacttcatgaagttgatttttaaaggcagcatcaaaaactgaaaaggaagggaaaaaataggcagcttctctgcacttgtttggagctccccaaaacaggagccatggagaagtggcatcaagaccgggctgccctttcgagaacaccctgtggcagttcagagacacgcttttcctacactgcatgcagcccctctttccagcactggaaagaagtggtcttgagcccagctgagaagcacttcacactcctctctcttgttctgaatggtgtttgtgtcagtctgcagctgtgtatggtattatgtcttataatcctgcatcacttctatcctatccagtcatatctaatgtagaaaattagtttccagtgaaagtaatatgtagtgcttttatgatatttgtgtgcaatatcccctcttccattgaggatatttgatgtaaaggaaaaaaaaaaactcagttccacaataaaatacaaaagtggcaaaagttca

SEQ ID NO: 153926 - DNA, 2079 bp, Homo sapiens
  Payload ID: 10260
  Gene Symbol: MAP1B
  Gene Name: microtubule-associated protein 1B
  ENST ID: ENST00000504492
  CDS Start-End: 373-2079
agatgctggggcggcccagccccaggttacgtcgtccccagaaagaatctggccaacagtctggccgtgacaagagctggaagcttctctctctccctttaaatcccctccttcattcaaatccgatcctataaaaaggcttttgttgaaggagcagccatggcatcttggtgcacgtctgtgccattcctctcaatatttccaaagatggacaaaagagaacatcgttagttgaattcctgggcaaactggtctgaagattgacttggaaggagtggaggacaaaagatccttcatcaccgaagtgacgttttagaaacagtggtcctgatcaacccttctgatgaagcagtcagcaccgaggtgcgcttaatgatcactgatgctgcccgacacaagctgctcgtgctgaccgggcagtgctttgaaaataccggagagctcattctccagtccggctctttctccttccagaacttcatagagattttcaccgatcaagagatcggggagttactaagcaccacccatcctgccaacaaagccagcttaaccctgttctgtcctgaagaaggggactggaagaactccaatcttgacagacacaatctccaagacttcatcaatattaaactcaattcagcttctatcttgccagaaatggaaggactttctgagtttaccgagtatctctcagaatcagtggaagtcccatctccctttgacatcttggaacctcccacatcgggtggatttctgaagctctccaagccctgctgttatatttttccaggagggaggggcgattctgccttgtttgcagtgaatggtttcaatatgctcatcaatggcggatcagagagaaaatcctgcttctggaagctcatccgacacttagaccgagtggactccatcctgctcacccacattggggatgacaatttgcctggaataaacagcatgttacagcggaaaattgcagagctcgaggaagaacagtcccagggctccaccacaaatagtgactggatgaaaaacctcatctcccctgacttaggagttgtatttctcaatgtacctgaaaatctcaaaaatccagagccaaacatcaagatgaagagaagcatagaagaagcctgcttcactctccagtacctaaacaaattgtccatgaaaccagaacctctgtttagaagtgtaggcaatactattgatcctgtcattcttttccaaaaaatgggagtaggtaaacttgagatgtatgtgcttaatccagtcaagagcagcaaggaaatgcagtattttatgcagcagtggactggtaccaacaaagacaaggctgaattcattctgcctaatggtcaagaagtagatctcccgatttcctacttaacttcagtctcatctttgattgtgtggcatccagcaaaccctgcggagaaaatcatccgagtcctgtttcctgggaacagcacccagtacaacatcctggaagggttggaaaagctcaaacatctagactttctgaagcagccactggccacccaaaaggatctcactggccaggtgcccactcctgtggtgaaacaaacaaaactgaaacagagggctgatagccgagaaagtctgaagccagccgcaaaaccacttcctagcaaatccgtgcgcaaggagtcaaaagaagaaacccctgaggtcacaaaagtgaatcacgtggaaaagccacccaaagttgaaagcaaagaaaaggtaatggtgaaaaaagacaagccaataaaaacagagaccaaaccttcagtgactgaaaaggaggttcccagcaaagaagagccatctccagtgaaagccgaggtggctgagaagcaagccacagatgtcaaacccaaagctgccaaggagaagacggtgaaaaaggaaacaaaggtaaagcctgaagacaagaaagaggagaaagaaaagccaaagaaagaagtggctaaaaaggaggacaaaacacctatcaagaaggaggaaaaaccaaaaaaggaagaggtgaaaaaagaagtcaaaaaagagatcaagaaagaagagaaaaaagaa

SEQ ID NO: 153927 - DNA, 2056 bp, Homo sapiens
  Payload ID: 10260
  Gene Symbol: MAP1B
  Gene Name: microtubule-associated protein 1B
  ENST ID: ENST00000511641
  CDS Start-End: 47-2056
gagcggccggagcgagacacttcgccgaggcacagcagccggcaggatggcgaccgtggtggtggaagccaccgagccggagccgtccggcagcatcgccaacccggcggcgtccacctcgcctagcctgtcgcaccgcttccttgacagcaagttctacttgctggtggtcgtcggcgagatcgtgaccgaggagcacctgcggcgtgccatcggcaacatcgagctcggaatccgatcatgggacacaaacctgattgaatgcaacttggaccaagaactcaaactttttgtatctcgacactctgcaagattctctcctgaagtcccaggacaaaagatccttcatcaccgaagtgacgttttagaaacagtggtcctgatcaacccttctgatgaagcagtcagcaccgaggtgcgcttaatgatcactgatgctgcccgacacaagctgctcgtgctgaccgggcagtgctttgaaaataccggagagctcattctccagtccggctctttctccttccagaacttcatagagattttcaccgatcaagagatcctgaaaggaggccacaacaagtgccctgttaatctgaatttctttaagatcggggagttactaagcaccacccatcctgccaacaaagccagcttaaccctgttctgtcctgaagaaggggactggaagaactccaatcttgacagacacaatctccaagacttcatcaatattaaactcaattcagcttctatcttgccagaaatggaaggactttctgagtttaccgagtatctctcagaatcagtggaagtcccatctccctttgacatcttggaacctcccacatcgggtggatttctgaagctctccaagccctgctgttatatttttccaggagggaggggcgattctgccttgtttgcagtgaatggtttcaatatgctcatcaatggcggatcagagagaaaatcctgcttctggaagctcatccgacacttagaccgagtggactccatcctgctcacccacattggggatgacaatttgcctggaataaacagcatgttacagcggaaaattgcagagctcgaggaagaacagtcccagggctccaccacaaatagtgactggatgaaaaacctcatctcccctgacttaggagttgtatttctcaatgtacctgaaaatctcaaaaatccagagccaaacatcaagatgaagagaagcatagaagaagcctgcttcactctccagtacctaaacaaattgtccatgaaaccagaacctctgtttagaagtgtaggcaatactattgatcctgtcattcttttccaaaaaatgggagtaggtaaacttgagatgtatgtgcttaatccagtcaagagcagcaaggaaatgcagtattttatgcagcagtggactggtaccaacaaagacaaggctgaattcattctgcctaatggtcaagaagtagatctcccgatttcctacttaacttcagtctcatctttgattgtgtggcatccagcaaaccctgcggagaaaatcatccgagtcctgtttcctgggaacagcacccagtacaacatcctggaagggttggaaaagctcaaacatctagactttctgaagcagccactggccacccaaaaggatctcactggccaggtgcccactcctgtggtgaaacaaacaaaactgaaacagagggctgatagccgagaaagtctgaagccagccgcaaaaccacttcctagcaaatccgtgcgcaaggagtcaaaagaagaaacccctgaggtcacaaaagtgaatcacgtggaaaagccacccaaagttgaaagcaaagaaaaggtaatggtgaaaaaagacaagccaataaaaacagagaccaaaccttcagtgactgaaaaggaggttcccagcaaagaagagccatctccagtgaaagccgaggtggctgagaagcaagccacagatgtcaaacccaaagctgccaaggagaagacggtgaaaaaggaaacaaaggtaaagcctgaagacaagaaagaggagaaa

SEQ ID NO: 153928 - DNA, 580 bp, Homo sapiens
  Payload ID: 10260
  Gene Symbol: MAP1B
  Gene Name: microtubule-associated protein 1B
  ENST ID: ENST00000512974
  CDS Start-End: 214-580
gtgaggatgtgccgggtggtcctttcctcctcctcttcctcctcctcccggctccctgcctagtctccatataaaagcggcgcgcggcgccagaggaggggggacgcagggggcggagcggagacagtaccttcggagataatcctttctcctgccgcagtggagaggagcggccggagcgagacacttcgccgaggcacagcagccggcaggatggcgaccgtggtggtggaagccaccgagccggagccgtccggcagcatcgccaacccggcggcgtccacctcgcctagcctgtcgcaccgcttccttgacagcaagttctacttgctggtggtcgtcggcgagatcgtgaccgaggagcacctgcggcgtgccatcggcaacatcgagctcggaatccgatcatgggacacaaacctgattgaatgcaacttggaccaagaactcaaactttttgtatctcgacactctgcaagattctctcctgaagtcccaggacaaaagatccttcatcaccgaagtgacgttttagaaacagtggtcctgatcaacccttctgatgaagcagtcagcaccg

SEQ ID NO: 153929 - DNA, 2154 bp, Homo sapiens
  Payload ID: 10260
  Gene Symbol: MAP1B
  Gene Name: microtubule-associated protein 1B
  ENST ID: ENST00000513526
  CDS Start-End: 56-367
agtggagaggagcggccggagcgagacacttcgccgaggcacagcagccggcaggatggcgaccgtggtggtggaagccaccgagccggagccgtccggcagcatcgccaacccggcggcgtccacctcgcctagcctgtcgcaccgcttccttgacagcaagttctacttgctggtggtcgtcggcgagatcgtgaccgaggagcacctgcggcgtgccatcggcaacatcgagctcggaatccgatcatgggacacaaacctgattgaatgcaacttggaccaagaactcaaactttttgtatctcgacactctgcaagattctctcctgaagtcccagagatgaaaaagaatatcaaagaataattaaaggacaaaagatccttcatcaccgaagtgacgttttagaaacagtggtcctgatcaacccttctgatgaagcagtcagcaccgaggtgcgcttaatgatcactgatgctgcccgacacaagctgctcgtgctgaccgggcagtgctttgaaaataccggagagctcattctccagtccggctctttctccttccagaacttcatagagattttcaccgatcaagagatcggggagttactaagcaccacccatcctgccaacaaagccagcttaaccctgttctgtcctgaagaaggggactggaagaactccaatcttgacagacacaatctccaagacttcatcaatattaaactcaattcagcttctatcttgccagaaatggaaggactttctgagtttaccgagtatctctcagaatcagtggaagtcccatctccctttgacatcttggaacctcccacatcgggtggatttctgaagctctccaagccctgctgttatatttttccaggagggaggggcgattctgccttgtttgcagtgaatggtttcaatatgctcatcaatggcggatcagagagaaaatcctgcttctggaagctcatccgacacttagaccgagtggactccatcctgctcacccacattggggatgacaatttgcctggaataaacagcatgttacagcggaaaattgcagagctcgaggaagaacagtcccagggctccaccacaaatagtgactggatgaaaaacctcatctcccctgacttaggagttgtatttctcaatgtacctgaaaatctcaaaaatccagagccaaacatcaagatgaagagaagcatagaagaagcctgcttcactctccagtacctaaacaaattgtccatgaaaccagaacctctgtttagaagtgtaggcaatactattgatcctgtcattcttttccaaaaaatgggagtaggtaaacttgagatgtatgtgcttaatccagtcaagagcagcaaggaaatgcagtattttatgcagcagtggactggtaccaacaaagacaaggctgaattcattctgcctaatggtcaagaagtagatctcccgatttcctacttaacttcagtctcatctttgattgtgtggcatccagcaaaccctgcggagaaaatcatccgagtcctgtttcctgggaacagcacccagtacaacatcctggaagggttggaaaagctcaaacatctagactttctgaagcagccactggccacccaaaaggatctcactggccaggtgcccactcctgtggtgaaacaaacaaaactgaaacagagggctgatagccgagaaagtctgaagccagccgcaaaaccacttcctagcaaatccgtgcgcaaggagtcaaaagaagaaacccctgaggtcacaaaagtgaatcacgtggaaaagccacccaaagttgaaagcaaagaaaaggtaatggtgaaaaaagacaagccaataaaaacagagaccaaaccttcagtgactgaaaaggaggttcccagcaaagaagagccatctccagtgaaagccgaggtggctgagaagcaagccacagatgtcaaacccaaagctgccaaggagaagacggtgaaaaaggaaacaaaggtaaagcctgaagacaagaaagaggagaaagaaaagccaaagaaagaagtggctaaaaaggaggacaaaacacctatcaagaaggaggaaaaaccaaaaaaggaagaggtgaaaaaagaagtcaaaaaagagatcaag

SEQ ID NO: 153930 - DNA, 3419 bp, Homo sapiens
  Payload ID: 10261
  Gene Symbol: MAP1S
  Gene Name: microtubule-associated protein 1S
  Uniprot ID: Q66K74
  ENST ID: ENST00000324096
  CDS Start-End: 152-3331
gctctccacgacctcaaagggcctgtaagtggtcgacaaaaaggggcggggatgcggtggttccgggcggggtcttcagcccttccggtgcggcccctttaagaggcggggcctgcggggcgggcgccgagaacgccggggcggcccgaagatggcggcggtggctggatctggggctgccgcggctccgagctcactgctcctcgtggtgggcagcgagttcgggagcccggggctcctcacctacgtcctggaggagctcgaaagaggcatccggtcttgggatgtcgatcctggcgtctgcaaccttgatgaacagctcaaggtctttgtgtcccgacactctgccaccttctccagcattgtgaaaggccagcggagcctgcaccaccgtggagacaacctggagaccctggtcctcctgaacccatcagacaagtccctgtatgatgagctccggaaccttctgttggaccctgcctctcacaagctactggtgttggctgggccctgcctggaggagacgggggagctgctgctacagacagggggcttctcgcctcaccacttcctccaggtcctgaaggacagagagatccgggacatcctggccaccacgcccccacctgtgcagccgcccatactcaccatcacctgccccaccttcggtgactgggctcagctggcacccgctgtgcctggccttcagggggcgctccggctccagctgcggctgaaccccccggcgcagctgcccaactctgagggcctgtgcgaattcctggagtacgtggctgagtctctggagccaccgtcccccttcgagctgctggagcccccgacctccgggggcttcctcaggctgggccggccctgctgctacatcttccctggaggcctcggggatgccgccttcttcgccgtcaatggcttcactgtgctggtcaacggtggctcaaaccccaagtccagtttctggaagctggtgcggcacctggaccgcgtggatgccgtgctggtgacccaccctggcgccgacagcctccccggcctcaacagcctgctgcggcgcaaactggcggagcgctccgaggtggctgctggtgggggctcctgggacgacaggctgcgcaggctcatctcccccaacctgggggtcgtgttcttcaacgcctgcgaggccgcgtcgcggctggcgcgcggcgaggatgaggcggagctggcgctgagcctcctggcgcagctgggcatcacgcctctgccactcagccgcggccccgtgccagccaaacccaccgtgctcttcgagaagatgggcgtgggccggctggacatgtatgtgctgcacccgccctccgccggcgccgagcgcacgctggcctctgtgtgcgccctgctggtgtggcaccccgccggccccggcgagaaggtggtgcgcgtgctgttccccggttgcaccccgcccgcctgcctcctggacggcctggtccgcctgcagcacttgaggttcctgcgagagcccgtggtgacgccccaggacctggaggggccggggcgagccgagagcaaagagagcgtgggctcccgggacagctcgaagagagagggcctcctggccacccaccctagacctggccaggagcgccctggggtggcccgcaaggagccagcacgggctgaggccccacgcaagactgagaaagaagccaagaccccccgggagttgaagaaagaccccaaaccgagtgtctcccggacccagccgcgggaggtgcgccgggcagcctcttctgtgcccaacctcaagaagacgaatgcccaggcggcacccaagccccgcaaagcgcccagcacgtcccactctggcttcccgccggtggcaaatggaccccgcagcccgcccagcctccgatgtggagaagccagcccccccagtgcagcctgcggctctccggcctcccagctggtggccacgcccagcctggagctggggccgatcccagccggggaggagaaggcactggagctgcctttggccgccagctcaatcccaaggccacgcacaccctcccctgagtcccaccggagccccgcagagggcagcgagcggctgtcgctgagcccactgcggggcggggaggccgggccagacgcctcacccacagtgaccacacccacggtgaccacgccctcactacccgcagaggtgggctccccgcactcgaccgaggtggacgagtccctgtcggtgtcctttgagcaggtgctgccgccatccgcccccaccagtgaggctgggctgagcctcccgctgcgtggcccccgggcgcggcgctcggcttccccacacgatgtggacctgtgcctggtgtcaccctgtgaatttgagcatcgcaaggcggtgccaatggcaccggcacctgcgtcccccggcagctcgaatgacagcagtgcccggtcacaggaacgggcaggtgggctgggggccgaggagacgccacccacatcggtcagcgagtccctgcccaccctgtctgactcggatcccgtgcccctggcccccggtgcggcagactcagacgaagacacagagggctttggagtccctcgccacgaccctttgcctgaccccctcaaggtccccccaccactgcctgacccatccagcatctgcatggtggaccccgagatgctgccccccaagacagcacggcaaacggagaacgtcagccgcacccggaagcccctggcccgccccaactcacgcgctgccgcccccaaagccactccagtggctgctgccaaaaccaaggggcttgctggtggggaccgtgccagccgaccactcagtgcccggagtgagcccagtgagaagggaggccgggcacccctgtccagaaagtcctcaacccccaagactgccactcgaggcccgtcggggtcagccagcagccggcccggggtgtcagccaccccacccaagtccccggtctacctggacctggcctacctgcccagcgggagcagcgcccacctggtggatgaggagttcttccagcgcgtgcgcgcgctctgctacgtcatcagtggccaggaccagcgcaaggaggaaggcatgcgggccgtcctggacgcgctactggccagcaagcagcattgggaccgtgacctgcaggtgaccctgatccccactttcgactcggtggccatgcatacgtggtacgcagagacgcacgcccggcaccaggcgctgggcatcacggtgttgggcagcaacagcatggtgtccatgcaggatgacgccttcccggcctgcaaggtggagttctagccccatcgccgacacgccccccactcagcccagcccgcctgtccctagattcagccacatcagaaataaactgtgactacacttggct

SEQ ID NO: 153931 - DNA, 3399 bp, Homo sapiens
  Payload ID: 10261
  Gene Symbol: MAP1S
  Gene Name: microtubule-associated protein 1S
  Uniprot ID: Q66K74
  ENST ID: ENST00000544059
  CDS Start-End: 236-3337
gagtcataggcgcacctgccaggttcacctgcagccacttggctcagtgggactggcgggcgtgatgcgcccgtgggtggagatgggtgttcatcccccatccctcggagcatctggacctggcgtttcattgcatgtaaaatgggacaggaacacgcacctcggttcatgtgcttgaggagtgtttagtgagcacctgctatgcgccaggcctttgggcagtggacacagggatatggccgggatgatagacaggttcagccctgccaacacaggcatccggtcttgggatgtcgatcctggcgtctgcaaccttgatgaacagctcaaggtctttgtgtcccgacactctgccaccttctccagcattgtgaaaggccagcggagcctgcaccaccgtggagacaacctggagaccctggtcctcctgaacccatcagacaagtccctgtatgatgagctccggaaccttctgttggaccctgcctctcacaagctactggtgttggctgggccctgcctggaggagacgggggagctgctgctacagacagggggcttctcgcctcaccacttcctccaggtcctgaaggacagagagatccgggacatcctggccaccacgcccccacctgtgcagccgcccatactcaccatcacctgccccaccttcggtgactgggctcagctggcacccgctgtgcctggccttcagggggcgctccggctccagctgcggctgaaccccccggcgcagctgcccaactctgagggcctgtgcgaattcctggagtacgtggctgagtctctggagccaccgtcccccttcgagctgctggagcccccgacctccgggggcttcctcaggctgggccggccctgctgctacatcttccctggaggcctcggggatgccgccttcttcgccgtcaatggcttcactgtgctggtcaacggtggctcaaaccccaagtccagtttctggaagctggtgcggcacctggaccgcgtggatgccgtgctggtgacccaccctggcgccgacagcctccccggcctcaacagcctgctgcggcgcaaactggcggagcgctccgaggtggctgctggtgggggctcctgggacgacaggctgcgcaggctcatctcccccaacctgggggtcgtgttcttcaacgcctgcgaggccgcgtcgcggctggcgcgcggcgaggatgaggcggagctggcgctgagcctcctggcgcagctgggcatcacgcctctgccactcagccgcggccccgtgccagccaaacccaccgtgctcttcgagaagatgggcgtgggccggctggacatgtatgtgctgcacccgccctccgccggcgccgagcgcacgctggcctctgtgtgcgccctgctggtgtggcaccccgccggccccggcgagaaggtggtgcgcgtgctgttccccggttgcaccccgcccgcctgcctcctggacggcctggtccgcctgcagcacttgaggttcctgcgagagcccgtggtgacgccccaggacctggaggggccggggcgagccgagagcaaagagagcgtgggctcccgggacagctcgaagagagagggcctcctggccacccaccctagacctggccaggagcgccctggggtggcccgcaaggagccagcacgggctgaggccccacgcaagactgagaaagaagccaagaccccccgggagttgaagaaagaccccaaaccgagtgtctcccggacccagccgcgggaggtgcgccgggcagcctcttctgtgcccaacctcaagaagacgaatgcccaggcggcacccaagccccgcaaagcgcccagcacgtcccactctggcttcccgccggtggcaaatggaccccgcagcccgcccagcctccgatgtggagaagccagcccccccagtgcagcctgcggctctccggcctcccagctggtggccacgcccagcctggagctggggccgatcccagccggggaggagaaggcactggagctgcctttggccgccagctcaatcccaaggccacgcacaccctcccctgagtcccaccggagccccgcagagggcagcgagcggctgtcgctgagcccactgcggggcggggaggccgggccagacgcctcacccacagtgaccacacccacggtgaccacgccctcactacccgcagaggtgggctccccgcactcgaccgaggtggacgagtccctgtcggtgtcctttgagcaggtgctgccgccatccgcccccaccagtgaggctgggctgagcctcccgctgcgtggcccccgggcgcggcgctcggcttccccacacgatgtggacctgtgcctggtgtcaccctgtgaatttgagcatcgcaaggcggtgccaatggcaccggcacctgcgtcccccggcagctcgaatgacagcagtgcccggtcacaggaacgggcaggtgggctgggggccgaggagacgccacccacatcggtcagcgagtccctgcccaccctgtctgactcggatcccgtgcccctggcccccggtgcggcagactcagacgaagacacagagggctttggagtccctcgccacgaccctttgcctgaccccctcaaggtccccccaccactgcctgacccatccagcatctgcatggtggaccccgagatgctgccccccaagacagcacggcaaacggagaacgtcagccgcacccggaagcccctggcccgccccaactcacgcgctgccgcccccaaagccactccagtggctgctgccaaaaccaaggggcttgctggtggggaccgtgccagccgaccactcagtgcccggagtgagcccagtgagaagggaggccgggcacccctgtccagaaagtcctcaacccccaagactgccactcgaggcccgtcggggtcagccagcagccggcccggggtgtcagccaccccacccaagtccccggtctacctggacctggcctacctgcccagcgggagcagcgcccacctggtggatgaggagttcttccagcgcgtgcgcgcgctctgctacgtcatcagtggccaggaccagcgcaaggaggaaggcatgcgggccgtcctggacgcgctactggccagcaagcagcattgggaccgtgacctgcaggtgaccctgatccccactttcgactcggtggccatgcatacgtggtacgcagagacgcacgcccggcaccaggcgctgggcatcacggtgttgggcagcaacagcatggtgtccatgcaggatgacgccttcccggcctgcaaggtggagttctagccccatcgccgacacgccccccactcagcccagcccgcctgtccctagattcagccacatca

SEQ ID NO: 153932 - DNA, 566 bp, Homo sapiens
  Payload ID: 10261
  Gene Symbol: MAP1S
  Gene Name: microtubule-associated protein 1S
  ENST ID: ENST00000593593
  CDS Start-End: 194-439
ggcgcacctgccaggttcacctgcagccacttggctcagtgggactggcgggcgtgatgcgcccgtgggtggagatgggtgttcatcccccatccctcggagcatctggacctggcgtttcattgcatgtaaaatgggacaggaacacgcacctcggttcatgtgcttgaggagtgtttagtgagcacctgctatgcgccaggcctttgggcagtggacacagggatatggccgggatgatagacaggttcagccctgccaacacaggtctggtttggggatggacccaaagcgagtgaggagatggaacaagcttccagctcacatggtgtcaggaaggatgagaaggctgcaagggactgagaggacagtcagtcttagcacccgaagctcaaggtctttgtgtcccgacactctgccaccttctccagcattgtgaaaggccagcggagcctgcaccaccgtggagacaacctggagaccctggtcctcctgaacccatcagacaagtccctgtatgatgagctccggaaccttctgttggaccctgcctctcacaagctact

SEQ ID NO: 153933 - DNA, 1132 bp, Homo sapiens
  Payload ID: 10261
  Gene Symbol: MAP1S
  Gene Name: microtubule-associated protein 1S
  ENST ID: ENST00000594212
  CDS Start-End: 24-272
gagaacgccggggcggcccgaagatggcggcggtggctggatctggggctgccgcggctccgagctcactgctcctcgtggtgggcagcgagttcgggagcccggggctcctcacctacgtcctggaggagctcgaaagagctcaaggtctttgtgtcccgacactctgccaccttctccagcattgtgaaaggccagcggagcctgcaccaccgtggagacaacctggagaccctggtcctcctgaacccatcagacaagtccctgtatgatgagctccggaaccttctgttggaccctgcctctcacaagctactggtgttggctgggccctgcctggaggagacgggggagctgctgctacagacagggggcttctcgcctcaccacttcctccaggtcctgaaggacagagagatccgggacatcctggccaccacgcccccacctgtgcagccgcccatactcaccatcacctgccccaccttcggtgactgggctcagctggcacccgctgtgcctggccttcagggggcgctccggctccagctgcggctgaaccccccggcgcagctgcccaactctgagggcctgtgcgaattcctggagtacgtggctgagtctctggagccaccgtcccccttcgagctgctggagcccccgacctccgggggcttcctcaggctgggccggccctgctgctacatcttccctggaggcctcggggatgccgccttcttcgccgtcaatggcttcactgtgctggtcaacggtggctcaaaccccaagtccagtttctggaagctggtgcggcacctggaccgcgtggatgccgtgctggtgacccaccctggcgccgacagcctccccggcctcaacagcctgctgcggcgcaaactggcggagcgctccgaggtggctgctggtgggggctcctgggacgacaggctgcgcaggctcatctcccccaacctgggggtcgtgttcttcaacgcctgcgaggccgcgtcgcggctggcgcgcggcgaggatgaggcggagctggcgctgagcctcctggcgcagctgggcatcacgcctctgccactcagccgcggccccgtgccagccaaacccaccgtgctcttcgaga

SEQ ID NO: 153934 - DNA, 891 bp, Homo sapiens
  Payload ID: 10261
  Gene Symbol: MAP1S
  Gene Name: microtubule-associated protein 1S
  ENST ID: ENST00000594365
  CDS Start-End: 197-436
ataggcgcacctgccaggttcacctgcagccacttggctcagtgggactggcgggcgtgatgcgcccgtgggtggagatgggtgttcatcccccatccctcggagcatctggacctggcgtttcattgcatgtaaaatgggacaggaacacgcacctcggttcatgtgcttgaggagtgtttagtgagcacctgctatgcgccaggcctttgggcagtggacacagggatatggccgggatgatagacaggttcagccctgccaacacaggtctggtttggggatggacccaaagcgagtgaggagatggaacaagcttccagctcacatggtgtcaggaaggatgagaaggctgcaagggactgagaggacagtcagtcttagcacccgaaggcatccggtcttgggatgtcgatcctggcgtctgcaaccttgatgaacagctcaaggtctttgtgtcccgacactctgccaccttctccagcattgtgaaaggccagcggagcctgcaccaccgtggagacaacctggagaccctggtcctcctgaacccatcagacaagtccctgtatgatgagctccggaaccttctgttggaccctgcctctcacaagctactggtgttggctgggccctgcctggaggagacgggggagctgctgctacagacagggggcttctcgcctcaccacttcctccaggtcctgaaggacagagagatccgggacatcctggccaccacgcccccacctgtgcagccgcccatactcaccatcacctgccccaccttcggtgactgggctcagctggcacccgctgtgcctggccttcagggggcgctccggctccagctgcggctgaaccccccggcgcagctgcccaactctgagg

SEQ ID NO: 153935 - DNA, 580 bp, Homo sapiens
  Payload ID: 10261
  Gene Symbol: MAP1S
  Gene Name: microtubule-associated protein 1S
  ENST ID: ENST00000597735
  CDS Start-End: 24-580
gagaacgccggggcggcccgaagatggcggcggtggctggatctggggctgccgcggctccgagctcactgctcctcgtggtgggcagcgagttcgggagcccggggctcctcacctacgtcctggaggagctcgaaagaggcatccggtcttgggatgtcgatcctggcgtctgcaaccttgatgaacagctcaaggtctttgtgtcccgacactctgccaccttctccagcattgtgaaaggccagcggagcctgcaccaccgtggagacaacctggagaccctggtcctcctgaacccatcagacaagtccctgtatgatgagctccggaaccttctgttggaccctgcctctcacaagctactggtgttggccgggcacccctgtccagaaagtcctcaacccccaagactgccactcgaggcccgtcggggtcagccagcagccggcccggggtgtcagccaccccacccaagtccccggtctacctggacctggcctacctgcccagcgggagcagcgcccacctggtggatgaggagttcttccagcgcgtgcgcgcgctctgctacgtcatc

SEQ ID NO: 153936 - DNA, 585 bp, Homo sapiens
  Payload ID: 10261
  Gene Symbol: MAP1S
  Gene Name: microtubule-associated protein 1S
  ENST ID: ENST00000594625
  CDS Start-End: 17-585
aatcaaagcttgttcaatgaaaaaaaaaatgaatgaatggtcacttgggagaggcggctcccaagcggacacccaggagtcggccaacccctttaacgcccgcatcccctgctctccacgacctcaaagggcctgcatccggtcttgggatgtcgatcctggcgtctgcaaccttgatgaacagctcaaggtctttgtgtcccgacactctgccaccttctccagcattgtgaaaggccagcggagcctgcaccaccgtggagacaacctggagaccctggtcctcctgaacccatcagacaagtccctgtatgatgagctccggaaccttctgttggaccctgcctctcacaagctactggtgttggctgggccctgcctggaggagacgggggagctgctgctacagacagggggcttctcgcctcaccacttcctccaggtcctgaaggacagagagatccgggacatcctggccaccacgcccccacctgtgcagccgcccatactcaccatcacctgccccaccttcggtgactgggctcagctggcacccgctgtgcctggccttcagggggcgctccg

SEQ ID NO: 153937 - DNA, 573 bp, Homo sapiens
  Payload ID: 10261
  Gene Symbol: MAP1S
  Gene Name: microtubule-associated protein 1S
  ENST ID: ENST00000596637
  CDS Start-End: 167-370
cacttggctcagtgggactggcgggcgtgatgcgcccgtgggtggagatgggtgttcatcccccatccctcggagcatctggacctggcgtttcattgcatgtaaaatgggacaggaacacgcacctcggttcatgtgcttgaggagtgtttagtgagcacctgctatgcgccaggcctttgggcagtggacacagggatatggccgggatgatagacaggttcagccctgccaacacaggtctggtttggggatggacccaaagcgagtgaggagatggaacaagcttccagctcacatggtgtcaggaaggatgagaaggctgcaagggactgagaggacagtcagtcttagcacccgaaggtgctgagggggaagggccccctggccagtaggaacaggcatccggtcttgggatgtcgatcctggcgtctgcaaccttgatgaacagctcaaggtctttgtgtcccgacactctgccaccttctccagcattgtgaaaggccagcggagcctgcaccaccgtggagacaacctggagaccctggtcctcctgaacccatcagacaagtc

SEQ ID NO: 153938 - DNA, 539 bp, Homo sapiens
  Payload ID: 10261
  Gene Symbol: MAP1S
  Gene Name: microtubule-associated protein 1S
  ENST ID: ENST00000600608
  CDS Start-End: 24-305
gagaacgccggggcggcccgaagatggcggcggtggctggatctggggctgccgcggctccgagctcactgctcctcgtggtgggcagcgagttcgggagcccggggctcctcacctacgtcctggaggagctcgaaagaggcatccggtcttgggatgtcgatcctggcgtctgcaaccttgatgaacagctcaaggtctttgtgtcccgacactctgccaccttctccagcattgtgaaagatgaggaaattggcattgaagggggaagaggcagggagatctctgaggagggggttttttgatgagaaactgctatgactggtgtgtccagtggaagggaagggccccagtcaagacccagcagtggacagaacatctagaatgaaccgggcgcggtggcttacgcctctgatctcagcactttgggaggccgcagcgggcggatcacttgaggccagcggagcctgcaccaccgtggagacaacctggagaccctggtcctcctgaacccatcagacaagtccctgtatgatgag

SEQ ID NO: 153939 - DNA, 587 bp, Homo sapiens
  Payload ID: 10261
  Gene Symbol: MAP1S
  Gene Name: microtubule-associated protein 1S
  ENST ID: ENST00000600186
  CDS Start-End: 24-587
gagaacgccggggcggcccgaagatggcggcggtggctggatctggggctgccgcggctccgagctcactgctcctcgtggtgggcagcgagttcgggagcccggggctcctcacctacgtcctggaggagctcgaaagaggccagcggagcctgcaccaccgtggagacaacctggagaccctggtcctcctgaacccatcagacaagtccctgtatgatgagctccggaaccttctgttggaccctgcctctcacaagctactggtgttggctgggccctgcctggaggagacgggggagctgctgctacagacagggggcttctcgcctcaccacttcctccaggtcctgaaggacagagagatccgggacatcctggccaccacgcccccacctgtgcagccgcccatactcaccatcacctgccccaccttcggtgactgggctcagctggcacccgctgtgcctggccttcagggggcgctccggctccagctgcggctgaaccccccggcgcagctgcccaactctgagggcctgtgcgaattcctggagtacgtggctgagtctctggagccaccgtcc

SEQ ID NO: 153940 - DNA, 448 bp, Homo sapiens
  Payload ID: 10261
  Gene Symbol: MAP1S
  Gene Name: microtubule-associated protein 1S
  ENST ID: ENST00000597000
  CDS Start-End: 1-363
aggtgggctccccgcactcgaccgaggtggacgagtccctgtcggtgtcctttgagcagcgcccacctggtggatgaggagttcttccagcgcgtgcgcgcgctctgctacgtcatcagtggccaggaccagcgcaaggaggaaggcatgcgggccgtcctggacgcgctactggccagcaagcagcattgggaccgtgacctgcaggtgaccctgatccccactttcgactcggtggccatgcatacgtggtacgcagagacgcacgcccggcaccaggcgctgggcatcacggtgttgggcagcaacagcatggtgtccatgcaggatgacgccttcccggcctgcaaggtggagttctagccccatcgccgacacgccccccactcagcccagcccgcctgtccctagattcagccacatcagaaataaactgtgactacacttg

SEQ ID NO: 153941 - DNA, 2241 bp, Homo sapiens
  Payload ID: 10262
  Gene Symbol: MAP2
  Gene Name: microtubule-associated protein 2
  Uniprot ID: P11137
  ENST ID: ENST00000199940
  CDS Start-End: 441-2120
ggcgctcgggctgcgcgggctctgggcagcagcagcagcagcagcagcatcctctcttcctttacttcccttccgcttctttctcttccttctccttctttttcccccccctccccttcttcccctaacccttctacccctctcctttttctccggagggcgctaagtccgtgagcggtggcagtcgcgaccgcgggtgcatccagtttctgcgcccagattttattgatctaatccaaagtatcttataacttctggctggaattaagattcttcagcttgtctctaaccgaggaagcattgattgggagctactcattcagaaaattaaaagaaagaagccagaaaatattatcaaccctttgagaacacgacacaacgaactttatattttaccacttccttgaatagttgcaggagaaataacaaggcattgaagaatggcagatgaacggaaagatgaagcaaaggcacctcactggacctcagcaccgctaacagaggcatctgcacactcacatccacctgagattaaggatcaaggcggagcaggggaaggacttgtccgaagcgccaatggattcccatacagggaggatgaagagggtgcctttggagagcatgggtcacagggcacctattcaaataccaaagagaatgggatcaacggagagctgacctcagctgacagagaaacagcagaggaggtgtctgcaaggatagttcaagtagtcactgctgaggctgtagcagtcctgaaaggtgaacaagagaaagaagctcaacataaagaccagactgcagctctgcctttagcagctgaagaaacagctaatctgcctccttctccacccccatcacctgcctcagaacagactgtcacagtggaggaagcagcaggtggggaatcagctctggctcccagtgtatttaaacaggcaaaggacaaagtctctaattctaccttgtcaaagattcctgctttacagggtagcacaaagtccccaagatacagctcagcctgccctagcacgactaaaagggctacattttctgacagtttattaatacagcccacctcagcaggctccacagaccgtttgccatactcaaaatcagggaacaaggacggagtaaccaagagcccagaaaagcgctcttctctcccaagaccttcctccattctccctcctcggcgaggtgtgtcaggagacagagatgagaattccttctctctcaacagttctatctcttcttcagcacggcggaccaccaggtcagagccaattcgcagagcagggaagagtggtacctcaacacccactacccctgggtctactgccatcactcctggcaccccaccaagttattcttcacgcacaccaggcactcctggaacccctagctatcccaggacccctcacacaccaggaacccccaagtctgccatcttggtgccgagtgagaagaaggtcgccatcatacgtactcctccaaaatctcctgcgactcccaagcagcttcggcttattaaccaaccactgccagacctgaagaatgtcaaatccaaaatcggatcaacagacaacatcaaataccagcctaaaggggggcaggttaggattttaaacaagaagatcgattttagcaaagttcagtccagatgtggttccaaggataacatcaaacattcggctgggggcggaaatgtacaaattgttaccaagaaaatagacctaagccatgtgacatccaaatgtggctctctgaagaacatccgccacaggccaggtggcggacgtgtgaaaattgagagtgtaaaactagatttcaaagaaaaggcccaagctaaagttggttctcttgataatgctcatcatgtacctggaggtggtaatgtcaagattgacagccaaaagttgaacttcagagagcatgctaaagcccgtgtggaccatggggctgagatcattacacagtccccaggcagatccagcgtggcatcaccccgacgactcagcaatgtctcctcgtctggaagcatcaacctgctcgaatctcctcagcttgccactttggctgaggatgtcactgctgcactcgctaagcagggcttgtgaatatttctcatttagcattgaaataataatatttaggcatgagctcttggcaggagtgggctctgagcagttgttatattcattctttataaaccataaaataaataatctcatccccaaa

SEQ ID NO: 153942 - DNA, 9711 bp, Homo sapiens
  Payload ID: 10262
  Gene Symbol: MAP2
  Gene Name: microtubule-associated protein 2
  Uniprot ID: P11137
  ENST ID: ENST00000360351
  CDS Start-End: 507-5990
atggcaaaccgctaaatcgtaagtgagggctgcatcctattgtcagtgaatgatggcggagctgagtggcttgtcatcattctcgaaaattctgagactagtgagctctctccctctctcccactcgccttattttcctgttcgccactgcggggacttctaatttgcagcttccctttccccggcacacacagacacgagctggtggcttgcagactgcgtctgtctggagctagagagccagagagccagcctgtggggataatgctcccggagaaggattctgcagcagttctcaaaggctagacttgagtggtattgctgcatatgcgctgattcttcagcttgtctctaaccgaggaagcattgattgggagctactcattcagaaaattaaaagaaagaagccagaaaatattatcaaccctttgagaacacgacacaacgaactttatattttaccacttccttgaatagttgcaggagaaataacaaggcattgaagaatggcagatgaacggaaagatgaagcaaaggcacctcactggacctcagcaccgctaacagaggcatctgcacactcacatccacctgagattaaggatcaaggcggagcaggggaaggacttgtccgaagcgccaatggattcccatacagggaggatgaagagggtgcctttggagagcatgggtcacagggcacctattcaaataccaaagagaatgggatcaacggagagctgacctcagctgacagagaaacagcagaggaggtgtctgcaaggatagttcaagtagtcactgctgaggctgtagcagtcctgaaaggtgaacaagagaaagaagctcaacataaagaccagactgcagctctgcctttagcagctgaagaaacagctaatctgcctccttctccacccccatcacctgcctcagaacagactgtcacagtggaggaagatttacttacagcctcgaagatggagttccacgatcaacaggaattgactccctctacagctgagccttcagaccagaaggaaaaggagtcagagaagcaaagtaagcctggtgaagaccttaaacatgctgccttagtttctcagccagagacaactaaaacttaccctgataaaaaggacatgcaaggcacggaagaagaaaaagcacccctagctttgtttgggcacactcttgttgccagcctggaagacatgaaacagaagacagaaccaagccttgtagtacctggcattgacctccctaaagagcctccaactccaaaagaacaaaaggactggttcatcgaaatgccaacggaagcaaaaaaggatgagtggggtttagttgcccccatatctcctggccctctgactcccatgagggaaaaagatgtatttgatgatatcccaaaatgggaagggaaacagtttgattctcccatgccaagtccctttcaagggggaagcttcactcttcctttagatgtcatgaagaatgaaatagttacagaaacatcgccctttgcccctgcctttttacagccagatgacaaaaaatctctgcaacaaaccagtggcccagctactgccaaagatagttttaaaattgaagagccccatgaggctaaacctgacaaaatggcagaagcaccaccctcagaggcaatgaccttacccaaagatgctcacattccagttgtagaagaacatgttatggggaaagttttagaggaagaaaaggaggccataaatcaagagactgtgcagcaaagggatactttcacccccagtggacaggaacctatacttactgaaaaggaaactgagctgaagcttgaagaaaaaaccaccatttctgacaaagaagctgtgccaaaagagagtaaacccccaaaacctgcagatgaagaaataggcataattcagacctccacagagcacactttctcagaacagaaagaccaagagcctaccacagatatgttgaaacaggactcgttccctgtaagtttggagcaagcagttacagattcagccatgacctctaaaacactggagaaagccatgaccgaaccatctgcattaattgaaaagagctcaattcaggaactttttgaaatgagagttgatgacaaagataagattgaaggagttggagctgcaacatcagctgagcttgatatgccattttatgaagataaatcaggaatgtccaagtactttgaaacatctgccttgaaagaagaagcaacaaaaagcattgagccaggcagtgattactatgaactgagtgacactagagaaagtgtccatgagtctattgataccatgtctcccatgcataaaaatggtgacaaggagtttcaaacaggaaaagaatcccagcccagtcctccagcacaagaagcagggtacagcactctcgcacagagttatccatcagatttacctgaagaacccagttctcctcaagaaagaatgttcactattgatccaaaagtgtatggagagaaaagggacctccacagtaagaataaggatgatttgacccttagcaggagtttaggacttggtggtaggtctgcaatagaacaaagaagcatgtcaatcaatttgccgatgtcttgcctagattccatagcccttggatttaactttggtcggggacatgatctttctcctctggcttccgatattctaaccaacactagtggaagtatggatgaaggggatgattaccttccagccaccacacctgcactggagaaagccccttgcttccctgtagaaagcaaagaggaagaacagatagagaaagtaaaagctactggagaagaaagtactcaagcggagatatcatgtgagtctcctttcctagccaaagatttttacaaaaatggtactgtcatggcacctgaccttcctgaaatgctagatctggcaggcacaaggtcaagattggcttctgtgagtgcagatgctgaggttgccaggaggaaatcagtcccatcagagactgtggttgaggatagtcgtactggcttgcccccggtaactgatgaaaaccatgtcattgtaaaaacggacagtcagctcgaagacctgggctactgtgtgttcaataagtacacagtcccattgccatcacctgttcaagacagtgagaatttatcaggggagagtggtaccttttacgaaggcactgatgataaagttcgaagagatttggccacagacctttcactgattgaagtgaaactggcagcagccggaagagtcaaagatgagttcagtgttgacaaagaagcatccgcgcatatctctggtgacaaatcaggactgagtaaggagtttgaccaagagaagaaagctaatgataggttggatactgtactagaaaagagtgaagaacatgctgattcaaaagaacatgccaagaaaactgaagaggctggtgatgaaatagaaacattcggattaggagtaacctatgagcaagctttggccaaagatttgtcaataccaacagatgcatcctctgagaaagcagagaagggtcttagttcagtgccagagatagctgaggtagaaccatccaaaaaggtggaacaaggtctggattttgctgtccagggtcaactagatgttaaaattagtgactttggacagatggcttcagggctaaacatagatgatagaagggcaacagagctaaaacttgaggctacacaggacatgaccccctcatccaaagcaccgcaggaggcagatgcatttatgggtgttgagtctggccacatgaaagaaggcactaaagttagtgagacagaagtcaaagagaaggtggccaagcctgacttggtgcaccaggaggctgtagacaaggaggagtcctatgaatctagtggtgagcatgaaagtctcaccatggagtccttgaaagctgatgagggcaagaaggaaacatctccagaatcatctctaattcaagatgagattgccgtcaaattgtcagtggaaataccttgcccacctgctgtttcagaggctgatttagccacagatgagagagctgatgtccagatggaatttattcaggggccaaaagaagaaagcaaagagaccccagatatatccatcacgccttctgatgttgcagagccattgcatgaaacgatcgtatctgaaccagcagagattcagagtgaggaagaagagatagaagcccagggagaatatgataaactgctcttccgctcagacacccttcagataactgacctgggtgtctcaggtgccagggaggaatttgtggagacctgcccaagtgaacacaaaggagtgattgagtctgttgtgaccatcgaggatgatttcatcactgtagtgcaaaccacaactgatgaaggggagtcagggtcccacagcgtgcgttttgcagccctagagcagcctgaggtggaaaggagaccatctcctcatgatgaagaagagtttgaagtagaagaggcagctgaagcccaggcagaacccaaagatggttccccagaggctccagcttcccctgagagagaagaggttgcactttctgaatataagacagaaacctatgacgattacaaagatgagaccaccattgacgactccatcatggacgctgacagcctctgggtggacactcaagatgatgataggagcatcatgacagaacagttagaaactattcctaaagaggagaaagctgaaaaggaagctcggagatcatctcttgagaaacatagaaaagaaaagccttttaaaaccgggagaggcagaatttccactcctgaaagaaaagtagctaaaaaggaacctagcacagtctccagagatgaagtgagaaggaaaaaagcagtttataagaaggctgaacttgctaaaaaaacagaagttcaggcccactctccctccaggaaattcattttaaaacctgctatcaaatatactagaccaactcatctctcctgtgttaagcggaaaaccacagcagcaggtggggaatcagctctggctcccagtgtatttaaacaggcaaaggacaaagtctctgacggagtaaccaagagcccagaaaagcgctcttctctcccaagaccttcctccattctccctcctcggcgaggtgtgtcaggagacagagatgagaattccttctctctcaacagttctatctcttcttcagcacggcggaccaccaggtcagagccaattcgcagagcagggaagagtggtacctcaacacccactacccctgggtctactgccatcactcctggcaccccaccaagttattcttcacgcacaccaggcactcctggaacccctagctatcccaggacccctcacacaccaggaacccccaagtctgccatcttggtgccgagtgagaagaaggtcgccatcatacgtactcctccaaaatctcctgcgactcccaagcagcttcggcttattaaccaaccactgccagacctgaagaatgtcaaatccaaaatcggatcaacagacaacatcaaataccagcctaaaggggggcaggtacaaattgttaccaagaaaatagacctaagccatgtgacatccaaatgtggctctctgaagaacatccgccacaggccaggtggcggacgtgtgaaaattgagagtgtaaaactagatttcaaagaaaaggcccaagctaaagttggttctcttgataatgctcatcatgtacctggaggtggtaatgtcaagattgacagccaaaagttgaacttcagagagcatgctaaagcccgtgtggaccatggggctgagatcattacacagtccccaggcagatccagcgtggcatcaccccgacgactcagcaatgtctcctcgtctggaagcatcaacctgctcgaatctcctcagcttgccactttggctgaggatgtcactgctgcactcgctaagcagggcttgtgaatatttctcatttagcattgaaataataatatttaggcatgagctcttggcaggagtgggctctgagcagttgttatattcattctttataaaccataaaataaataatctcatccccaaactgtagtaattgttacaattttctatttaaaaaatgaatagtacatgcagaaattgacctgatttccatttgcaacaggaagacactggctttacatgggttcaattggacaattatttttgctctgctctgttttgcatggagtattattattttaaaaattgcatttttacctttcatgtgcctgaaggctatccactacattctgaaggccttgttaaaatccaagctgctcatttcactattctgtttctgagtgagaagataaaaactgcccattgtaacttatttcaggttaaattaaaccaaggagtctgattgcaggaagggaagagcatgtaagaaataagtttttttaaagtgttattttgtataaatgggaagaaagattcaattaagttattaacatttgggacctggataattatatcagagtatgtcagtccaataaattatttaactaattaaaaaatagttgcaaagcatttgagctgtggttgaggaagtggtgtaaaagtgcatccattaggaatgatgcactttcattaggatggactcgtgtctgattagaatgtcagttgatcagctagatttgtgtccacactaccagtttcacaccccctttccatctgtttgatacagtattatagatataaatatatatatatttctctgtggccatttgtgatacttcctcatatacttgaatattatacttctttattcacagtatctgtgtctcctgcaccctttggtgttgcaattttagatatgtgaaagtagatgttagcagggttctctccctatttaaaaaaaatacattaaaaaagacaaaaaattttagcatgaagttgctttctgtaacaactcaaagccgtaaccctgttttagtgccagatacaagtctctcccgtgatgctagacaaaaaattatttttctttgctttcaccaacatggagtttgtgggggtgggtccagttatacatgaaagggtttacagattgttggtttaagattatggatttatctcatttttaatcacaggatagtttggggtttattcctattattattcatgaaaccgacttaagattttttctttatttttctttttttttccatttgctaaagttgaaagttgaaactaactataatagtttgaaacatgttttctcatttttccaaatagtatctgtttattaaattctctaatagaagatgtttgtctttcttacccaaagtaaagatcccctgatcagaaagaaaaaatacaatactttgggaagctatagctataaaacacttgagacacagatatctaaatcagtttttttccaagactccaacattgcactctgtaaagtaacacactgtgatctagtattatttatcagtagataatactgttctgactgtatatacagtctagaactcacaaatcaattagttcctctcacaaatcattcatcttagacttacaaataaggaatgaaatagtcaatggcctgattaaggcaaagagctaccaggctagatggacactttttaaaaattttatctgttctttttcttgctcagggctggtaggttggatctgaaccattaaaatcaaatggtccactaggcgtatgatctctttgagccaaatcagttcctgaatataaaggaggaaatgatgaggatgtactgaggcaacggggaagtatagaaacatccaagacaaaagccaagggatgcaaaggcagagacacaggtgctttttggtgacccagtggatatggcaaccagtgtaactgccatacaagaaaccctaggagcaaacccacaccactcattctcagctaagagattttacacaggcaaacgtgtcttaaaccatctataaatcagttattttatatgacagtcaaaaccttagaaaccttaggatcattatatctattttctgcctattaattgctgtgaggtttgatttgaccaatctgggcaatttattcatcagcttcccttgaagtgcaccagaaaatagaagaaaggtgtgtggagacttagggtattttattacatgttttcatagtcttaaatagtgattaaatttctctagaaagaagttaacagctcattagaaaagttttaacctgtgaaataagtatttttctcaacattctttaaagtttttatataagttaacactaggtaaacattctgcatactagaagtcagtttattacaaatacatgtcaaaaataaagattatacaaggcaccaaactactagatttggcattaaaacaaatgtttatttctaatcacaacaaaattataatgaataaatgttcttgctttgtatggaaatacaattctttattaaagttaacagaaaggaactgatcgtttgtaccagtaaaagagagaaacacacaggttaaatatcttcttgtggggttaaggggtagaacctatcttgccttcactctcaagataacgactcaaattaagctttttgagcaccactcttgtggggacacacatacgctgatctaggaatgaaatcttcgtggtctcaattctagatctactatgccagtttctctctggctttagcctttgagaacctgtataagaatacgtaagtaatccagagctgtgaagagtttaaaggccaacttctccagtgaactcaacctctgggtcacttgcaaccagaaattggatacctcataatgatgcaggaaagacccgagttcatgatgagtttcaaaggccacgttcatttaggaaccaactctctctggatttacctgctgagttccagcagcgtgatgggctgacatcccacctacaagtatgacacctgtgtaacaccagctaggtacggctggagaaggctgaagagagaatgccattaaatggaagaatgtactgattgtagtgaccttctccacacacacacacacacacacacacacacacacctacagtaatacagcaagcgtggaataatcagccaatatataacattccatcagtattttattaaggaaataacctgaatgtggttgattttgacatagctgcaattacagttttcttctatttttcaagccacaataaggaaaataaactactcatggtctaaatactagagataaagtagattcatggcttggtaaggaaattttaagcattccttcaaagattgacgtgctaaaataagcattgatgttttgagtttttttacacctaggatttttagcttgggtgtgtaggtgaaggccaagactctctgcaggaaaaagcttattttcaaactcagaaaataaaatgtcaatcataaaaatctacttcaactttagcaaaaagaaaaaaaaatcaacaaaaagtatactctgtatgctgggattccgaggttccaacacactgttacaaatctgtggggggtttctttcttctgataattctagagcctgttaccatagaaaggcatttcttcaatggctggttgtagttagttcatgtttttcaatcaaatttgcaaatgtatttgttgctgtatagtgattgttttgcaaaataaaattgcttgtcacctaactgcta

SEQ ID NO: 153943 - DNA, 2038 bp, Homo sapiens
  Payload ID: 10262
  Gene Symbol: MAP2
  Gene Name: microtubule-associated protein 2
  Uniprot ID: P11137
  ENST ID: ENST00000361559
  CDS Start-End: 497-1912
gctaaatcgtaagtgagggctgcatcctattgtcagtgaatgatggcggagctgagtggcttgtcatcattctcgaaaattctgagactagtgagctctctccctctctcccactcgccttattttcctgttcgccactgcggggacttctaatttgcagcttccctttccccggcacacacagacacgagctggtggcttgcagactgcgtctgtctggagctagagagccagagagccagcctgtggggataatgctcccggagaaggattctgcagcagttctcaaaggctagacttgagtggtattgctgcatatgcgctgattcttcagcttgtctctaaccgaggaagcattgattgggagctactcattcagaaaattaaaagaaagaagccagaaaatattatcaaccctttgagaacacgacacaacgaactttatattttaccacttccttgaatagttgcaggagaaataacaaggcattgaagaatggcagatgaacggaaagatgaagcaaaggcacctcactggacctcagcaccgctaacagaggcatctgcacactcacatccacctgagattaaggatcaaggcggagcaggggaaggacttgtccgaagcgccaatggattcccatacagggaggatgaagagggtgcctttggagagcatgggtcacagggcacctattcaaataccaaagagaatgggatcaacggagagctgacctcagctgacagagaaacagcagaggaggtgtctgcaaggatagttcaagtagtcactgctgaggctgtagcagtcctgaaaggtgaacaagagaaagaagctcaacataaagaccagactgcagctctgcctttagcagctgaagaaacagctaatctgcctccttctccacccccatcacctgcctcagaacagactgtcacagtggaggaagcagcaggtggggaatcagctctggctcccagtgtatttaaacaggcaaaggacaaagtctctgacggagtaaccaagagcccagaaaagcgctcttctctcccaagaccttcctccattctccctcctcggcgaggtgtgtcaggagacagagatgagaattccttctctctcaacagttctatctcttcttcagcacggcggaccaccaggtcagagccaattcgcagagcagggaagagtggtacctcaacacccactacccctgggtctactgccatcactcctggcaccccaccaagttattcttcacgcacaccaggcactcctggaacccctagctatcccaggacccctcacacaccaggaacccccaagtctgccatcttggtgccgagtgagaagaaggtcgccatcatacgtactcctccaaaatctcctgcgactcccaagcagcttcggcttattaaccaaccactgccagacctgaagaatgtcaaatccaaaatcggatcaacagacaacatcaaataccagcctaaaggggggcaggtacaaattgttaccaagaaaatagacctaagccatgtgacatccaaatgtggctctctgaagaacatccgccacaggccaggtggcggacgtgtgaaaattgagagtgtaaaactagatttcaaagaaaaggcccaagctaaagttggttctcttgataatgctcatcatgtacctggaggtggtaatgtcaagattgacagccaaaagttgaacttcagagagcatgctaaagcccgtgtggaccatggggctgagatcattacacagtccccaggcagatccagcgtggcatcaccccgacgactcagcaatgtctcctcgtctggaagcatcaacctgctcgaatctcctcagcttgccactttggctgaggatgtcactgctgcactcgctaagcagggcttgtgaatatttctcatttagcattgaaataataatatttaggcatgagctcttggcaggagtgggctctgagcagttgttatattcattctttataaaccataaaataaataatctcatccccaaactgta

SEQ ID NO: 153944 - DNA, 614 bp, Homo sapiens
  Payload ID: 10262
  Gene Symbol: MAP2
  Gene Name: microtubule-associated protein 2
  ENST ID: ENST00000392193
  CDS Start-End: 296-614
ggagaccagatgatgacattcataggctgatagactcgactcctggggacacacttggatggaggcaattaaaatgcctgtcaggcatttggtaccagaagcccctatggcaaaccgctaaatcattcttcagcttgtctctaaccgaggaagcattgattgggagctactcattcagaaaattaaaagaaagaagccagaaaatattatcaaccctttgagaacacgacacaacgaactttatattttaccacttccttgaatagttgcaggagaaataacaaggcattgaagaatggcagatgaacggaaagatgaagcaaaggcacctcactggacctcagcaccgctaacagaggcatctgcacactcacatccacctgagattaaggatcaaggcggagcaggggaaggacttgtccgaagcgccaatggattcccatacagggaggatgaagagggtgcctttggagagcatgggtcacagggcacctattcaaataccaaagagaatgggatcaacggagagctgacctcagctgacagagaaacagcagaggaggtgtctgcaaggatagttcaagtagtcactgctgaggctgtagcagtcctga

SEQ ID NO: 153945 - DNA, 5303 bp, Homo sapiens
  Payload ID: 10262
  Gene Symbol: MAP2
  Gene Name: microtubule-associated protein 2
  Uniprot ID: P11137
  ENST ID: ENST00000392194
  CDS Start-End: 167-1582
tcagcttgtctctaaccgaggaagcattgattgggagctactcattcagaaaattaaaagaaagaagccagaaaatattatcaaccctttgagaacacgacacaacgaactttatattttaccacttccttgaatagttgcaggagaaataacaaggcattgaagaatggcagatgaacggaaagatgaagcaaaggcacctcactggacctcagcaccgctaacagaggcatctgcacactcacatccacctgagattaaggatcaaggcggagcaggggaaggacttgtccgaagcgccaatggattcccatacagggaggatgaagagggtgcctttggagagcatgggtcacagggcacctattcaaataccaaagagaatgggatcaacggagagctgacctcagctgacagagaaacagcagaggaggtgtctgcaaggatagttcaagtagtcactgctgaggctgtagcagtcctgaaaggtgaacaagagaaagaagctcaacataaagaccagactgcagctctgcctttagcagctgaagaaacagctaatctgcctccttctccacccccatcacctgcctcagaacagactgtcacagtggaggaagcagcaggtggggaatcagctctggctcccagtgtatttaaacaggcaaaggacaaagtctctgacggagtaaccaagagcccagaaaagcgctcttctctcccaagaccttcctccattctccctcctcggcgaggtgtgtcaggagacagagatgagaattccttctctctcaacagttctatctcttcttcagcacggcggaccaccaggtcagagccaattcgcagagcagggaagagtggtacctcaacacccactacccctgggtctactgccatcactcctggcaccccaccaagttattcttcacgcacaccaggcactcctggaacccctagctatcccaggacccctcacacaccaggaacccccaagtctgccatcttggtgccgagtgagaagaaggtcgccatcatacgtactcctccaaaatctcctgcgactcccaagcagcttcggcttattaaccaaccactgccagacctgaagaatgtcaaatccaaaatcggatcaacagacaacatcaaataccagcctaaaggggggcaggtacaaattgttaccaagaaaatagacctaagccatgtgacatccaaatgtggctctctgaagaacatccgccacaggccaggtggcggacgtgtgaaaattgagagtgtaaaactagatttcaaagaaaaggcccaagctaaagttggttctcttgataatgctcatcatgtacctggaggtggtaatgtcaagattgacagccaaaagttgaacttcagagagcatgctaaagcccgtgtggaccatggggctgagatcattacacagtccccaggcagatccagcgtggcatcaccccgacgactcagcaatgtctcctcgtctggaagcatcaacctgctcgaatctcctcagcttgccactttggctgaggatgtcactgctgcactcgctaagcagggcttgtgaatatttctcatttagcattgaaataataatatttaggcatgagctcttggcaggagtgggctctgagcagttgttatattcattctttataaaccataaaataaataatctcatccccaaactgtagtaattgttacaattttctatttaaaaaatgaatagtacatgcagaaattgacctgatttccatttgcaacaggaagacactggctttacatgggttcaattggacaattatttttgctctgctctgttttgcatggagtattattattttaaaaattgcatttttacctttcatgtgcctgaaggctatccactacattctgaaggccttgttaaaatccaagctgctcatttcactattctgtttctgagtgagaagataaaaactgcccattgtaacttatttcaggttaaattaaaccaaggagtctgattgcaggaagggaagagcatgtaagaaataagtttttttaaagtgttattttgtataaatgggaagaaagattcaattaagttattaacatttgggacctggataattatatcagagtatgtcagtccaataaattatttaactaattaaaaaatagttgcaaagcatttgagctgtggttgaggaagtggtgtaaaagtgcatccattaggaatgatgcactttcattaggatggactcgtgtctgattagaatgtcagttgatcagctagatttgtgtccacactaccagtttcacaccccctttccatctgtttgatacagtattatagatataaatatatatatatttctctgtggccatttgtgatacttcctcatatacttgaatattatacttctttattcacagtatctgtgtctcctgcaccctttggtgttgcaattttagatatgtgaaagtagatgttagcagggttctctccctatttaaaaaaaatacattaaaaaagacaaaaaattttagcatgaagttgctttctgtaacaactcaaagccgtaaccctgttttagtgccagatacaagtctctcccgtgatgctagacaaaaaattatttttctttgctttcaccaacatggagtttgtgggggtgggtccagttatacatgaaagggtttacagattgttggtttaagattatggatttatctcatttttaatcacaggatagtttggggtttattcctattattattcatgaaaccgacttaagattttttctttatttttctttttttttccatttgctaaagttgaaagttgaaactaactataatagtttgaaacatgttttctcatttttccaaatagtatctgtttattaaattctctaatagaagatgtttgtctttcttacccaaagtaaagatcccctgatcagaaagaaaaaatacaatactttgggaagctatagctataaaacacttgagacacagatatctaaatcagtttttttccaagactccaacattgcactctgtaaagtaacacactgtgatctagtattatttatcagtagataatactgttctgactgtatatacagtctagaactcacaaatcaattagttcctctcacaaatcattcatcttagacttacaaataaggaatgaaatagtcaatggcctgattaaggcaaagagctaccaggctagatggacactttttaaaaattttatctgttctttttcttgctcagggctggtaggttggatctgaaccattaaaatcaaatggtccactaggcgtatgatctctttgagccaaatcagttcctgaatataaaggaggaaatgatgaggatgtactgaggcaacggggaagtatagaaacatccaagacaaaagccaagggatgcaaaggcagagacacaggtgctttttggtgacccagtggatatggcaaccagtgtaactgccatacaagaaaccctaggagcaaacccacaccactcattctcagctaagagattttacacaggcaaacgtgtcttaaaccatctataaatcagttattttatatgacagtcaaaaccttagaaaccttaggatcattatatctattttctgcctattaattgctgtgaggtttgatttgaccaatctgggcaatttattcatcagcttcccttgaagtgcaccagaaaatagaagaaaggtgtgtggagacttagggtattttattacatgttttcatagtcttaaatagtgattaaatttctctagaaagaagttaacagctcattagaaaagttttaacctgtgaaataagtatttttctcaacattctttaaagtttttatataagttaacactaggtaaacattctgcatactagaagtcagtttattacaaatacatgtcaaaaataaagattatacaaggcaccaaactactagatttggcattaaaacaaatgtttatttctaatcacaacaaaattataatgaataaatgttcttgctttgtatggaaatacaattctttattaaagttaacagaaaggaactgatcgtttgtaccagtaaaagagagaaacacacaggttaaatatcttcttgtggggttaaggggtagaacctatcttgccttcactctcaagataacgactcaaattaagctttttgagcaccactcttgtggggacacacatacgctgatctaggaatgaaatcttcgtggtctcaattctagatctactatgccagtttctctctggctttagcctttgagaacctgtataagaatacgtaagtaatccagagctgtgaagagtttaaaggccaacttctccagtgaactcaacctctgggtcacttgcaaccagaaattggatacctcataatgatgcaggaaagacccgagttcatgatgagtttcaaaggccacgttcatttaggaaccaactctctctggatttacctgctgagttccagcagcgtgatgggctgacatcccacctacaagtatgacacctgtgtaacaccagctaggtacggctggagaaggctgaagagagaatgccattaaatggaagaatgtactgattgtagtgaccttctccacacacacacacacacacacacacacacacacctacagtaatacagcaagcgtggaataatcagccaatatataacattccatcagtattttattaaggaaataacctgaatgtggttgattttgacatagctgcaattacagttttcttctatttttcaagccacaataaggaaaataaactactcatggtctaaatactagagataaagtagattcatggcttggtaaggaaattttaagcattccttcaaagattgacgtgctaaaataagcattgatgttttgagtttttttacacctaggatttttagcttgggtgtgtaggtgaaggccaagactctctgcaggaaaaagcttattttcaaactcagaaaataaaatgtcaatcataaaaatctacttcaactttagcaaaaagaaaaaaaaatcaacaaaaagtatactctgtatgctgggattccgaggttccaacacactgttacaaatctgtggggggtttctttcttctgataattctagagcctgttaccatagaaaggcatttcttcaatggctggttgtagttagttcatgtttttcaatcaaatttgcaaatgtatttgttgctgtatagtgattgttttgcaaaataaaattgcttgtcacctaactgcta

SEQ ID NO: 153946 - DNA, 624 bp, Homo sapiens
  Payload ID: 10262
  Gene Symbol: MAP2
  Gene Name: microtubule-associated protein 2
  ENST ID: ENST00000452717
  CDS Start-End: 1-624
atcaacggagagctgacctcagctgacagagaaacagcagaggaggtgtctgcaaggatagttcaagtagtcactgctgaggctgtagcagtcctgaaaggtgaacaagagaaagaagctcaacataaagaccagactgcagctctgcctttagcagctgaagaaacagctaatctgcctccttctccacccccatcacctgcctcagaacagactgtcacagtggaggaagcagcaggtggggaatcagctctggctcccagtgtatttaaacaggcaaaggacaaagtctctggtgtccatgtgcaggcttgttacaagggtatattacgtgatgctgagaattctaccttgtcaaagattcctgctttacagggtagcacaaagtccccaagatacagctcagcctgccctagcacgactaaaagggctacattttctgacagtttattaatacagcccacctcagcaggctccacagaccgtttgccatactcaaaatcagggaacaaggacggagtaaccaagagcccagaaaagcgctcttctctcccaagaccttcctccattctccctcctcggcgaggtgtgtcaggagacagagatgagaattccttctctctc

SEQ ID NO: 153947 - DNA, 5472 bp, Homo sapiens
  Payload ID: 10262
  Gene Symbol: MAP2
  Gene Name: microtubule-associated protein 2
  Uniprot ID: P11137
  ENST ID: ENST00000447185
  CDS Start-End: 1-5472
atggcagatgaacggaaagatgaagcaaaggcacctcactggacctcagcaccgctaacagaggcatctgcacactcacatccacctgagattaaggatcaaggcggagcaggggaaggacttgtccgaagcgccaatggattcccatacagggaggatgaagagggtgcctttggagagcatgggtcacagggcacctattcaaataccaaagagaatgggatcaacggagagctgacctcagctgacagagaaacagcagaggaggtgtctgcaaggatagttcaagtagtcactgctgaggctgtagcagtcctgaaaggtgaacaagagaaagaagctcaacataaagaccagactgcagctctgcctttagcagctgaagaaacagctaatctgcctccttctccacccccatcacctgcctcagaacagactgtcacagtggaggaagcctcgaagatggagttccacgatcaacaggaattgactccctctacagctgagccttcagaccagaaggaaaaggagtcagagaagcaaagtaagcctggtgaagaccttaaacatgctgccttagtttctcagccagagacaactaaaacttaccctgataaaaaggacatgcaaggcacggaagaagaaaaagcacccctagctttgtttgggcacactcttgttgccagcctggaagacatgaaacagaagacagaaccaagccttgtagtacctggcattgacctccctaaagagcctccaactccaaaagaacaaaaggactggttcatcgaaatgccaacggaagcaaaaaaggatgagtggggtttagttgcccccatatctcctggccctctgactcccatgagggaaaaagatgtatttgatgatatcccaaaatgggaagggaaacagtttgattctcccatgccaagtccctttcaagggggaagcttcactcttcctttagatgtcatgaagaatgaaatagttacagaaacatcgccctttgcccctgcctttttacagccagatgacaaaaaatctctgcaacaaaccagtggcccagctactgccaaagatagttttaaaattgaagagccccatgaggctaaacctgacaaaatggcagaagcaccaccctcagaggcaatgaccttacccaaagatgctcacattccagttgtagaagaacatgttatggggaaagttttagaggaagaaaaggaggccataaatcaagagactgtgcagcaaagggatactttcacccccagtggacaggaacctatacttactgaaaaggaaactgagctgaagcttgaagaaaaaaccaccatttctgacaaagaagctgtgccaaaagagagtaaacccccaaaacctgcagatgaagaaataggcataattcagacctccacagagcacactttctcagaacagaaagaccaagagcctaccacagatatgttgaaacaggactcgttccctgtaagtttggagcaagcagttacagattcagccatgacctctaaaacactggagaaagccatgaccgaaccatctgcattaattgaaaagagctcaattcaggaactttttgaaatgagagttgatgacaaagataagattgaaggagttggagctgcaacatcagctgagcttgatatgccattttatgaagataaatcaggaatgtccaagtactttgaaacatctgccttgaaagaagaagcaacaaaaagcattgagccaggcagtgattactatgaactgagtgacactagagaaagtgtccatgagtctattgataccatgtctcccatgcataaaaatggtgacaaggagtttcaaacaggaaaagaatcccagcccagtcctccagcacaagaagcagggtacagcactctcgcacagagttatccatcagatttacctgaagaacccagttctcctcaagaaagaatgttcactattgatccaaaagtgtatggagagaaaagggacctccacagtaagaataaggatgatttgacccttagcaggagtttaggacttggtggtaggtctgcaatagaacaaagaagcatgtcaatcaatttgccgatgtcttgcctagattccatagcccttggatttaactttggtcggggacatgatctttctcctctggcttccgatattctaaccaacactagtggaagtatggatgaaggggatgattaccttccagccaccacacctgcactggagaaagccccttgcttccctgtagaaagcaaagaggaagaacagatagagaaagtaaaagctactggagaagaaagtactcaagcggagatatcatgtgagtctcctttcctagccaaagatttttacaaaaatggtactgtcatggcacctgaccttcctgaaatgctagatctggcaggcacaaggtcaagattggcttctgtgagtgcagatgctgaggttgccaggaggaaatcagtcccatcagagactgtggttgaggatagtcgtactggcttgcccccggtaactgatgaaaaccatgtcattgtaaaaacggacagtcagctcgaagacctgggctactgtgtgttcaataagtacacagtcccattgccatcacctgttcaagacagtgagaatttatcaggggagagtggtaccttttacgaaggcactgatgataaagttcgaagagatttggccacagacctttcactgattgaagtgaaactggcagcagccggaagagtcaaagatgagttcagtgttgacaaagaagcatccgcgcatatctctggtgacaaatcaggactgagtaaggagtttgaccaagagaagaaagctaatgataggttggatactgtactagaaaagagtgaagaacatgctgattcaaaagaacatgccaagaaaactgaagaggctggtgatgaaatagaaacattcggattaggagtaacctatgagcaagctttggccaaagatttgtcaataccaacagatgcatcctctgagaaagcagagaagggtcttagttcagtgccagagatagctgaggtagaaccatccaaaaaggtggaacaaggtctggattttgctgtccagggtcaactagatgttaaaattagtgactttggacagatggcttcagggctaaacatagatgatagaagggcaacagagctaaaacttgaggctacacaggacatgaccccctcatccaaagcaccgcaggaggcagatgcatttatgggtgttgagtctggccacatgaaagaaggcactaaagttagtgagacagaagtcaaagagaaggtggccaagcctgacttggtgcaccaggaggctgtagacaaggaggagtcctatgaatctagtggtgagcatgaaagtctcaccatggagtccttgaaagctgatgagggcaagaaggaaacatctccagaatcatctctaattcaagatgagattgccgtcaaattgtcagtggaaataccttgcccacctgctgtttcagaggctgatttagccacagatgagagagctgatgtccagatggaatttattcaggggccaaaagaagaaagcaaagagaccccagatatatccatcacgccttctgatgttgcagagccattgcatgaaacgatcgtatctgaaccagcagagattcagagtgaggaagaagagatagaagcccagggagaatatgataaactgctcttccgctcagacacccttcagataactgacctgggtgtctcaggtgccagggaggaatttgtggagacctgcccaagtgaacacaaaggagtgattgagtctgttgtgaccatcgaggatgatttcatcactgtagtgcaaaccacaactgatgaaggggagtcagggtcccacagcgtgcgttttgcagccctagagcagcctgaggtggaaaggagaccatctcctcatgatgaagaagagtttgaagtagaagaggcagctgaagcccaggcagaacccaaagatggttccccagaggctccagcttcccctgagagagaagaggttgcactttctgaatataagacagaaacctatgacgattacaaagatgagaccaccattgacgactccatcatggacgctgacagcctctgggtggacactcaagatgatgataggagcatcatgacagaacagttagaaactattcctaaagaggagaaagctgaaaaggaagctcggagatcatctcttgagaaacatagaaaagaaaagccttttaaaaccgggagaggcagaatttccactcctgaaagaaaagtagctaaaaaggaacctagcacagtctccagagatgaagtgagaaggaaaaaagcagtttataagaaggctgaacttgctaaaaaaacagaagttcaggcccactctccctccaggaaattcattttaaaacctgctatcaaatatactagaccaactcatctctcctgtgttaagcggaaaaccacagcagcaggtggggaatcagctctggctcccagtgtatttaaacaggcaaaggacaaagtctctgacggagtaaccaagagcccagaaaagcgctcttctctcccaagaccttcctccattctccctcctcggcgaggtgtgtcaggagacagagatgagaattccttctctctcaacagttctatctcttcttcagcacggcggaccaccaggtcagagccaattcgcagagcagggaagagtggtacctcaacacccactacccctgggtctactgccatcactcctggcaccccaccaagttattcttcacgcacaccaggcactcctggaacccctagctatcccaggacccctcacacaccaggaacccccaagtctgccatcttggtgccgagtgagaagaaggtcgccatcatacgtactcctccaaaatctcctgcgactcccaagcagcttcggcttattaaccaaccactgccagacctgaagaatgtcaaatccaaaatcggatcaacagacaacatcaaataccagcctaaaggggggcaggtacaaattgttaccaagaaaatagacctaagccatgtgacatccaaatgtggctctctgaagaacatccgccacaggccaggtggcggacgtgtgaaaattgagagtgtaaaactagatttcaaagaaaaggcccaagctaaagttggttctcttgataatgctcatcatgtacctggaggtggtaatgtcaagattgacagccaaaagttgaacttcagagagcatgctaaagcccgtgtggaccatggggctgagatcattacacagtccccaggcagatccagcgtggcatcaccccgacgactcagcaatgtctcctcgtctggaagcatcaacctgctcgaatctcctcagcttgccactttggctgaggatgtcactgctgcactcgctaagcagggcttgtga

SEQ ID NO: 153948 - DNA, 2019 bp, Homo sapiens
  Payload ID: 10262
  Gene Symbol: MAP2
  Gene Name: microtubule-associated protein 2
  ENST ID: ENST00000445941
  CDS Start-End: 319-2019
acacagacacgagctggtggcttgcagactgcgtctgtctggagctagagagccagagagccagcctgtggggataatgctcccggagaaggattctgcagcagttctcaaaggctagacttgagtggtattgctgcatatgcgctgattcttcagcttgtctctaaccgaggaagcattgattgggagctactcattcagaaaattaaaagaaagaagccagaaaatattatcaaccctttgagaacacgacacaacgaactttatattttaccacttccttgaatagttgcaggagaaataacaaggcattgaagaatggcagatgaacggaaagatgaagcaaaggcacctcactggacctcagcaccgctaacagaggcatctgcacactcacatccacctgagattaaggatcaaggcggagcaggggaaggacttgtccgaagcgccaatggattcccatacagggaggatgaagagggtgcctttggagagcatgggtcacagggcacctattcaaataccaaagagaatgggatcaacggagagctgacctcagctgacagagaaacagcagaggaggtgtctgcaaggatagttcaagtagtcactgctgaggctgtagcagtcctgaaaggtgaacaagagaaagaagctcaacataaagaccagactgcagctctgcctttagcagctgaagaaacagctaatctgcctccttctccacccccatcacctgcctcagaacagactgtcacagtggaggaagaagaagaaacgctagagagtcggatggctgaggaagagaaacctgctgctcttcctgagaaagagtgtggggctgctaagtcctcagaccaacccaagggcctcagtaagggccaaatggagtctagtgcggaggcccaaatagttcccgaagagagtgccccagcaggggccccacatgagaaaagtgtaaaagaggtcaaggaggtgtctccagaagtaaaaaccccttcctctgctggggaagatttacttacagcctcgaagatggagttccacgatcaacaggaattgactccctctacagctgagccttcagaccagaaggaaaaggagtcagagaagcaaagtaagcctggtgaagaccttaaacatgctgccttagtttctcagccagagacaactaaaacttaccctgataaaaaggacatgcaaggcacggaagaagaaaaagcacccctagctttgtttgggcacactcttgttgccagcctggaagacatgaaacagaagacagaaccaagccttgtagtacctggcattgacctccctaaagagcctccaactccaaaagaacaaaaggactggttcatcgaaatgccaacggaagcaaaaaaggatgagtggggtttagttgcccccatatctcctggccctctgactcccatgagggaaaaagatgtatttgatgatatcccaaaatgggaagggaaacagtttgattctcccatgccaagtccctttcaagggggaagcttcactcttcctttagatgtcatgaagaatgaaatagttacagaaacatcgccctttgcccctgcctttttacagccagatgacaaaaaatctctgcaacaaaccagtggcccagctactgccaaagatagttttaaaattgaagagccccatgaggctaaacctgacaaaatggcagaagcaccaccctcagaggcaatgaccttacccaaagatgctcacattccagttgtagaagaacatgttatggggaaagttttagaggaagaaaaggaggccataaatcaagagactgtgcagcaaagggatactttcacccccagtggacaggaacctatacttactgaaaaggaaactgagctgaagcttgaagaaaaaaccaccatttctgacaaagaagctgtgccaaaagagagtaaacccccaaaacctgcagatgaagaaataggcataattcagacctccacagagcacactttctcagaacagaaa

SEQ ID NO: 153949 - DNA, 1564 bp, Homo sapiens
  Payload ID: 10263
  Gene Symbol: MAP4
  Gene Name: microtubule-associated protein 4
  ENST ID: ENST00000335271
  CDS Start-End: 1-1392
atctgtgaggaaccagtggccaagaagagagaagaattggctcacttcagcaacagcagcagcaactctgggaagaaggaactcggcactgctggattatatctccatagtaagctggagcagattcctgaaggaagcagcaaggaaaaagggcaggaagattttagtgaaactagaattgattcatgctcgcaggtttgccagcgaggagagaaacagccaggacagacggctctggcagggaagaaagaaattgaggtcactgcaacccagagcactccatcgttcctgtttgaaaagcccccacgtgatggaatagccaggccagaagaaggaaggcctgtggtgagtgggacaggaaatgacatcaccaccccaccgaacaaggagctcccaccaagcccagagaagaaaacaaagcccattgcagatgcaaaggctcctgagaagcgggcctcaccatccaagccagcttctgccccagcctccagatctgggtccaagagcactcagactgttgcaaaaaccacaacagctgctgctgttgcctcaactggcccaagcagtaggagcccctccacgctcctgcccaagaagcccactgccattaagactgagggaaaacctgcagaagtcaagaagatgactgcaaagtctgtaccagctgacttgagtcgcccaaagagcacctccaccagttccatgaagaaaaccaccactctcagtgggacagcccccgctgcaggggtggttcccagccgagtcaaggccacacccatgccctcccggccctccacaactcctttcatagacaagaagcccacctcggccaaacccagctccaccaccccccggctcagccgcctggccaccaatacttctgctcctgatctgaagaatgtccgctccaaggttggctccacggaaaacatcaagcatcagcctggaggaggccgggtccagatagtctccaaaaaagtgagctacagccatattcagtccaagtgtggttccaaggacaatattaagcatgtccctggaggtggtaatgttcagattcagaacaagaaagtggacatctctaaggtctcctccaagtgtgggtctaaggctaacatcaagcacaagcctggtggaggagatgtcaagattgaaagtcagaagttgaacttcaaggagaaggcccaggccaaggtgggatccctcgataatgtgggccacctacctgcaggaggtgctgtgaagattgagacctacaggctgacgttccgggcaaatgccagggcccgcaccgaccacggggccgacattgtctcccgccccccacacttccctggcggccccaactcgggctcccgggtccttggccccctttcccgggctgtccactagaccagtgagcgcttgggcgccgtgctgggcagcccgctaggctcgccttccctcctgctttgcgtgcccggggcagcagcagccctgccccacacctcctctcactccccagcctgggcccatctccctgctttggtcttgccccatcactgcgccactgctccgtggagga

SEQ ID NO: 153950 - DNA, 5142 bp, Homo sapiens
  Payload ID: 10263
  Gene Symbol: MAP4
  Gene Name: microtubule-associated protein 4
  Uniprot ID: P27816
  ENST ID: ENST00000360240
  CDS Start-End: 520-3978
acccgctggtggcccggtccgcgtgtgcgccgactctcgcactctcctcgctccgggcgcccagactctgagagagagcgacggccatcatagaacagcgaaggcagtcgatcggcctgcggtccgcttcggcattcgcaggccgcaggcgggaggctagagcccccaggcgcacctcgccccaaccgcccgcggctcgggcagctctgcagagacgtcgtggcggcagggccagcacccattggtccgccacagccctccgccctccccctcgccacgcttattggccggagcggcggcgctcgccgggtaggcggtggcggcgtccctcccttgcgccggccctcaagaggcgacgaggaagcggccgcctccctgcgccccgcccctccggctagctcgctggctcccggctcctcccgacgtctcctacctcctcacggctcttcccggcgctctcctggctcccttctgccccagctccgtctcggcggcggcgggcagttgcagtggtgcagaatggctgacctcagtcttgcagatgcattaacagaaccatctccagacattgagggagagataaagcgggacttcattgccacactagaggcagaggcctttgatgatgttgtgggagaaactgttggaaaaacagactatattcctctcctggatgttgatgagaaaaccgggaactcagagtcaaagaagaaaccgtgctcagaaactagccagattgaagatactccatcttctaaaccaacactcctagccaatggtggtcatggagtagaagggagcgatactacagggtctccaactgaattccttgaagagaaaatggcctaccaggaatacccaaatagccagaactggccagaagataccaacttttgtttccaacctgagcaagtggtcgatcctatccagactgatccctttaagatgtaccatgatgatgacctggcagatttggtctttccctccagtgcgacagctgatacttcaatatttgcaggacaaaatgatcccttgaaagacagttacggtatgtctccctgcaacacagctgttgtacctcaggggtggtctgtggaagccttaaactctccacactcagagtcctttgtttccccagaggctgttgcagaacctcctcagccaacggcagttcccttagagctagccaaggagatagaaatggcatcagaagagaggccaccagcacaagcattggaaataatgatgggactgaagactactgacatggcaccatctaaagaaacagagatggccctcgccaaggacatggcactagctacaaaaaccgaggtggcattggctaaagatatggaatcacccaccaaattagatgtgacactggccaaggacatgcagccatccatggaatcagatatggccctagtcaaggacatggaactacccacagaaaaagaagtggccctggttaaggatgtcagatggcccacagaaacagatgtatcttcagccaagaatgtggtactgcccacagaaacagaggtagccccagccaaggatgtgacactgttgaaagaaacagagagggcatctcctataaaaatggacttagccccttccaaggacatgggaccacccaaagaaaacaagaaagaaacagagagggcatctcctataaaaatggacttggctccttccaaggacatgggaccacccaaagaaaacaagatagtcccagccaaggatttggtattactctcagaaatagaggtggcacaggctaatgacattatatcatccacagaaatatcctctgctgagaaggtggctttgtcctcagaaacagaggtagccctggccagggacatgacactgcccccggaaaccaacgtgatcttgaccaaggataaagcactacctttagaagcagaggtggccccagtcaaggacatggctcaactcccagaaacagaaatagccccggccaaggatgtggctccgtccacagtaaaagaagtgggcttgttgaaggacatgtctccactatcagaaacagaaatggctctgggcaaggatgtgactccacctccagaaacagaagtagttctcatcaagaacgtatgtctgcctccagaaatggaggtggccctgactgaggatcaggtcccagccctcaaaacagaagcacccctggctaaggatggggttctgaccctggccaacaatgtgactccagccaaagatgttccaccactctcagaaacagaggcaacaccagttccaattaaagacatggaaattgcacaaacacaaaaaggaataagtgaggattcccatttagaatctctgcaggatgtggggcagtcagctgcacctactttcatgatttcaccagaaaccgtcacaggaacggggaaaaagtgcagcttgccggccgaggaggattctgtgttagaaaaactaggggaaaggaaaccatgcaacagtcaaccttctgagctttcttcagagacctcaggaatagccaggccagaagaaggaaggcctgtggtgagtgggacaggaaatgacatcaccaccccaccgaacaaggagctcccaccaagcccagagaagaaaacaaagcctttggccaccactcaacctgcaaagacttcaacatcgaaagccaaaacacagcccacttctctccctaagcagccagctcccaccaccattggtgggttgaataaaaaacccatgagccttgcttcaggcttagtgccagctgccccacccaaacgccctgccgtcgcctctgccaggccttccatcttaccttcaaaagacgtgaagccaaagcccattgcagatgcaaaggctcctgagaagcgggcctcaccatccaagccagcttctgccccagcctccagatctgggtccaagagcactcagactgttgcaaaaaccacaacagctgctgctgttgcctcaactggcccaagcagtaggagcccctccacgctcctgcccaagaagcccactgccattaagactgagggaaaacctgcagaagtcaagaagatgactgcaaagtctgtaccagctgacttgagtcgcccaaagagcacctccaccagttccatgaagaaaaccaccactctcagtgggacagcccccgctgcaggggtggttcccagccgagtcaaggccacacccatgccctcccggccctccacaactcctttcatagacaagaagcccacctcggccaaacccagctccaccaccccccggctcagccgcctggccaccaatacttctgctcctgatctgaagaatgtccgctccaaggttggctccacggaaaacatcaagcatcagcctggaggaggccgggccaaagtagagaaaaaaacagaggcagctgctacaacccgaaagcctgaatctaatgcagtcactaaaacagccggcccaattgcaagtgcacagaaacaacctgcggggaaagtccagatagtctccaaaaaagtgagctacagccatattcagtccaagtgtggttccaaggacaatattaagcatgtccctggaggtggtaatgttcagattcagaacaagaaagtggacatctctaaggtctcctccaagtgtgggtctaaggctaacatcaagcacaagcctggtggaggagatgtcaagattgaaagtcagaagttgaacttcaaggagaaggcccaggccaaggtgggatccctcgataatgtgggccacctacctgcaggaggtgctgtgaagactgagggcggtggcagcgaggctcctctgtgtccgggtccccctgctggggaggagccggccatctctgaggcagcgcctgaagctggcgcccccacttcagccagtggcctcaatggccaccccaccctgtcagggggtggtgaccaaagggaggcccagaccttggacagccagatccaggagacaagcatctaatgatgacattctggtctcgtcttccgtctcccccgtgttcccctcttgtctcccctgttcccctctcccttccctcctcccatgtcactgcagattgagacctacaggctgacgttccgggcaaatgccagggcccgcaccgaccacggggccgacattgtctcccgccccccacacttccctggcggccccaactcgggctcccgggtccttggccccctttcccgggctgtccactagaccagtgagcgcttgggcgccgtgctgggcagcccgctaggctcgccttccctcctgctttgcgtgcccggggcagcagcagccctgccccacacctcctctcactccccagcctgggcccatctccctgctttggtcttgccccatcactgcgccactgctccgtggaggaggttgggagggggttggggtggttgaggctaagttgggatctaggagaggagaaccagattctatcctcatctttttttggttctttggtccaaacccaaaagaaactgacatgccctcccttctccctggatctacctggagggaagagtggaggtggattccgagtggtgacaggacgctgaccgtggagcttaagccactgcctctccctctggtcccacaaatgggcgcccccccctccccatgcaggtggtgtcgggcccttcttgctgccctgccccaagttgggggtcagtgctgcctgtccccatgcttaacatacccgcctagctgctgtcacatttttcttgttttgtccttttatttttttctaataacctaaaaactggcaaaatagttctgcaggttgaagccatgtctacatgaaagtcctcagtaagtgttagagggaacagggcggagatatccttatgccacccccgctggaggatgtgggcagcttagggccctggaggcggtgcggcagggaagaggggtgcagaggctgtggctggtgagccggtcaggcacacaaggggcccttggagcgtggactggttggttttgccattttgttgtgtgtatgctgcttttcttttctaaccaagaggctggttttggcatctctgtcccattccctgggatctggtggtcagccctaggataaaaagccagggctggagaacaagaaagggccaggagatggaattc

SEQ ID NO: 153951 - DNA, 2282 bp, Homo sapiens
  Payload ID: 10263
  Gene Symbol: MAP4
  Gene Name: microtubule-associated protein 4
  ENST ID: ENST00000383736
  CDS Start-End: 1-2282
aagacagatgcagccaatagatacactgcagtggctgacaaaccaagtaaaaggagtaatgatggaaaaagtaaaaaggttaaaaatagttctcctgagaagcacattctggagaataagatagatgcaacaaaaatacatgttcccatggaaaccacaggggaccagggaattgaaggaatggcctatatggacgaaaatagaaatattacatttacctgtcccagaacaccatcagagctgataaataaatcatctcctctagaggttctggaatcagcagcctgtgaaaaactgcccactcctactcctcaagtagtaaaggaaggtgattcctttccagataccttggcaaaaaatgggcaagagatagccccagcccagatttccaaatcattaatggtagataactacaccaaagatggagtcccaggtcaagaaagacccaagggtccctctgctgttgtgccctctacaagcacaggaggagttgctctacctattacaacagccatagaaacagttaacattcatggagatcactctcttaagaataaagctgagcttgctgattccatgaaaaatgaagcagggatcgatgaagggcatgtgataggagaatctgagtcagtgcacagtggtgcgtctaagcattcagtagagaaagtcacagagctagcaaaaggtcacctccttcctggagtgccagtagaagaccagagcctaccaggagaggccagagccctagaaggatatgcagatagaggtaatttcccagcacatccagtgaatgaagagaaagagactaaagaagggtctgttgcagttcagattcctgacttactggaagacaaagcacaaaagctcagtttttgtgaggaccaaaatgctcaagatagaaattccaaaggttcagatagtttgaataagaaggtagatctgactcttttgtctccaaaaagtgaaaatgataaattgaaagaaattagtctggcttgtaaaatcacggaattggaaagcgtttccttgccaacaccagaaatccagtcagatttcttacatagcaaagtcgaagctcctccttcagaggtggcggatacgttagtaataatgactgcttccaagggtgttcgactcccagaacccaaagataagattttggagacacctcagaaaatgacagaaaaatctgaatcaaagacaccaggagaagggaaaaaggaagataaaagcagaatggcagaaccaatgaaaggctacatgagacccaccaagtcccgaggacttactccacttttgccaaagtctacaatccaggaacaagagagacataagcaactgaagtccgctggaatagccaggccagaagaaggaaggcctgtggtgagtgggacaggaaatgacatcaccaccccaccgaacaaggagctcccaccaagcccagagaagaaaacaaagcctttggccaccactcaacctgcaaagacttcaacatcgaaagccaaaacacagcccacttctctccctaagcagccagctcccaccaccattggtgggttgaataaaaaacccatgagccttgcttcaggcttagtgccagctgccccacccaaacgccctgccgtcgcctctgccaggccttccatcttaccttcaaaagacgtgaagccaaagcccattgcagatgcaaaggctcctgagaagcgggcctcaccatccaagccagcttctgccccagcctccagatctgggtccaagagcactcagactgttgcaaaaaccacaacagctgctgctgttgcctcaactggcccaagcagtaggagcccctccacgctcctgcccaagaagcccactgccattaagactgagggaaaacctgcagaagtcaagaagatgactgcaaagtctgtaccagctgacttgagtcgcccaaagagcacctccaccagttccatgaagaaaaccaccactctcagtgggacagcccccgctgcaggggtggttcccagccgagtcaaggccacacccatgccctcccggccctccacaactcctttcatagacaagaagcccacctcggccaaacccagctccaccaccccccggctcagccgcctggccaccaatacttctgctcctgatctgaagaatgtccgctccaaggccaaagtagagaaaaaaacagaggcagctgctacaacccgaaagcctgaatctaatgcagtcactaaaacagccggcccaattgcaagtgcacagaaacaacctgcggggaaagt

SEQ ID NO: 153952 - DNA, 5590 bp, Homo sapiens
  Payload ID: 10263
  Gene Symbol: MAP4
  Gene Name: microtubule-associated protein 4
  Uniprot ID: P27816
  ENST ID: ENST00000395734
  CDS Start-End: 87-3494
ctcctcacggctcttcccggcgctctcctggctcccttctgccccagctccgtctcggcggcggcgggcagttgcagtggtgcagaatggctgacctcagtcttgcagatgcattaacagaaccatctccagacattgagggagagataaagcgggacttcattgccacactagaggcagaggcctttgatgatgttgtgggagaaactgttggaaaaacagactatattcctctcctggatgttgatgagaaaaccgggaactcagagtcaaagaagaaaccgtgctcagaaactagccagattgaagatactccatcttctaaaccaacactcctagccaatggtggtcatggagtagaagggagcgatactacagggtctccaactgaattccttgaagagaaaatggcctaccaggaatacccaaatagccagaactggccagaagataccaacttttgtttccaacctgagcaagtggtcgatcctatccagactgatccctttaagatgtaccatgatgatgacctggcagatttggtctttccctccagtgcgacagctgatacttcaatatttgcaggacaaaatgatcccttgaaagacagttacggtatgtctccctgcaacacagctgttgtacctcaggggtggtctgtggaagccttaaactctccacactcagagtcctttgtttccccagaggctgttgcagaacctcctcagccaacggcagttcccttagagctagccaaggagatagaaatggcatcagaagagaggccaccagcacaagcattggaaataatgatgggactgaagactactgacatggcaccatctaaagaaacagagatggccctcgccaaggacatggcactagctacaaaaaccgaggtggcattggctaaagatatggaatcacccaccaaattagatgtgacactggccaaggacatgcagccatccatggaatcagatatggccctagtcaaggacatggaactacccacagaaaaagaagtggccctggttaaggatgtcagatggcccacagaaacagatgtatcttcagccaagaatgtggtactgcccacagaaacagaggtagccccagccaaggatgtgacactgttgaaagaaacagagagggcatctcctataaaaatggacttagccccttccaaggacatgggaccacccaaagaaaacaagaaagaaacagagagggcatctcctataaaaatggacttggctccttccaaggacatgggaccacccaaagaaaacaagatagtcccagccaaggatttggtattactctcagaaatagaggtggcacaggctaatgacattatatcatccacagaaatatcctctgctgagaaggtggctttgtcctcagaaacagaggtagccctggccagggacatgacactgcccccggaaaccaacgtgatcttgaccaaggataaagcactacctttagaagcagaggtggccccagtcaaggacatggctcaactcccagaaacagaaatagccccggccaaggatgtggctccgtccacagtaaaagaagtgggcttgttgaaggacatgtctccactatcagaaacagaaatggctctgggcaaggatgtgactccacctccagaaacagaagtagttctcatcaagaacgtatgtctgcctccagaaatggaggtggccctgactgaggatcaggtcccagccctcaaaacagaagcacccctggctaaggatggggttctgaccctggccaacaatgtgactccagccaaagatgttccaccactctcagaaacagaggcaacaccagttccaattaaagacatggaaattgcacaaacacaaaaaggaataagtgaggattcccatttagaatctctgcaggatgtggggcagtcagctgcacctactttcatgatttcaccagaaaccgtcacaggaacggggaaaaagtgcagcttgccggccgaggaggattctgtgttagaaaaactaggggaaaggaaaccatgcaacagtcaaccttctgagctttcttcagagacctcaggaatagccaggccagaagaaggaaggcctgtggtgagtgggacaggaaatgacatcaccaccccaccgaacaaggagctcccaccaagcccagagaagaaaacaaagcctttggccaccactcaacctgcaaagacttcaacatcgaaagccaaaacacagcccacttctctccctaagcagccagctcccaccaccattggtgggttgaataaaaaacccatgagccttgcttcaggcttagtgccagctgccccacccaaacgccctgccgtcgcctctgccaggccttccatcttaccttcaaaagacgtgaagccaaagcccattgcagatgcaaaggctcctgagaagcgggcctcaccatccaagccagcttctgccccagcctccagatctgggtccaagagcactcagactgttgcaaaaaccacaacagctgctgctgttgcctcaactggcccaagcagtaggagcccctccacgctcctgcccaagaagcccactgccattaagactgagggaaaacctgcagaagtcaagaagatgactgcaaagtctgtaccagctgacttgagtcgcccaaagagcacctccaccagttccatgaagaaaaccaccactctcagtgggacagcccccgctgcaggggtggttcccagccgagtcaaggccacacccatgccctcccggccctccacaactcctttcatagacaagaagcccacctcggccaaacccagctccaccaccccccggctcagccgcctggccaccaatacttctgctcctgatctgaagaatgtccgctccaaggttggctccacggaaaacatcaagcatcagcctggaggaggccgggccaaagtagagaaaaaaacagaggcagctgctacaacccgaaagcctgaatctaatgcagtcactaaaacagccggcccaattgcaagtgcacagaaacaacctgcggggaaagtccagatagtctccaaaaaagtgagctacagccatattcagtccaagtgtggttccaaggacaatattaagcatgtccctggaggtggtaatgttcagattcagaacaagaaagtggacatctctaaggtctcctccaagtgtgggtctaaggctaacatcaagcacaagcctggtggaggagatgtcaagattgaaagtcagaagttgaacttcaaggagaaggcccaggccaaggtgggatccctcgataatgtgggccacctacctgcaggaggtgctgtgaagattgagacctacaggctgacgttccgggcaaatgccagggcccgcaccgaccacggggccgacattgtctcccgccccccacacttccctggcggccccaactcgggctcccgggtccttggccccctttcccgggctgtccactagaccagtgagcgcttgggcgccgtgctgggcagcccgctaggctcgccttccctcctgctttgcgtgcccggggcagcagcagccctgccccacacctcctctcactccccagcctgggcccatctccctgctttggtcttgccccatcactgcgccactgctccgtggaggaggttgggagggggttggggtggttgaggctaagttgggatctaggagaggagaaccagattctatcctcatctttttttggttctttggtccaaacccaaaagaaactgacatgccctcccttctccctggatctacctggagggaagagtggaggtggattccgagtggtgacaggacgctgaccgtggagcttaagccactgcctctccctctggtcccacaaatgggcgcccccccctccccatgcaggtggtgtcgggcccttcttgctgccctgccccaagttgggggtcagtgctgcctgtccccatgcttaacatacccgcctagctgctgtcacatttttcttgttttgtccttttatttttttctaataacctaaaaactggcaaaatagttctgcaggttgaagccatgtctacatgaaagtcctcagtaagtgttagagggaacagggcggagatatccttatgccacccccgctggaggatgtgggcagcttagggccctggaggcggtgcggcagggaagaggggtgcagaggctgtggctggtgagccggtcaggcacacaaggggcccttggagcgtggactggttggttttgccattttgttgtgtgtatgctgcttttcttttctaaccaagaggctggttttggcatctctgtcccattccctgggatctggtggtcagccctaggataaaaagccagggctggagaacaagaaagggccaggagatggaattccttcaggccggcacccacaccctaggacatgtaagccctcatgtccaagggagcctcatgcagatagtaggaaatcaggtctggaaatttaaaaataaaaggcatgagactaaggctatctgcttcccttatgccctgactggagaggggagggaggagaggcaaggcccacagagggcatcccagctaggccttgggatggctgcagtgaggagaaatcccgggaactgtattgacacaaagattcttattgcacttgtattttttgtattaaagtttgcatggtttctaataaaggattcaaacataagtttgtagtgaaatggcctgggagattccaagggcttctctggagggggattggctgcagtgtagatttgcctctgaggaggctgccccagacttggcctcctcatgccccctcctgacctctgcccttctctggtcctggcatccctggagaaggtaggggtcttgacctaagtttagatttgatctccatgtgcagggaggctgtcctgggcctgacaggtcctccccctttctgaggtagcagtgccttgtggaggtttgacaccatgtccctagctccccaagcacacaccaggaaactgcaggggctcacggaggaagtgctgcctgggccagggggaccagctttcctccgtagagaccatgtgcagaacacttctgctgtgccaagaacatgagggagccagtgttttgtcagcaggaagaaagggcctgctgggatgaaagtgggaaggaaacagggttgcgtagtcaggagacacctcaggggcaacagcacaggcccagagtacctgctgcctccactgcgtctgtcctggggtcatgaggatgctgaggttgacgacaggttccaggtcctttcactcctttggccaaaggttgggggtaggtggcccaagtggcgtgctctctaggtagacaacaggagtggtcagagttccctcaaaggatcctccactccagagcacctgagaaggccgggaccagaggccctgtgtgatgtgtactccgcagctgtttggggtgggacatttctgtacttctcgatttgcttatggctcagccattacctgtgtcagtccatgattctgttgtaacagttttaagagtaaataaataaagctgcctgatgtcccatc

SEQ ID NO: 153953 - DNA, 2743 bp, Homo sapiens
  Payload ID: 10263
  Gene Symbol: MAP4
  Gene Name: microtubule-associated protein 4
  Uniprot ID: P27816
  ENST ID: ENST00000439356
  CDS Start-End: 72-371
cccggcgctctcctggctcccttctgccccagctccgtctcggcggcggcgggcagttgcagtggtgcagaatggctgacctcagtcttgcagatgcattaacagaaccatctccagacattgagggagagataaagcgggacttcattgccacactagaggcagaggcctttgatgatgttgtgggagaaactgttggaaaaacagactatattcctctcctggatgttgatgagaaaaccgggaactcagagtcaaagaagaaaccgtgctcagaaactagccagattgaagatactccatcttctaaaccaacactcctagccaatggtggtcatggagtagaagggagcgatactacagaagcctagcgtgtctctcaacactggggctgctgcaacaccagaccagtgatctttcctaagcatcgttatacttctaaaaccttcagcattttgcagagctttgcttttcattcctggacatgatgtagaagaaactgagggtagttcttcggggcctatttctgctgatgcctgagcaaacaacctgcttcctcttgtgctctgcagggtttgatggagcctcatttccctttgtgaacacaaagtgcaaaatgaattctttttaattttagtaatttttacaaaggttatctaatgtcttttatttcttgttttctttatgattttatcatttgattcattctcacatttttttcctttaaatatttttagttgacctttttcctttggttttcaaatgttcaacatgaatcagaatagtgtaacaccaaatgagaacatgtgttttcataaaggggttgaggccaccagtactgcagcgaatttccttttcttctccctcctccttccttctctgagcttgcttttagggaaggttaatcttacaggctacctatgtttctctccaccttactaaaatctaaataatgatagatattttaagtttttaaattgagtagttctgagtaatcctagaatatttttccaaattaaataatcctttattatttgcaagttgggccaaatttttttttttttggagacggactcttaacaatctaagattgtttcaacaggactttcttattcccattcctaattttttcaaactaattgcttaaatctagaaccagttgagattagtactgtacaatggtatgctttgattgtatttatagaaatataacataaaacatggaccatgttttgaaatcttagaggaattctggtttaaaatctgaaatactttaaagttttctatccttttactgattatgcagcttcttataacccccaaggtacagattatttcagcttaaaagaaataattggcaccatgttctgagaaagattttgagatatacattgttttttgtttttgagacagggtctcactcttgcctaggctggagtgcggtggcgcgatcttggcttactgcaccctctgcctcccaggttcaagtggttctcctgcctcagcctcccaagtagctgggattataggtgtgcgccaccacaccagctaatttttgtatttttagtagagacggggttttactttgttggccaggctggtctcgaactcctgatctcaagtgatccacccgccttggccacccaaagtgctgggattacaggtgtgagacactgtgcctggccagatatacattgttttagatcccctgatacagaactacttttgagatggtaagattagaatatcatgaaagtttaaactgaatccttgcagcgacttccggaatttaggaagcattccctcttctacaggggtctggtcacaagggctggattctctgacaaaaatttcttctatggattctggacagaagacacttgagggtgatatgttttaaaggaaagaggttatgcttatcttcttagcagttgataaaatattaaaactctcttgccatagagaatacaccatcaaagaaaacacaaccctttccctttggtgtacagttatttattaagttgattttggggtttctttcgccagggatcttttcaaaactggtagtagttatttttaaaaatcatgtttgacatctttctattgctcgtaaccagtccctgtagctgtctaagttatgggtggagaagcctgggtatgactttccgttgtgtacactcacacttcatgattgacatttatttattcttttatttccatttggttatgcttatttttgtttgaaatttgtttttttcaaatatgtttcctttttgaacttacagaattgttgaaattttctactaacagccagctaaaatttggtatatgttagctctatctgtttcacttggacgtttcattttgaaagaaagaaattttatgtttcacatatagttttatacaaagtagccagtcccataatgaaatgctgtattgccatagtggtcacacccaagtggtccagtatctcaatggtgaggcagccagactggtcagggctgctttgttgaaatgtgatgattttcatatgccttctttctctttctctctctctttttttttccttttttggcccaatgttgaagatgtagaactttgtttttaaataatgtttttataatttcattcgtatacctaagtttgtattttttgtgactttggacttcaacagtttgtatattgggacttctaatgtgattactgtactaaataaattccactaataaacatcttacattaa

SEQ ID NO: 153954 - DNA, 2772 bp, Homo sapiens
  Payload ID: 10263
  Gene Symbol: MAP4
  Gene Name: microtubule-associated protein 4
  Uniprot ID: P27816
  ENST ID: ENST00000434267
  CDS Start-End: 99-398
ggacagaaatgttgaaggcaggtgcctgatccaaaatgcatttagtcaggactgaacacaagctgcctggatagttcctgcagttgcagtggtgcagaatggctgacctcagtcttgcagatgcattaacagaaccatctccagacattgagggagagataaagcgggacttcattgccacactagaggcagaggcctttgatgatgttgtgggagaaactgttggaaaaacagactatattcctctcctggatgttgatgagaaaaccgggaactcagagtcaaagaagaaaccgtgctcagaaactagccagattgaagatactccatcttctaaaccaacactcctagccaatggtggtcatggagtagaagggagcgatactacagaagcctagcgtgtctctcaacactggggctgctgcaacaccagaccagtgatctttcctaagcatcgttatacttctaaaaccttcagcattttgcagagctttgcttttcattcctggacatgatgtagaagaaactgagggtagttcttcggggcctatttctgctgatgcctgagcaaacaacctgcttcctcttgtgctctgcagggtttgatggagcctcatttccctttgtgaacacaaagtgcaaaatgaattctttttaattttagtaatttttacaaaggttatctaatgtcttttatttcttgttttctttatgattttatcatttgattcattctcacatttttttcctttaaatatttttagttgacctttttcctttggttttcaaatgttcaacatgaatcagaatagtgtaacaccaaatgagaacatgtgttttcataaaggggttgaggccaccagtactgcagcgaatttccttttcttctccctcctccttccttctctgagcttgcttttagggaaggttaatcttacaggctacctatgtttctctccaccttactaaaatctaaataatgatagatattttaagtttttaaattgagtagttctgagtaatcctagaatatttttccaaattaaataatcctttattatttgcaagttgggccaaatttttttttttttggagacggactcttaacaatctaagattgtttcaacaggactttcttattcccattcctaattttttcaaactaattgcttaaatctagaaccagttgagattagtactgtacaatggtatgctttgattgtatttatagaaatataacataaaacatggaccatgttttgaaatcttagaggaattctggtttaaaatctgaaatactttaaagttttctatccttttactgattatgcagcttcttataacccccaaggtacagattatttcagcttaaaagaaataattggcaccatgttctgagaaagattttgagatatacattgttttttgtttttgagacagggtctcactcttgcctaggctggagtgcggtggcgcgatcttggcttactgcaccctctgcctcccaggttcaagtggttctcctgcctcagcctcccaagtagctgggattataggtgtgcgccaccacaccagctaatttttgtatttttagtagagacggggttttactttgttggccaggctggtctcgaactcctgatctcaagtgatccacccgccttggccacccaaagtgctgggattacaggtgtgagacactgtgcctggccagatatacattgttttagatcccctgatacagaactacttttgagatggtaagattagaatatcatgaaagtttaaactgaatccttgcagcgacttccggaatttaggaagcattccctcttctacaggggtctggtcacaagggctggattctctgacaaaaatttcttctatggattctggacagaagacacttgagggtgatatgttttaaaggaaagaggttatgcttatcttcttagcagttgataaaatattaaaactctcttgccatagagaatacaccatcaaagaaaacacaaccctttccctttggtgtacagttatttattaagttgattttggggtttctttcgccagggatcttttcaaaactggtagtagttatttttaaaaatcatgtttgacatctttctattgctcgtaaccagtccctgtagctgtctaagttatgggtggagaagcctgggtatgactttccgttgtgtacactcacacttcatgattgacatttatttattcttttatttccatttggttatgcttatttttgtttgaaatttgtttttttcaaatatgtttcctttttgaacttacagaattgttgaaattttctactaacagccagctaaaatttggtatatgttagctctatctgtttcacttggacgtttcattttgaaagaaagaaattttatgtttcacatatagttttatacaaagtagccagtcccataatgaaatgctgtattgccatagtggtcacacccaagtggtccagtatctcaatggtgaggcagccagactggtcagggctgctttgttgaaatgtgatgattttcatatgccttctttctctttctctctctctttttttttccttttttggcccaatgttgaagatgtagaactttgtttttaaataatgtttttataatttcattcgtatacctaagtttgtattttttgtgactttggacttcaacagtttgtatattgggacttctaatgtgattactgtactaaataaattccactaataaacatcttacattaaca

SEQ ID NO: 153955 - DNA, 8920 bp, Homo sapiens
  Payload ID: 10263
  Gene Symbol: MAP4
  Gene Name: microtubule-associated protein 4
  ENST ID: ENST00000426837
  CDS Start-End: 89-6982
acctcctcacggctcttcccggcgctctcctggctcccttctgccccagctccgtctcggcggcggcgggcagttgcagtggtgcagaatggctgacctcagtcttgcagatgcattaacagaaccatctccagacattgagggagagataaagcgggacttcattgccacactagaggcagaggcctttgatgatgttgtgggagaaactgttggaaaaacagactatattcctctcctggatgttgatgagaaaaccgggaactcagagtcaaagaagaaaccgtgctcagaaactagccagattgaagacctcccactacccccacaccctgccagcctttcttttcatcttcctcttgatactccatcttctaaaccaacactcctagccaatggtggtcatggagtagaagggagcgatactacagggtctccaactgaattccttgaagagaaaatggcctaccaggaatacccaaatagccagaactggccagaagataccaacttttgtttccaacctgagcaagtggtcgatcctatccagactgatccctttaagatgtaccatgatgatgacctggcagatttggtctttccctccagtgcgacagctgatacttcaatatttgcaggacaaaatgatcccttgaaagacagttacggtatgtctccctgcaacacagctgttgtacctcaggggtggtctgtggaagccttaaactctccacactcagagtcctttgtttccccagaggctgttgcagaacctcctcagccaacggcagttcccttagagctagccaaggagatagaaatggcatcagaagagaggccaccagcacaagcattggaaataatgatgggactgaagactactgacatggcaccatctaaagaaacagagatggccctcgccaaggacatggcactagctacaaaaaccgaggtggcattggctaaagatatggaatcacccaccaaattagatgtgacactggccaaggacatgcagccatccatggaatcagatatggccctagtcaaggacatggaactacccacagaaaaagaagtggccctggttaaggatgtcagatggcccacagaaacagatgtatcttcagccaagaatgtggtactgcccacagaaacagaggtagccccagccaaggatgtgacactgttgaaagaaacagagagggcatctcctataaaaatggacttagccccttccaaggacatgggaccacccaaagaaaacaagaaagaaacagagagggcatctcctataaaaatggacttggctccttccaaggacatgggaccacccaaagaaaacaagatagtcccagccaaggatttggtattactctcagaaatagaggtggcacaggctaatgacattatatcatccacagaaatatcctctgctgagaaggtggctttgtcctcagaaacagaggtagccctggccagggacatgacactgcccccggaaaccaacgtgatcttgaccaaggataaagcactacctttagaagcagaggtggccccagtcaaggacatggctcaactcccagaaacagaaatagccccggccaaggatgtggctccgtccacagtaaaagaagtgggcttgttgaaggacatgtctccactatcagaaacagaaatggctctgggcaaggatgtgactccacctccagaaacagaagtagttctcatcaagaacgtatgtctgcctccagaaatggaggtggccctgactgaggatcaggtcccagccctcaaaacagaagcacccctggctaaggatggggttctgaccctggccaacaatgtgactccagccaaagatgttccaccactctcagaaacagaggcaacaccagttccaattaaagacatggaaattgcacaaacacaaaaaggaataagtgaggattcccatttagaatctctgcaggatgtggggcagtcagctgcacctactttcatgatttcaccagaaaccgtcacaggaacggggaaaaagtgcagcttgccggccgaggaggattctgtgttagaaaaactaggggaaaggaaaccatgcaacagtcaaccttctgagctttcttcagagacctcagccaacttcatgtattgcggtacccctcccacacaagccaaacaagtttgcagacccagtgaccgcaggtcaacccggcccaagcctgccagggtccctcctgagctgctgggaggctctcctccatggaagactcttgatcacaggctgggccactgctctttgtctgagtcaggttgggtctctggttcatcctcctgtggtgggcctgggaaccaaagaaaaagtattcatgttgactcacttgaaccccagagggatcttggcagggaggcctgggatatagaaagcacaccaataatgatgaagaaaaagaagaagaaaccaaagcaaaagagatattctcaaccacgggctggaggaccttcggatgatgacaatgcagataagcctaaaggtcatccatttgcagctgacacacaaaaatcaggtgttctccccagccagcctaccactatgggtacagaatatggacttgtatctggagaaaacttgaaaagggaatgtttagttaactccagtgcagccagactggtagctgagaactttgtctcagagagtctcagaattcctttatatccttctgaagaagcccccaaaactgcaataagttctcagtctaagctgagagtagaggaagagagcaaaagtaacaagtcagtactacaaaaccaagacaagaaattgctgaagcaacatgaatacaaaccacagcctgcaccccacctgaagactcctgtagataaaagccagtcagtaggccctctcaatctgaaaggacccctagcagaagtttctgcatacaatgtagaaacccctttggatatcagacttaaagagggttgctctcctttcttggaccaagaggttatgggtgtagtttcaaaacccacagcagcaaaagaaataccaaatttggtacccactttgatagcaagtaatccattagaatgtaatctaaaagaagggaataatgaaagtaaaatgactaaactgcagaatgtcaaactgaaggagtttcctgaaggagctgaagaggataaagaactaaaaaaggaagcttttcccaacgaaagacaagagatcagcatctttacttctgagcagctgcagggccaagtgttggtacaggtccctggggtagagaatgaaccatttaagagaatggcaggtgatggcaaaagcaggaagggaaggggaagttctgggaaaatgagaacagattctgggaaggtaaaagcaaaatctgagctgccatttcttctggacagccagaaggacggaagggctgttctcataccgagtgagccagtctctaaaactgaaggaatgactactcaggataagagtgaggagctggggctgaattcttcaaagcaaccaggcactaaggctgatctcacggaggcagtggtgatgggggagcctaaagagatgactcagcctaaggtggcaggcaccatgcaggcattgattcctttggaaagtggatcaggcatgactcagacttctggtgttagcacagaaacaggagatgtagtcaaagatatgggtgtcaataaccagagcaaggaaggaaggtgtccatggaaggatcatgaggcagctccctggatttctgaaaagcctaaaaagagaggcaatgaaggcaaaagcaaaaagtttaaaaataattattccacacagcctgctagaatggagaggaaggaagaaatccttaacccaccttttgaagggaaggatggagatactggtagtattccccataaaagcaaggaaataggatttactttccccaaaatgcatgattcttcgttctcacatacaccagatacacccacagtggaagcagttgacaggaagggtggaaattttcaggttaattttgttgagcttgggactcttggggaaaacaagataagcacagtcaaggcttctactgttactgaaccacctgccaaggtgacagatgtgagctgccaagagcaaatccagggggcaggatttgttccttcagtagtatctgaggagaataagacagatgcagccaatagatacactgcagtggctgacaaaccaagtaaaaggagtaatgatggaaaaagtaaaaaggttaaaaatagttctcctgagaagcacattctggagaataagatagatgcaacaaaaatacatgttcccatggaaaccacaggggaccagggaattgaaggaatggcctatatggacgaaaatagaaatattacatttacctgtcccagaacaccatcagagctgataaataaatcatctcctctagaggttctggaatcagcagcctgtgaaaaactgcccactcctactcctcaagtagtaaaggaaggtgattcctttccagataccttggcaaaaaatgggcaagagatagccccagcccagatttccaaatcattaatggtagataactacaccaaagatggagtcccaggtcaagaaagacccaagggtccctctgctgttgtgccctctacaagcacaggaggagttgctctacctattacaacagccatagaaacagttaacattcatggagatcactctcttaagaataaagctgagcttgctgattccatgaaaaatgaagcagggatcgatgaagggcatgtgataggagaatctgagtcagtgcacagtggtgcgtctaagcattcagtagagaaagtcacagagctagcaaaaggtcacctccttcctggagtgccagtagaagaccagagcctaccaggagaggccagagccctagaaggatatgcagatagaggtaatttcccagcacatccagtgaatgaagagaaagagactaaagaagggtctgttgcagttcagattcctgacttactggaagacaaagcacaaaagctcagtttttgtgaggaccaaaatgctcaagatagaaattccaaaggttcagatagtttgaataagaaggtagatctgactcttttgtctccaaaaagtgaaaatgataaattgaaagaaattagtctggcttgtaaaatcacggaattggaaagcgtttccttgccaacaccagaaatccagtcagatttcttacatagcaaagtcgaagctcctccttcagaggtggcggatacgttagtaataatgactgcttccaagggtgttcgactcccagaacccaaagataagattttggagacacctcagaaaatgacagaaaaatctgaatcaaagacaccaggagaagggaaaaaggaagataaaagcagaatggcagaaccaatgaaaggctacatgagacccaccaagtcccgaggacttactccacttttgccaaagtctacaatccaggaacaagagagacataagcaactgaagtccgctggaatagccaggccagaagaaggaaggcctgtggtgagtgggacaggaaatgacatcaccaccccaccgaacaaggagctcccaccaagcccagagaagaaaacaaagcctttggccaccactcaacctgcaaagacttcaacatcgaaagccaaaacacagcccacttctctccctaagcagccagctcccaccaccattggtgggttgaataaaaaacccatgagccttgcttcaggcttagtgccagctgccccacccaaacgccctgccgtcgcctctgccaggccttccatcttaccttcaaaagacgtgaagccaaagcccattgcagatgcaaaggctcctgagaagcgggcctcaccatccaagccagcttctgccccagcctccagatctgggtccaagagcactcagactgttgcaaaaaccacaacagctgctgctgttgcctcaactggcccaagcagtaggagcccctccacgctcctgcccaagaagcccactgccattaagactgagggaaaacctgcagaagtcaagaagatgactgcaaagtctgtaccagctgacttgagtcgcccaaagagcacctccaccagttccatgaagaaaaccaccactctcagtgggacagcccccgctgcaggggtggttcccagccgagtcaaggccacacccatgccctcccggccctccacaactcctttcatagacaagaagcccacctcggccaaacccagctccaccaccccccggctcagccgcctggccaccaatacttctgctcctgatctgaagaatgtccgctccaaggttggctccacggaaaacatcaagcatcagcctggaggaggccgggccaaagtagagaaaaaaacagaggcagctgctacaacccgaaagcctgaatctaatgcagtcactaaaacagccggcccaattgcaagtgcacagaaacaacctgcggggaaagtccagatagtctccaaaaaagtgagctacagccatattcagtccaagtgtggttccaaggacaatattaagcatgtccctggaggtggtaatgttcagattcagaacaagaaagtggacatctctaaggtctcctccaagtgtgggtctaaggctaacatcaagcacaagcctggtggaggagatgtcaagattgaaagtcagaagttgaacttcaaggagaaggcccaggccaaggtgggatccctcgataatgtgggccacctacctgcaggaggtgctgtgaagactgagggcggtggcagcgaggctcctctgtgtccgggtccccctgctggggaggagccggccatctctgaggcagcgcctgaagctggcgcccccacttcagccagtggcctcaatggccaccccaccctgtcagggggtggtgaccaaagggaggcccagaccttggacagccagatccaggagacaagcatctaatgatgacattctggtctcgtcttccgtctcccccgtgttcccctcttgtctcccctgttcccctctcccttccctcctcccatgtcactgcagattgagacctacaggctgacgttccgggcaaatgccagggcccgcaccgaccacggggccgacattgtctcccgccccccacacttccctggcggccccaactcgggctcccgggtccttggccccctttcccgggctgtccactagaccagtgagcgcttgggcgccgtgctgggcagcccgctaggctcgccttccctcctgctttgcgtgcccggggcagcagcagccctgccccacacctcctctcactccccagcctgggcccatctccctgctttggtcttgccccatcactgcgccactgctccgtggaggaggttgggagggggttggggtggttgaggctaagttgggatctaggagaggagaaccagattctatcctcatctttttttggttctttggtccaaacccaaaagaaactgacatgccctcccttctccctggatctacctggagggaagagtggaggtggattccgagtggtgacaggacgctgaccgtggagcttaagccactgcctctccctctggtcccacaaatgggcgcccccccctccccatgcaggtggtgtcgggcccttcttgctgccctgccccaagttgggggtcagtgctgcctgtccccatgcttaacatacccgcctagctgctgtcacatttttcttgttttgtccttttatttttttctaataacctaaaaactggcaaaatagttctgcaggttgaagccatgtctacatgaaagtcctcagtaagtgttagagggaacagggcggagatatccttatgccacccccgctggaggatgtgggcagcttagggccctggaggcggtgcggcagggaagaggggtgcagaggctgtggctggtgagccggtcaggcacacaaggggcccttggagcgtggactggttggttttgccattttgttgtgtgtatgctgcttttcttttctaaccaagaggctggttttggcatctctgtcccattccctgggatctggtggtcagccctaggataaaaagccagggctggagaacaagaaagggccaggagatggaattccttcaggccggcacccacaccctaggacatgtaagccctcatgtccaagggagcctcatgcagatagtaggaaatcaggtctggaaatttaaaaataaaaggcatgagactaaggctatctgcttcccttatgccctgactggagaggggagggaggagaggcaaggcccacagagggcatcccagctaggccttgggatggctgcagtgaggagaaatcccgggaactgtattgacacaaagattcttattgcacttgtattttttgtattaaagtttgcatggtttctaataaaggattcaaacataagtttgtagtgaaatggcctgggagattccaagggcttctctggagggggattggctgcagtgtagatttgcctctgaggaggctgccccagacttggcctcctcatgccccctcctgacctctgcccttctctggtcctggcatccctggagaaggtaggggtcttgacctaagtttagatttgatctccatgtgcagggaggctgtcctgggcctgacaggtcctccccctttctgaggtagcagtgccttgtggaggtttgacaccatgtccctagctccccaagcacacaccaggaaactgcaggggctcacggaggaagtgctgcctgggccagggggaccagctttcctccgtagagaccatgtgcagaacacttctgctgtgccaagaacatgagggagccagtgttttgtcagcaggaagaaagggcctgctgggatgaaagtgggaaggaaacagg

SEQ ID NO: 153956 - DNA, 3478 bp, Homo sapiens
  Payload ID: 10263
  Gene Symbol: MAP4
  Gene Name: microtubule-associated protein 4
  ENST ID: ENST00000420772
  CDS Start-End: 345-2831
cttagtgcttggattggcaccatactgtgttttaaattgcagatctaaacagagtgctagttcacgggaaattacattctcagattaaagtagcattttgttgtgcagaaagcagcaggttccttcctttctttcgctttcattcattcttcctttctttctttctttcacatttgtaagtgcatttaatactcaactgcttgaggagagaggggcattgagggagagatgaattttgtcatgaatactggggaattggtgtgatgtcactgcaagctctgtgtgatcgtaggtggtattagagctccaggagcgaaagcagggagagcagtggaggagagacgatgtcgctctcagacaagcagacagcctctctcactgccgcgtacggtcagctcagtaagggcaagcctgcagagtgccgaatggactccccaaaagaaatcagtcaagccggattcgaatggcagaggacagagggcaaactgaatgaaattgggctgaatgtcagcatggacgggcaaccaaaagatgggcttgtgaagaatgccagcttcctggagcagaacaagctctgcttttttgaggggaagctagacaaagagctgagcattgaaatgcaggacaaggactgtcaagaagcctcaggtcaccttgagagcaggtatgtgatttcagagacctgccatcccttggaggggaactcggtacaccagaagacctccgagttccatctgggactcatagaggggccagacaaaaacaaaaccattccagttcaggggaaggtggcagggaagaatggactagagaccaagagccagtcagatctggatttccctggggctgctgacatccctaccagatatgttaaggagcaggaaaccagtgtttggaaccccagctttcatccagtggctcaaggctctctgggctcaagggaagcaactccgggagagatggagaatagcatcacccctggctgcccagtgattggggtggtaaatgataactctgagcagctgaagtgtgagtccccactcctggtgtctctagcccacccagcccccattattgagcattcacccaccaccattccgccaatcactatggtgttcacccaggaacatttgaatgcaagctgtcacatcagagaccatgataaggagttggagaaattgagttctaccgaggaggctgtgctcaaccaagccccccagcagaaaaaggcagtgcgcagggccctgtctgaatgttctcacctctcagttcccccagctgtcaaccttgcagataagtaccctgaactccctgcccgagaagagccttcttctggcctgctgcctccccctagtagcccaatgcctagtcctacacctgggaaactgggagctcctgctatgaagcgctccatgactgtgggtgaggaacagacagctagctacaaattgagccctgggaaactgcccatcttgtctactaaagagatacctcctttcatctgtgaggaaccagtggccaagaagagagaagaattggctcacttcagcaacagcagcagcaactctgggaagaaggaactcggcactgctggattatatctccatagtaagctggagcagattcctgaaggaagcagcaaggaaaaagggcaggaagattttagtgaaactagaattgattcatgctcgcaggtttgccagcgaggagagaaacagccaggacagacggctctggcagggaagaaagaaattgaggtcactgcaacccagagcactccatcgttcctgtttgaaaagcccccacgtgatggaatagccaggccagaagaaggaaggcctgtggtgagtgggacaggaaatgacatcaccaccccaccgaacaaggagctcccaccaagcccagagaagaaaacaaagcccattgcagatgcaaaggctcctgagaagcgggcctcaccatccaagccagcttctgccccagcctccagatctgggtccaagagcactcagactgttgcaaaaaccacaacagctgctgctgttgcctcaactggcccaagcagtaggagcccctccacgctcctgcccaagaagcccactgctgacttgagtcgcccaaagagcacctccaccagttccatgaagaaaaccaccactctcagtgggacagcccccgctgcaggggtggttcccagccgagtcaaggccacacccatgccctcccggccctccacaactcctttcatagacaagaagcccacctcggccaaacccagctccaccaccccccggctcagccgcctggccaccaatacttctgctcctgatctgaagaatgtccgctccaaggttggctccacggaaaacatcaagcatcagcctggaggaggccgggtccagatagtctccaaaaaagtgagctacagccatattcagtccaagtgtggttccaaggacaatattaagcatgtccctggaggtggtaatgttcagattcagaacaagaaagtggacatctctaaggtctcctccaagtgtgggtctaaggctaacatcaagcacaagcctggtggaggagatgtcaagattgaaagtcagaagttgaacttcaaggagaaggcccaggccaaggtgggatccctcgataatgtgggccacctacctgcaggaggtgctgtgaagattgagacctacaggctgacgttccgggcaaatgccagggcccgcaccgaccacggggccgacattgtctcccgccccccacacttccctggcggccccaactcgggctcccgggtccttggccccctttcccgggctgtccactagaccagtgagcgcttgggcgccgtgctgggcagcccgctaggctcgccttccctcctgctttgcgtgcccggggcagcagcagccctgccccacacctcctctcactccccagcctgggcccatctccctgctttggtcttgccccatcactgcgccactgctccgtggaggaggttgggagggggttggggtggttgaggctaagttgggatctaggagaggagaaccagattctatcctcatctttttttggttctttggtccaaacccaaaagaaactgacatgccctcccttctccctggatctacctggagggaagagtggaggtggattccgagtggtgacaggacgctgaccgtggagcttaagccactgcctctccctctggtcccacaaatgggcgcccccccctccccatgcaggtggtgtcgggcccttcttgctgccctgccccaagttgggggtcagtgctgcctgtccccatgcttaacatacccgcctagctgctgtcacatttttcttgttttgtccttttatttttttctaataacctaaaaactggcaaaatagttctgcaggttgaagccatgtctacatgaaagtcctcagtaagtgttagagggaacagggcggagatatccttatg

SEQ ID NO: 153957 - DNA, 899 bp, Homo sapiens
  Payload ID: 10263
  Gene Symbol: MAP4
  Gene Name: microtubule-associated protein 4
  ENST ID: ENST00000423088
  CDS Start-End: 49-899
ctgccccagctccgtctcggcggcggcgggcagttgcagtggtgcagaatggctgacctcagtcttgcagatgcattaacagaaccatctccagacattgagggagagataaagcgggacttcattgccacactagaggcagaggcctttgatgatgttgtgggagaaactgttggaaaaacagactatattcctctcctggatgttgatgagaaaaccgggaactcagagtcaaagaagaaaccgtgctcagaaactagccagattgaagatactccatcttctaaaccaacactcctagccaatggtggtcatggagtagaagggagcgatactacagggtctccaactgaattccttgaagagaaaatggcctaccaggaatacccaaatagccagaactggccagaagataccaacttttgtttccaacctgagcaagtggtcgatcctatccagactggtatgtctccctgcaacacagctgttgtacctcaggggtggtctgtggaagccttaaactctccacactcagagtcctttgtttccccagaggctgttgcagaacctcctcagccaacggcagttcccttagagctagccaaggagatagaaatggcatcagaagagaggccaccagcacaagcattggaaataatgatgggactgaagactactgacatggcaccatctaaagaaacagagatggccctcgccaaggacatggcactagctacaaaaaccgaggtggcattggctaaagatatggaatcacccaccaaattagatgtgacactggccaaggacatgcagccatccatggaatcagatatggccctagtcaaggacatggaactacccacagaaaaagaagtggccctggttaaggatgtcagatg

SEQ ID NO: 153958 - DNA, 3724 bp, Homo sapiens
  Payload ID: 10263
  Gene Symbol: MAP4
  Gene Name: microtubule-associated protein 4
  ENST ID: ENST00000429422
  CDS Start-End: 1-1480
caagggtgttcgactcccagaacccaaagataagattttggagacacctcagaaaatgacagaaaaatctgaatcaaagacaccaggagaagggaaaaaggaagataaaagcagaatggcagaaccaatgaaaggctacatgagacccaccaagtcccgaggacttactccacttttgccaaagtctacaatccaggaacaagagagacataagcaactgaagtccgctggaatagccaggccagaagaaggaaggcctgtggtgagtgggacaggaaatgacatcaccaccccaccgaacaaggagctcccaccaagcccagagaagaaaacaaagcctttggccaccactcaacctgcaaagacttcaacatcgaaagccaaaacacagcccacttctctccctaagcagccagctcccaccaccattggtgggttgaataaaaaacccatgagccttgcttcaggcttagtgccagctgccccacccaaacgccctgccgtcgcctctgccaggccttccatcttaccttcaaaagacgtgaagccaaagcccattgcagatgcaaaggctcctgagaagcgggcctcaccatccaagccagcttctgccccagcctccagatctgggtccaagagcactcagactgttgcaaaaaccacaacagctgctgctgttgcctcaactggcccaagcagtaggagcccctccacgctcctgcccaagaagcccactgccattaagactgagggaaaacctgcagaagtcaagaagatgactgcaaagtctgtaccagctgacttgagtcgcccaaagagcacctccaccagttccatgaagaaaaccaccactctcagtgggacagcccccgctgcaggggtggttcccagccgagtcaaggccacacccatgccctcccggccctccacaactcctttcatagacaagaagcccacctcggccaaacccagctccaccaccccccggctcagccgcctggccaccaatacttctgctcctgatctgaagaatgtccgctccaaggttggctccacggaaaacatcaagcatcagcctggaggaggccgggttcagattcagaacaagaaagtggacatctctaaggtctcctccaagtgtgggtctaaggctaacatcaagcacaagcctggtggaggagatgtcaagattgaaagtcagaagttgaacttcaaggagaaggcccaggccaaggtgggatccctcgataatgtgggccacctacctgcaggaggtgctgtgaagactgagggcggtggcagcgaggctcctctgtgtccgggtccccctgctggggaggagccggccatctctgaggcagcgcctgaagctggcgcccccacttcagccagtggcctcaatggccaccccaccctgtcagggggtggtgaccaaagggaggcccagaccttggacagccagatccaggagacaaattgagacctacaggctgacgttccgggcaaatgccagggcccgcaccgaccacggggccgacattgtctcccgccccccacacttccctggcggccccaactcgggctcccgggtccttggccccctttcccgggctgtccactagaccagtgagcgcttgggcgccgtgctgggcagcccgctaggctcgccttccctcctgctttgcgtgcccggggcagcagcagccctgccccacacctcctctcactccccagcctgggcccatctccctgctttggtcttgccccatcactgcgccactgctccgtggaggaggttgggagggggttggggtggttgaggctaagttgggatctaggagaggagaaccagattctatcctcatctttttttggttctttggtccaaacccaaaagaaactgacatgccctcccttctccctggatctacctggagggaagagtggaggtggattccgagtggtgacaggacgctgaccgtggagcttaagccactgcctctccctctggtcccacaaatgggcgcccccccctccccatgcaggtggtgtcgggcccttcttgctgccctgccccaagttgggggtcagtgctgcctgtccccatgcttaacatacccgcctagctgctgtcacatttttcttgttttgtccttttatttttttctaataacctaaaaactggcaaaatagttctgcaggttgaagccatgtctacatgaaagtcctcagtaagtgttagagggaacagggcggagatatccttatgccacccccgctggaggatgtgggcagcttagggccctggaggcggtgcggcagggaagaggggtgcagaggctgtggctggtgagccggtcaggcacacaaggggcccttggagcgtggactggttggttttgccattttgttgtgtgtatgctgcttttcttttctaaccaagaggctggttttggcatctctgtcccattccctgggatctggtggtcagccctaggataaaaagccagggctggagaacaagaaagggccaggagatggaattccttcaggccggcacccacaccctaggacatgtaagccctcatgtccaagggagcctcatgcagatagtaggaaatcaggtctggaaatttaaaaataaaaggcatgagactaaggctatctgcttcccttatgccctgactggagaggggagggaggagaggcaaggcccacagagggcatcccagctaggccttgggatggctgcagtgaggagaaatcccgggaactgtattgacacaaagattcttattgcacttgtattttttgtattaaagtttgcatggtttctaataaaggattcaaacataagtttgtagtgaaatggcctgggagattccaagggcttctctggagggggattggctgcagtgtagatttgcctctgaggaggctgccccagacttggcctcctcatgccccctcctgacctctgcccttctctggtcctggcatccctggagaaggtaggggtcttgacctaagtttagatttgatctccatgtgcagggaggctgtcctgggcctgacaggtcctccccctttctgaggtagcagtgccttgtggaggtttgacaccatgtccctagctccccaagcacacaccaggaaactgcaggggctcacggaggaagtgctgcctgggccagggggaccagctttcctccgtagagaccatgtgcagaacacttctgctgtgccaagaacatgagggagccagtgttttgtcagcaggaagaaagggcctgctgggatgaaagtgggaaggaaacagggttgcgtagtcaggagacacctcaggggcaacagcacaggcccagagtacctgctgcctccactgcgtctgtcctggggtcatgaggatgctgaggttgacgacaggttccaggtcctttcactcctttggccaaaggttgggggtaggtggcccaagtggcgtgctctctaggtagacaacaggagtggtcagagttccctcaaaggatcctccactccagagcacctgagaaggccgggaccagaggccctgtgtgatgtgtactccgcagctgtttggggtgggacatttctgtacttctcgatttgcttatggctcagccattacctgtgtcagtccatgattctgttgtaacagttttaagagtaaataaataaagctgcctgatgtcccatcacgcag

SEQ ID NO: 153959 - DNA, 487 bp, Homo sapiens
  Payload ID: 10263
  Gene Symbol: MAP4
  Gene Name: microtubule-associated protein 4
  ENST ID: ENST00000468075
  CDS Start-End: 260-487
gagagagagcgacggccatcatagaacagcgaaggcagtcgatcggcctgcggtccgcttcggcattcgcaggccgcaggcgggaggctagagcccccaggcgcacctcgccccaaccgcccgcggctcgggcagctctgcagagacgtcgtggcggcagggccagcacccattggtccgccacagccctccgccctccccctcgccacgcttattggccggagcggcggcgctcgccgggcagttgcagtggtgcagaatggctgacctcagtcttgcagatgcattaacagaaccatctccagacattgagggagagataaagcgggacttcattgccacactagaggcagaggcctttgatgatgttgtgggagaaactgttggaaaaacagactatattcctctcctggatgttgatgagaaaaccgggaactcagagtcaaagaagaaaccgtgctcagaaactagccagattgaagatact

SEQ ID NO: 153960 - DNA, 570 bp, Homo sapiens
  Payload ID: 10263
  Gene Symbol: MAP4
  Gene Name: microtubule-associated protein 4
  ENST ID: ENST00000633710
  CDS Start-End: 150-570
attcatttggacagaaatgttgaaggcaggtgcctgatccaaaatgcatttagtcaggactgaacacaagctgcctggatagttcctattagagaactcagccctgaaaggtgactcattcaaggccacagcagttgcagtggtgcagaatggctgacctcagtcttgcagatgcattaacagaaccatctccagacattgagggagagataaagcgggacttcattgccacactagaggcagaggcctttgatgatgttgtgggagaaactgttggaaaaacagactatattcctctcctggatgttgatgagaaaaccgggaactcagagtcaaagaagaaaccgtgctcagaaactagccagattgaagacctcccactacccccacaccctgccagcctttcttttcatcttcctcttgatactccatcttctaaaccaacactcctagccaatggtggtcatggagtagaagggagcgatactacagggtctccaactgaattccttgaagagaaaatggcctaccaggaatacccaaatagccagaactggccagaagatacca

SEQ ID NO: 153961 - DNA, 3334 bp, Homo sapiens
  Payload ID: 10264
  Gene Symbol: MAP6
  Gene Name: microtubule-associated protein 6
  Uniprot ID: Q96JE9
  ENST ID: ENST00000304771
  CDS Start-End: 752-3193
agcactctttcagtcagcatcgttcctggatttttttctcactgctgagcagcataaaagggtggggccgcttccctgcagcagaggcagaggcggcggcggcagcggctgcagcatcattcgcgggcagcggcggagaccgagagctgcagaaaagggtggggtcgcttcccaggagaagaggcggtggcggcggcggctgcggcatcctcgcgggcagcggcggaggcagcaatgctcggtctccgctggaggtgatggcctcccagccctgctaggtggccggctgcactaggacgccggcaggaaggagactcgagcccggtccgcggaccctgcggccacaccgcccggcccctcctctgcgccatggcttaagcctgtagccacctctcctcacgtcgcctcgctcgaccgaggtctgtgcgccgccgcagccgcagggaggggcgcgtcccagacaccctcgccggggactcgggaacgccgtgcgtctcacccttcggcgctcgcagcagactgcgctcccaaaggcgtttgcgaccggtaatcgagggactctacagactctcctaggacagctctccccgggtgctcgctgagggaggagggcgaactagctccggctgatcgggggtagaaaacggtgggaaccacattggccggtcaggatcggaggctgaaggaagattatagagacttgctttagaaccacaagaagaaagaggaggccggcttttcagctagcatcatggcgtggccgtgcatcacgagggcctgctgcatcgcccgcttctggaaccagttggacaaagcggacatcgctgtgccgctggttttcaccaagtactcggaggccaccgagcacccgggcgccccgccgcagccaccgccgccgcagcagcaggcgcagccggcgctcgcgcccccctcggcgcgcgcggttgccatagagacgcagccagcccagggcgagttggatgcagttgcccgggcaacggggccagcgcctgggcctaccggcgagcgcgagccggcggcgggccccggccggagcgggccgggcccgggcctgggctccggctccacctccggccccgcggactcggtgatgcggcaggattaccgagcctggaaggtgcagcggcccgagcccagctgccggccgcgcagcgaataccagccctccgacgctcccttcgagcgcgagacccagtaccagaaggacttccgcgcctggccgctgccgcgccgcggggaccacccgtggatccccaagcccgtgcagatctctgcggcctcccaggcgtcggcgcccattctcggggcgcccaagcgccggccgcagagccaggagcgctggccagtgcaggccgccgctgaggcccgggagcaggaggcggcccccggcggagcgggtggcctggcggccggaaaggcgtccggggcggacgagcgcgacacgcgcaggaaggccgggcctgcctggattgtgcgccgcgccgagggcctggggcacgagcagacgccgctgcccgcggcccaggcccaggtccaggccaccggccccgaggctggcagggggcgcgccgcggcggacgccctcaaccggcaaatccgcgaggaggtggcgagtgcagtgagcagctcctacaggaatgaattcagggcatggacggacatcaagcctgtgaaaccaataaaggccaagccccagtacaagcccccagatgataagatggttcatgagaccagctacagtgctcagttcaaaggagaggccagcaagccaacaacagctgacaataaggtcattgatcgcagaagaatacgcagcctctacagcgaacccttcaaggaacccccaaaggtggaaaaacctagtgttcagagttccaaaccaaaaaagacctcagcgagccataagcccacgaggaaggccaaagacaagcaggcggtgtcaggccaggctgccaagaaaaagagcgcggagggcccgagtaccaccaagccagacgacaaggagcaaagcaaagagatgaacaataaactggctgaggcgaaagagagcctggctcaacccgtcagtgattcaagtaagactcaaggtcctgtagccacagagccagacaaggatcaaggttctgtggtcccaggccttctgaaaggtcaaggtcctatggtgcaagagcctctgaagaagcaaggttctgtggtcccagggcctccaaaggatctaggtcccatgatcccattaccagtcaaggatcaagatcacacggtccctgagcctttaaagaatgaaagccctgttatctcagcaccagtcaaggaccaaggtccctcggtcccagttcctccaaagaatcaaagtcctatggttccagcaaaagttaaggatcaaggctctgtggtaccagagtctctaaaggatcaaggtcctaggattcctgagcctgtgaagaatcaagctcctatggtcccagcacctgtcaaggatgaaggtcccatggtctcagcatctgtcaaggatcaaggtcccatggtctcagcacctgtcaaggatcaaggtcccatagtcccagcacctgtcaagggtgaaggtcccatagtcccagcacctgtcaaggatgaaggtcccatggtctcagcacctatcaaggatcaagatcccatggtcccagagcatccgaaggatgaaagtgccatggccacagcacccataaagaatcaaggttccatggtctctgagcctgtaaagaatcaaggtttagtggtctcagggccagtcaaggatcaagatgttgtagtcccagagcatgcaaaggttcacgattctgcagttgtggcacctgtaaagaatcaaggtcctgtggtccccgagtccgtgaagaatcaagaccccattctcccagtactagttaaggatcaaggccccacagtcctacagcctccaaagaatcaaggtcgtatagtccctgaacctctgaagaatcaagttcctatagtcccagtgcctctgaaggatcaagatcctctggtgccagtaccagcaaaggaccaaggtcctgcagtccctgaacctctgaagactcaaggtcccagggaccctcagctacctactgtctcacctctaccccgagtcatgatcccaactgccccccatacggaatacattgagagctccccttgacactcaccccttgacacaccaatgaaggagctgacagtgagagtgctcccctcccaggggcagtgaagacacatatttaatctgcatgaaacatgtacagtagtcttgctggaatctaataaaaatggtccctctggctca

SEQ ID NO: 153962 - DNA, 4329 bp, Homo sapiens
  Payload ID: 10264
  Gene Symbol: MAP6
  Gene Name: microtubule-associated protein 6
  Uniprot ID: Q96JE9
  ENST ID: ENST00000434603
  CDS Start-End: 66-1385
aagattatagagacttgctttagaaccacaagaagaaagaggaggccggcttttcagctagcatcatggcgtggccgtgcatcacgagggcctgctgcatcgcccgcttctggaaccagttggacaaagcggacatcgctgtgccgctggttttcaccaagtactcggaggccaccgagcacccgggcgccccgccgcagccaccgccgccgcagcagcaggcgcagccggcgctcgcgcccccctcggcgcgcgcggttgccatagagacgcagccagcccagggcgagttggatgcagttgcccgggcaacggggccagcgcctgggcctaccggcgagcgcgagccggcggcgggccccggccggagcgggccgggcccgggcctgggctccggctccacctccggccccgcggactcggtgatgcggcaggattaccgagcctggaaggtgcagcggcccgagcccagctgccggccgcgcagcgaataccagccctccgacgctcccttcgagcgcgagacccagtaccagaaggacttccgcgcctggccgctgccgcgccgcggggaccacccgtggatccccaagcccgtgcagatctctgcggcctcccaggcgtcggcgcccattctcggggcgcccaagcgccggccgcagagccaggagcgctggccagtgcaggccgccgctgaggcccgggagcaggaggcggcccccggcggagcgggtggcctggcggccggaaaggcgtccggggcggacgagcgcgacacgcgcaggaaggccgggcctgcctggattgtgcgccgcgccgagggcctggggcacgagcagacgccgctgcccgcggcccaggcccaggtccaggccaccggccccgaggctggcagggggcgcgccgcggcggacgccctcaaccggcaaatccgcgaggaggtggcgagtgcagtgagcagctcctacaggaatgaattcagggcatggacggacatcaagcctgtgaaaccaataaaggccaagccccagtacaagcccccagatgataagatggttcatgagaccagctacagtgctcagttcaaaggagaggccagcaagccaacaacagctgacaataaggtcattgatcgcagaagaatacgcagcctctacagcgaacccttcaaggaacccccaaaggtggaaaaacctagtgttcagagttccaaaccaaaaaagacctcagcgagccataagcccacgaggaaggccaaagacaagcaggcggtgtcaggccaggctgccaagaaaaagagcgcggagggcccgagtaccaccaagccagacgacaaggagcaaagcaaagagatgaacaataaactggctgaggcgaaagagtaaatttccctgcactttccttttactcttctctctctctccctccccccaactttttttttttaaaccaacaaaccaaaaaaggccacaaaattaattagaggcttctcatctgccttggtcctgagtgttccaggagctctttggtttggcttcttttgatggaagaatcctgcttcacagactgagtggcaggcctcctcctgagggcagcccctggagcaccaggaagcgttgccgctggctgtgccctcccctggcactctgactgcatgctgatgagcaaggcaggcaggtctgagaggcgaaacgaatctcccggcagtgcttggaagtgtctgtggggtctcctcctcccagatccccaagatctgtgtcactggtcgattttgaactttaggtacatgtgttcttttcaaaaattcagagaatcgtcatgtgccacagaagctcagcctgggcttcagcaattgacaaaatttgaagaaatattaaacaaaaataacaaaaaaagaaacaaccttggccttaatgtcaataaaagggagttgtgtctgttaagtggtcttttcatagaatcgtccattagaaatgtgtgcctgtgtttagcttcctatcagtgggctttaaattgtataccgagtcatagatacgccactgataactaaaactagatcagggctggtgaagaaggttaggtgttttaggtacattccagctgtcataggaagatcacagaaatgaggaggctgttttcctctgattctcctcggccgaccacctgtccaatgctgctggtttcgcagagcgaccggttggagatgtctgaggaagaaagttcaaggtgtagggatagtgtgtttggaatttgactttccatttctgagacccaagggggcgtagatgtagtggcaagtgtggcgatgtttactctcccttcctgaaccgctctggtctgctcctcagagagggcagcggtgccaggcctcaggtcagggagaatgtctgtgacttagctgcagactaggagactgccctgctaactaattagcaagcagctttgacctcattaatatataaaagcagctctcagtatattccgtgtcgtgtgtgtgtgtggccaaagcccccaagggtggcaagtgccaccttcgctgtgctagagttgtgttgtaggaattagtcagggagttgttgtgaaaaaaaaaaccccagtgcttgtgagggaactcaaaatagttaccagaaaaataatatttgccaatatgacgtgtatattgctcagcacactctgtatctcctgtccttaaaatcctcttgtccccggcattctgacacactgggctgccgtccggtgtcaagccccggcgcaggcttgctcttcttttacaatgaaaggggtgaagagtgagggtctcacagttccttacctcaaagtccctttaggtccttctggtttggaggaagtggagcctccacgaactctctcttactccgaccattcaggcagcaaagtctctgcttacatcattttggttgtcaccttggggctgagtgagaagtcttttgtaaattaattcggcgtgtgctacatgagccataattattaacagaacaggaatatcagaaacgaagttgttgatcaggcccactgcgaccttcctttctatctcagggtttaaaactgtgaggaaggagaagtatgaaggaaggtagaaaatgctggtgggtctccgtgtttatgagtcacagattttgaaagctatcaggaaatgactagagtggatcctggcactgattccaactctttgccagctaatcttaacatttagcagaaagctctagcaacatgatcttaattgtatccagaggatttgccaatgtatgttcagtctctcaagatttggcattagtcagacatgttgatgctagccacaatttggatttctccatagaataatcatttatttttgcagatcaaataaatcagagtttacaatgcacaggggatcatttatttagcattcccttgctagaagcccgtgtgccaggcactgtgctaggcgtggtgggcagtataaagaaatctgtctccacagccacacaaccagagggtgcacatgacttgatccctatgaccaagtcaagttggtgttgcccaaatcgcagtttgacataagggtcccacaggcttccccaccccccgcccccactcactgccccagggaccaacttcctaccctcacccaaggctttagaggacctgtagcatgtctttttcaacctgtcagtatccccttctgcttaacacacccactgagaaaaccctgtttgtagttcactttgactcttgaatgtgtcactttactggcaagagacttcctttgatttctactgtttacaaataaaactcagccagtctcattctatatcccaaacgtactgaatgaaactgattttggttccacaagcagtgtttgggtgttgccttcctgaaggtgaccaagcttccaaagctcgtcccactggcctctgtacatttccctgtggttctccgtccttccctggcgagggagctgggactgaagctttcccgctgtttccctgcctgcaaaagcagccccaagagctgcgcattggcttccctcagcaatctgtcctgtctgtgctcccattcggtccacatagctttctttgcctctctgaggcagacaggaagtgtctaattacgattttgtggcctgggttttgttgcataccacagattgtctatgtaacatgtagcgcacacctctcttggtgctatttcattcctgctgtaagagaatgacaaaaatattcatgtatagccaattgattgtgacgtgcttgtggtctgtgcttgctcagaaaaacaaacaaacaaacagtttttccaattataaataaatgctaaagacgaacacca

SEQ ID NO: 153963 - DNA, 1755 bp, Homo sapiens
  Payload ID: 10264
  Gene Symbol: MAP6
  Gene Name: microtubule-associated protein 6
  Uniprot ID: Q96JE9
  ENST ID: ENST00000526740
  CDS Start-End: 161-1615
agcagactgcgctcccaaaggcgtttgcgaccggtaatcgagggactctacagactctcctaggacagctctccccgggaatgaattcagggcatggacggacatcaagcctgtgaaaccaataaaggccaagccccagtacaagcccccagatgataagatggttcatgagaccagctacagtgctcagttcaaaggagaggccagcaagccaacaacagctgacaataaggtcattgatcgcagaagaatacgcagcctctacagcgaacccttcaaggaacccccaaaggtggaaaaacctagtgttcagagttccaaaccaaaaaagacctcagcgagccataagcccacgaggaaggccaaagacaagcaggcggtgtcaggccaggctgccaagaaaaagagcgcggagggcccgagtaccaccaagccagacgacaaggagcaaagcaaagagatgaacaataaactggctgaggcgaaagagagcctggctcaacccgtcagtgattcaagtaagactcaaggtcctgtagccacagagccagacaaggatcaaggttctgtggtcccaggccttctgaaaggtcaaggtcctatggtgcaagagcctctgaagaagcaaggttctgtggtcccagggcctccaaaggatctaggtcccatgatcccattaccagtcaaggatcaagatcacacggtccctgagcctttaaagaatgaaagccctgttatctcagcaccagtcaaggaccaaggtccctcggtcccagttcctccaaagaatcaaagtcctatggttccagcaaaagttaaggatcaaggctctgtggtaccagagtctctaaaggatcaaggtcctaggattcctgagcctgtgaagaatcaagctcctatggtcccagcacctgtcaaggatgaaggtcccatggtctcagcatctgtcaaggatcaaggtcccatggtctcagcacctgtcaaggatcaaggtcccatagtcccagcacctgtcaagggtgaaggtcccatagtcccagcacctgtcaaggatgaaggtcccatggtctcagcacctatcaaggatcaagatcccatggtcccagagcatccgaaggatgaaagtgccatggccacagcacccataaagaatcaaggttccatggtctctgagcctgtaaagaatcaaggtttagtggtctcagggccagtcaaggatcaagatgttgtagtcccagagcatgcaaaggttcacgattctgcagttgtggcacctgtaaagaatcaaggtcctgtggtccccgagtccgtgaagaatcaagaccccattctcccagtactagttaaggatcaaggccccacagtcctacagcctccaaagaatcaaggtcgtatagtccctgaacctctgaagaatcaagttcctatagtcccagtgcctctgaaggatcaagatcctctggtgccagtaccagcaaaggaccaaggtcctgcagtccctgaacctctgaagactcaaggtcccagggaccctcagctacctactgtctcacctctaccccgagtcatgatcccaactgccccccatacggaatacattgagagctccccttgacactcaccccttgacacaccaatgaaggagctgacagtgagagtgctcccctcccaggggcagtgaagacacatatttaatctgcatgaaacatgtacagtagtcttgctggaatctaataaaaatggtccctctggctc

SEQ ID NO: 153964 - DNA, 4152 bp, Homo sapiens
  Payload ID: 10265
  Gene Symbol: MAP7
  Gene Name: microtubule-associated protein 7
  Uniprot ID: Q14244
  ENST ID: ENST00000354570
  CDS Start-End: 412-2661
gggaaatagcgtctccgtaccctcgccccacctgggctgctcctcggaccgccgctcgtcccagactccaggaggcgccaccaggcctcgctgaccccgctccatatctccgggagccctcagctggtcggccgcggcgaccggaagctccggactgaggtactggttccgcccgccgctcttccagccgagactcggcagcggcggtcggagcggctgccacgccgcacctgcccgcgagggggcgcgccaggcccaggccgcagccgactgccgcgctctctgtccccgccctccgccatccccggactgcgctcacctgtctgggccgctggcctgggaggcgggggccggcgggagccaagccgaggaaagggcggagcggctctccgggcgcgtcatcggagcaccatggcggagctaggagctggcggcgacggccacaggggcggcgacggcgcagtgcgaagcgaaacagcacccgacagctacaaagtgcaagataagaaaaatgcctccagccgccctgcctctgcaatttcaggacaaaataacaaccactcaggaaataaaccagaccctccgcctgtgttacgtgttgatgaccggcagcggctggcccgggagcgacgtgaggaacgggagaaacagctagctgcaagagaaatagtgtggttagaaagagaagagcgagccaggcagcactacgagaagcacctggaagagcggaagaagaggttggaggagcagaggcagaaggaggagcggaggagggctgctgtggaggagaagcggaggcagagacttgaggaggacaaagaacgccacgaagctgttgtacggcgcacaatggaaaggagccagaagccaaaacagaagcataaccgttggtcgtggggaggctctctccatgggagccctagcatccacagtgcagatccagacaggcggtcagtttccaccatgaatctttcgaaatatgttgatcccgtcattagcaagcggctctcctcttcatctgcaactttactaaattctccagatagagctcgccgcctgcagctcagcccatgggagagcagcgttgttaacagactcctgacgcccacacattcgttcctggccagaagtaaaagcacagctgccttgtctggagaagcagcatcttgcagccccatcatcatgccctacaaagctgcacactctagaaattcgatggatcgaccaaaactctttgtaacaccacctgagggctcttctcgcaggaggatcattcatggcacagcgagctataaaaaagaaagagagagagaaaatgtactcttcctcacatctggcacccgaagggctgtatctccatctaatcccaaagcaagacaaccagctcgctcccgactttggcttccgtccaagtctcttcctcatttgcctggcacacccagaccgacatcctccttgccacccggctcagtcaaagctgctcctgctcaggtccggcccccatcccccggcaacatccgccctgtcaagagggaagtcaaagtggagcctgagaagaaagatcctgagaaggaacctcagaaagttgccaatgagccctcactaaagggcagagcacctttagtgaaggtagaagaagccacagttgaagagcggacacctgctgaaccagaagttggccctgctgctccagccatggccccagctccagcctcggccccagctccagcctcggccccagctccagccccggtccccaccccagccatggtctcagccccgtcatccactgtgaatgccagtgcttctgttaagacttctgcaggcaccaccgacccagaggaggccacaaggcttctagctgagaagaggcggctggcccgagagcagagagaaaaggaagaaagggagaggagggagcaggaagagcttgaaagacaaaagagagaggaattggctcaacgtgtggctgaagagaggacgactcgccgtgaggaggagtcgcgcaggctggaagccgagcaggcccgggagaaggaggagcagctgcagcggcaggcggaggagcgggcgctgcgcgagcgggaggaggcagagcgcgcccagaggcagaaagaagaagaagctcgcgttcgtgaagaagcagagagggtccggcaggaacgagagaagcatttccagagagaagagcaagagcgcctggagagaaagaagcgacttgaggagattatgaaaagaaccaggagaacagaagctacagataagaaaaccagtgatcagagaaacggtgatatagccaagggagctctcactggaggaacagaggtgtctgcacttccatgtacaacaaacgctccgggaaatggaaagccagttggcagcccacatgtggttacctcacaccagtcaaaagtgacagtggagagcactcccgatttggaaaaacaaccaaatgaaaatggtgtatctgttcagaatgaaaattttgaagaaattataaacttacccattggatctaaaccatccagattagatgtcaccaacagtgagagcccagaaattcctttgaatccaattttggcctttgatgatgaagggacacttgggcccctgcctcaggtagatggtgttcagacacagcagactgcagaagttatatgagtgtttcttctgaagaaccaaagctgaaatttaatgagaatttctacaattaatggaattcctttcctgctataaaggagcatcccctccacccgttttctagagttcttgaccatcattttgaaaagatttattaaaactagctaaagacaacagactggatagcttttctaataattttcatcaataggaaaaaagaaatacgtctcattcttcaatactttaaaatggctttttccagtgtgctccttcttagcaatcaatatttttctgcattctttaaaagacaagagaatttggttataaaagaaatgggctgactaggcatgatttttttggtcttaaaagcttaacatgtaaaattggcaaaaaaaattttttaccttttataatacttgaaaaataagtacctctttgttctacaagtagaatgaataggagaagagtttaagcctgtttttttaaaatattattgcaaagagctctatttgtagaagcaaattataggcagattaccaggttcttataaatacagcttgtacatggacattctgcaaacccagctgtcacatttttcttgcaactccttttgcaaaagcagactaaaatgttttaaaatgtgaaaaaacattattttttcaaagcaagaaaataatttactgccctcttacataatgtatttataaagtttttccagataaactaatcaaataaattagaataatgtgacaacattacaaatttaatttgttagctgcattccttctgatgttaccacgatagaatgttactgatgattcagggctatttctgaagtctgtatgttgctgctgtccccagtgatggtggacttatctttgccttacctgatcacaaattatgttggggaaaataaagatttaatatttctttaaatagaaaaagaatttggttttgctcgtttaagagcaatgagaaaatgatggaatgttgactgtgtttggcacacaggacacggaccttcatggaagtccttgctctgcgtggcatctgtcagcttttcacctttcattcttattcttcacttttgctgctgagcctagctgtacaaacttgcactttcatttgctaatataaattcagttttattttaccattttagagactactaatgattaaatgtagaaggagagggtgcacatgtttttatgtggagtgtttaaaagataaatttataccactgtaatgtgcagcttttattaaaagagaaattggttgaactgctaggttgaatgagagacttcatctattggactattttttttaatccaggcatatggtctttagtaatggcttgtaatttgtgaaaacattaatttgggggttttccctgttttcagttgtccatgtacacatagtcattatattagaaaagaaatctgttcaacaaacttgtttaatttgtttaaatcaacatagcatgaaacaccaaataaaatgtttgacatagtt

SEQ ID NO: 153965 - DNA, 2633 bp, Homo sapiens
  Payload ID: 10265
  Gene Symbol: MAP7
  Gene Name: microtubule-associated protein 7
  Uniprot ID: Q14244
  ENST ID: ENST00000438100
  CDS Start-End: 20-2224
aaaaacaagtagcagcggtatgcctggatcagctacagctctccgacatgagagactgaagaagaccaatgcaaggccaattcctcttggtttattcaccattaatgaggaagacgaacagcaaaagaatggaaattccagaagaccaaaagcacccgacagctacaaagtgcaagataagaaaaatgcctccagccgccctgcctctgcaatttcaggacaaaataacaaccactcaggaaataaaccagaccctccgcctgtgttacgtgttgatgaccggcagcggctggcccgggagcgacgtgaggaacgggagaaacagctagctgcaagagaaatagtgtggttagaaagagaagagcgagccaggcagcactacgagaagcacctggaagagcggaagaagaggttggaggagcagaggcagaaggaggagcggaggagggctgctgtggaggagaagcggaggcagagacttgaggaggacaaagaacgccacgaagctgttgtacggcgcacaatggaaaggagccagaagccaaaacagaagcataaccgttggtcgtggggaggctctctccatgggagccctagcatccacagtgcagctcgccgcctgcagctcagcccatgggagagcagcgttgttaacagactcctgacgcccacacattcgttcctggccagaagtaaaagcacagctgccttgtctggagaagcagcatcttgcagccccatcatcatgccctacaaagctgcacactctagaaattcgatggatcgaccaaaactctttgtaacaccacctgagggctcttctcgcaggaggatcattcatggcacagcgagctataaaaaagaaagagagagagaaaatgtactcttcctcacatctggcacccgaagggctgtatctccatctaatcccaaagcaagacaaccagctcgctcccgactttggcttccgtccaagtctcttcctcatttgcctggcacacccagaccgacatcctccttgccacccggctcagtcaaagctgctcctgctcaggtccggcccccatcccccggcaacatccgccctgtcaagagggaagtcaaagtggagcctgagaagaaagatcctgagaaggaacctcagaaagttgccaatgagccctcactaaagggcagagcacctttagtgaaggtagaagaagccacagttgaagagcggacacctgctgaaccagaagttggccctgctgctccagccatggccccagctccagcctcggccccagctccagcctcggccccagctccagccccggtccccaccccagccatggtctcagccccgtcatccactgtgaatgccagtgcttctgttaagacttctgcaggcaccaccgacccagaggaggccacaaggcttctagctgagaagaggcggctggcccgagagcagagagaaaaggaagaaagggagaggagggagcaggaagagcttgaaagacaaaagagagaggaattggctcaacgtgtggctgaagagaggacgactcgccgtgaggaggagtcgcgcaggctggaagccgagcaggcccgggagaaggaggagcagctgcagcggcaggcggaggagcgggcgctgcgcgagcgggaggaggcagagcgcgcccagaggcagaaagaagaagaagctcgcgttcgtgaagaagcagagagggtccggcaggaacgagagaagcatttccagagagaagagcaagagcgcctggagagaaagaagcgacttgaggagattatgaaaagaaccaggagaacagaagctacagataagaaaaccagtgatcagagaaacggtgatatagccaagggagctctcactggaggaacagaggtgtctgcacttccatgtacaacaaacgctccgggaaatggaaagccagttggcagcccacatgtggttacctcacaccagtcaaaagtgacagtggagagcactcccgatttggaaaaacaaccaaatgaaaatggtgtatctgttcagaatgaaaattttgaagaaattataaacttacccattggatctaaaccatccagattagatgtcaccaacagtgagagcccagaaattcctttgaatccaattttggcctttgatgatgaagggacacttgggcccctgcctcaggtagatggtgttcagacacagcagactgcagaagttatatgagtgtttcttctgaagaaccaaagctgaaatttaatgagaatttctacaattaatggaattcctttcctgctataaaggagcatcccctccacccgttttctagagttcttgaccatcattttgaaaagatttattaaaactagctaaagacaacagactggatagcttttctaataattttcatcaataggaaaaaagaaatacgtctcattcttcaatactttaaaatggctttttccagtgtgctccttcttagcaatcaatatttttctgcattctttaaaagacaagagaatttggttataaaagaaatgggctgactaggcatgatttttttggtcttaaaagcttaacatgtaaaattggcaaaaaaaattttttaccttttataatacttgaaaaataagta

SEQ ID NO: 153966 - DNA, 3119 bp, Homo sapiens
  Payload ID: 10265
  Gene Symbol: MAP7
  Gene Name: microtubule-associated protein 7
  Uniprot ID: Q14244
  ENST ID: ENST00000454590
  CDS Start-End: 119-2434
atatcatattttcccctctctgctgtgggctgaatattttactgtgtggtagcaggaagaagattggaaaaaggtgctgcagcaggaagaagctgggatctgattgaacagcagcggtatgcctggatcagctacagctctccgacatgagagactgaagaagaccaatgcaaggccaattcctcttggtttattcaccattaatgaggaagacgaacagcaaaagaatggaaattccagaagaccaaaagcacccgacagctacaaagtgcaagataagaaaaatgcctccagccgccctgcctctgcaatttcaggacaaaataacaaccactcaggaaataaaccagaccctccgcctgtgttacgtgttgatgaccggcagcggctggcccgggagcgacgtgaggaacgggagaaacagctagctgcaagagaaatagtgtggttagaaagagaagagcgagccaggcagcactacgagaagcacctggaagagcggaagaagaggttggaggagcagaggcagaaggaggagcggaggagggctgctgtggaggagaagcggaggcagagacttgaggaggacaaagaacgccacgaagctgttgtacggcgcacaatggaaaggagccagaagccaaaacagaagcataaccgttggtcgtggggaggctctctccatgggagccctagcatccacagtgcagatccagacaggcggtcagtttccaccatgaatctttcgaaatatgttgatcccgtcattagcaagcggctctcctcttcatctgcaactttactaaattctccagatagagctcgccgcctgcagctcagcccatgggagagcagcgttgttaacagactcctgacgcccacacattcgttcctggccagaagtaaaagcacagctgccttgtctggagaagcagcatcttgcagccccatcatcatgccctacaaagctgcacactctagaaattcgatggatcgaccaaaactctttgtaacaccacctgagggctcttctcgcaggaggatcattcatggcacagcgagctataaaaaagaaagagagagagaaaatgtactcttcctcacatctggcacccgaagggctgtatctccatctaatcccaaagcaagacaaccagctcgctcccgactttggcttccgtccaagtctcttcctcatttgcctggcacacccagaccgacatcctccttgccacccggctcagtcaaagctgctcctgctcaggtccggcccccatcccccggcaacatccgccctgtcaagagggaagtcaaagtggagcctgagaagaaagatcctgagaaggaacctcagaaagttgccaatgagccctcactaaagggcagagcacctttagtgaaggtagaagaagccacagttgaagagcggacacctgctgaaccagaagttggccctgctgctccagccatggccccagctccagcctcggccccagctccagcctcggccccagctccagccccggtccccaccccagccatggtctcagccccgtcatccactgtgaatgccagtgcttctgttaagacttctgcaggcaccaccgacccagaggaggccacaaggcttctagctgagaagaggcggctggcccgagagcagagagaaaaggaagaaagggagaggagggagcaggaagagcttgaaagacaaaagagagaggaattggctcaacgtgtggctgaagagaggacgactcgccgtgaggaggagtcgcgcaggctggaagccgagcaggcccgggagaaggaggagcagctgcagcggcaggcggaggagcgggcgctgcgcgagcgggaggaggcagagcgcgcccagaggcagaaagaagaagaagctcgcgttcgtgaagaagcagagagggtccggcaggaacgagagaagcatttccagagagaagagcaagagcgcctggagagaaagaagcgacttgaggagattatgaaaagaaccaggagaacagaagctacagataagaaaaccagtgatcagagaaacggtgatatagccaagggagctctcactggaggaacagaggtgtctgcacttccatgtacaacaaacgctccgggaaatggaaagccagttggcagcccacatgtggttacctcacaccagtcaaaagtgacagtggagagcactcccgatttggaaaaacaaccaaatgaaaatggtgtatctgttcagaatgaaaattttgaagaaattataaacttacccattggatctaaaccatccagattagatgtcaccaacagtgagagcccagaaattcctttgaatccaattttggcctttgatgatgaagggacacttgggcccctgcctcaggtagatggtgttcagacacagcagactgcagaagttatatgagtgtttcttctgaagaaccaaagctgaaatttaatgagaatttctacaattaatggaattcctttcctgctataaaggagcatcccctccacccgttttctagagttcttgaccatcattttgaaaagatttattaaaactagctaaagacaacagactggatagcttttctaataattttcatcaataggaaaaaagaaatacgtctcattcttcaatactttaaaatggctttttccagtgtgctccttcttagcaatcaatatttttctgcattctttaaaagacaagagaatttggttataaaagaaatgggctgactaggcatgatttttttggtcttaaaagcttaacatgtaaaattggcaaaaaaaattttttaccttttataatacttgaaaaataagtacctctttgttctacaagtagaatgaataggagaagagtttaagcctgtttttttaaaatattattgcaaagagctctatttgtagaagcaaattataggcagattaccaggttcttataaatacagcttgtacatggacattctgcaaacccagctgtcacatttttcttgcaactccttttgcaaaagcagactaaaatgttttaaaatgtgaaaaaacattattttttcaaagcaagaaaataatttactgccctcttacataatgtatttata

SEQ ID NO: 153967 - DNA, 4375 bp, Homo sapiens
  Payload ID: 10265
  Gene Symbol: MAP7
  Gene Name: microtubule-associated protein 7
  Uniprot ID: Q14244
  ENST ID: ENST00000432797
  CDS Start-End: 617-2428
gtaaccctctgctggtgagttcccagaacccagcatcctgcaagctgccgcttctcagctggggagatggagccgctctgggcccttcttgattaggatatgttagggttgtcagggcaactgttaacggcagcatatcatattttcccctctctgctgtgggctgaatattttactgtgtggtagcaggaagaagattggaaaaaggtgctgcagcaggaagaagctgggatctgattgaacagcacccgacagctacaaagtgcaagataagaaaaatgcctccagccgccctgcctctgcaatttcaggacaaaataacaaccactcaggaaataaaccagaccctccgcctgtgttacgtgttgatgaccggcagcggctggcccgggagcgacgtgaggaacgggagaaacagctagctgcaagagaaatagtgtggttagaaagagaagagcgagccaggcagcactacgagaagcacctggaagagcggaagaagaggttggaggagcagaggcagaaggaggagcggaggagggctgctgtggaggagaagcggaggcagagacttgaggaggacaaagaacgccacgaagctgttgtacggcgcacaatggaaaggagccagaagccaaaacagaagcataaccgttggtcgtggggaggctctctccatgggagccctagcatccacagtgcagatccagacaggcggtcagtttccaccatgaatctttcgaaatatgttgatcccgtcattagcaagcggctctcctcttcatctgcaactttactaaattctccagatagagctcgccgcctgcagctcagcccatgggagagcagcgttgttaacagactcctgacgcccacacattcgttcctggccagaagtaaaagcacagctgccttgtctggagaagcagcatcttgcagccccatcatcatgccctacaaagctgcacactctagaaattcgatggatcgaccaaaactctttgtaacaccacctgagggctcttctcgcaggaggatcattcatggcacagcgagctataaaaaagaaagagagagagaaaatgtactcttcctcacatctggcacccgaagggctgtatctccatctaatcccaaagcaagacaaccagctcgctcccgactttggcttccgtccaagtctcttcctcatttgcctggcacacccagaccgacatcctccttgccacccggctcagtcaaagctgctcctgctcaggtccggcccccatcccccggcaacatccgccctgtcaagagggaagtcaaagtggagcctgagaagaaagatcctgagaaggaacctcagaaagttgccaatgagccctcactaaagggcagagcacctttagtgaaggtagaagaagccacagttgaagagcggacacctgctgaaccagaagttggccctgctgctccagccatggccccagctccagcctcggccccagctccagcctcggccccagctccagccccggtccccaccccagccatggtctcagccccgtcatccactgtgaatgccagtgcttctgttaagacttctgcaggcaccaccgacccagaggaggccacaaggcttctagctgagaagaggcggctggcccgagagcagagagaaaaggaagaaagggagaggagggagcaggaagagcttgaaagacaaaagagagaggaattggctcaacgtgtggctgaagagaggacgactcgccgtgaggaggagtcgcgcaggctggaagccgagcaggcccgggagaaggaggagcagctgcagcggcaggcggaggagcgggcgctgcgcgagcgggaggaggcagagcgcgcccagaggcagaaagaagaagaagctcgcgttcgtgaagaagcagagagggtccggcaggaacgagagaagcatttccagagagaagagcaagagcgcctggagagaaagaagcgacttgaggagattatgaaaagaaccaggagaacagaagctacagataagaaaaccagtgatcagagaaacggtgatatagccaagggagctctcactggaggaacagaggtgtctgcacttccatgtacaacaaacgctccgggaaatggaaagccagttggcagcccacatgtggttacctcacaccagtcaaaagtgacagtggagagcactcccgatttggaaaaacaaccaaatgaaaatggtgtatctgttcagaatgaaaattttgaagaaattataaacttacccattggatctaaaccatccagattagatgtcaccaacagtgagagcccagaaattcctttgaatccaattttggcctttgatgatgaagggacacttgggcccctgcctcaggtagatggtgttcagacacagcagactgcagaagttatatgagtgtttcttctgaagaaccaaagctgaaatttaatgagaatttctacaattaatggaattcctttcctgctataaaggagcatcccctccacccgttttctagagttcttgaccatcattttgaaaagatttattaaaactagctaaagacaacagactggatagcttttctaataattttcatcaataggaaaaaagaaatacgtctcattcttcaatactttaaaatggctttttccagtgtgctccttcttagcaatcaatatttttctgcattctttaaaagacaagagaatttggttataaaagaaatgggctgactaggcatgatttttttggtcttaaaagcttaacatgtaaaattggcaaaaaaaattttttaccttttataatacttgaaaaataagtacctctttgttctacaagtagaatgaataggagaagagtttaagcctgtttttttaaaatattattgcaaagagctctatttgtagaagcaaattataggcagattaccaggttcttataaatacagcttgtacatggacattctgcaaacccagctgtcacatttttcttgcaactccttttgcaaaagcagactaaaatgttttaaaatgtgaaaaaacattattttttcaaagcaagaaaataatttactgccctcttacataatgtatttataaagtttttccagataaactaatcaaataaattagaataatgtgacaacattacaaatttaatttgttagctgcattccttctgatgttaccacgatagaatgttactgatgattcagggctatttctgaagtctgtatgttgctgctgtccccagtgatggtggacttatctttgccttacctgatcacaaattatgttggggaaaataaagatttaatatttctttaaatagaaaaagaatttggttttgctcgtttaagagcaatgagaaaatgatggaatgttgactgtgtttggcacacaggacacggaccttcatggaagtccttgctctgcgtggcatctgtcagcttttcacctttcattcttattcttcacttttgctgctgagcctagctgtacaaacttgcactttcatttgctaatataaattcagttttattttaccattttagagactactaatgattaaatgtagaaggagagggtgcacatgtttttatgtggagtgtttaaaagataaatttataccactgtaatgtgcagcttttattaaaagagaaattggttgaactgctaggttgaatgagagacttcatctattggactattttttttaatccaggcatatggtctttagtaatggcttgtaatttgtgaaaacattaatttgggggttttccctgttttcagttgtccatgtacacatagtcattatattagaaaagaaatctgttcaacaaacttgtttaatttgtttaaatcaacatagcatgaaacaccaaataaaatgtttgacatagttttacttttagctttctcatatgttataacttcactcagattgattcttgagtcttcagattgtccttcatttaactcagtgacattttcctagcctcctgttgattaagcatataggatagccttatttaaaatttagagcagtaggtgtattttggctgtttttctttttcatgtgtgtttttaaactttagtcatcattagcaaacggaaagccttctaagtaatcaagttttaattagaagtggtgcaaaattcttaattatattgtgttaaagagcagcgctgccagagaatgaccctgacctttacaatggctggcttgctttttggccagcactggaaaaatctatatttacttgcagaccttaaggaggtcttcagtattcaccctacattaaggggagcgctcaggaatcaaatatggccctcagtatgaaatgagagtgaatgggct

SEQ ID NO: 153968 - DNA, 2744 bp, Homo sapiens
  Payload ID: 10265
  Gene Symbol: MAP7
  Gene Name: microtubule-associated protein 7
  Uniprot ID: Q14244
  ENST ID: ENST00000544465
  CDS Start-End: 94-2298
gatatttggtctttgcctggctgagggacacaaagcaagaagagggagacatgcagatatgttgcaggatattcaagaaagaaggattttagcatggaagacactaaactgtactcacccgacagctacaaagtgcaagataagaaaaatgcctccagccgccctgcctctgcaatttcaggacaaaataacaaccactcaggaaataaaccagaccctccgcctgtgttacgtgttgatgaccggcagcggctggcccgggagcgacgtgaggaacgggagaaacagctagctgcaagagaaatagtgtggttagaaagagaagagcgagccaggcagcactacgagaagcacctggaagagcggaagaagaggttggaggagcagaggcagaaggaggagcggaggagggctgctgtggaggagaagcggaggcagagacttgaggaggacaaagaacgccacgaagctgttgtacggcgcacaatggaaaggagccagaagccaaaacagaagcataaccgttggtcgtggggaggctctctccatgggagccctagcatccacagtgcagatccagacaggcggtcagtttccaccatgaatctttcgaaatatgttgatcccgtcattagcaagcggctctcctcttcatctgcaactttactaaattctccagatagagctcgccgcctgcagctcagcccatgggagagcagcgttgttaacagactcctgacgcccacacattcgttcctggccagaagtaaaagcacagctgccttgtctggagaagcagcatcttgcagccccatcatcatgccctacaaagctgcacactctagaaattcgatggatcgaccaaaactctttgtaacaccacctgagggctcttctcgcaggaggatcattcatggcacagcgagctataaaaaagaaagagagagagaaaatgtactcttcctcacatctggcacccgaagggctgtatctccatctaatcccaaagcaagacaaccagctcgctcccgactttggcttccgtccaagtctcttcctcatttgcctggcacacccagaccgacatcctccttgccacccggctcagtcaaagctgctcctgctcaggtccggcccccatcccccggcaacatccgccctgtcaagagggaagtcaaagtggagcctgagaagaaagatcctgagaaggaacctcagaaagttgccaatgagccctcactaaagggcagagcacctttagtgaaggtagaagaagccacagttgaagagcggacacctgctgaaccagaagttggccctgctgctccagccatggccccagctccagcctcggccccagctccagcctcggccccagctccagccccggtccccaccccagccatggtctcagccccgtcatccactgtgaatgccagtgcttctgttaagacttctgcaggcaccaccgacccagaggaggccacaaggcttctagctgagaagaggcggctggcccgagagcagagagaaaaggaagaaagggagaggagggagcaggaagagcttgaaagacaaaagagagaggaattggctcaacgtgtggctgaagagaggacgactcgccgtgaggaggagtcgcgcaggctggaagccgagcaggcccgggagaaggaggagcagctgcagcggcaggcggaggagcgggcgctgcgcgagcgggaggaggcagagcgcgcccagaggcagaaagaagaagaagctcgcgttcgtgaagaagcagagagggtccggcaggaacgagagaagcatttccagagagaagagcaagagcgcctggagagaaagaagcgacttgaggagattatgaaaagaaccaggagaacagaagctacagataagaaaaccagtgatcagagaaacggtgatatagccaagggagctctcactggaggaacagaggtgtctgcacttccatgtacaacaaacgctccgggaaatggaaagccagttggcagcccacatgtggttacctcacaccagtcaaaagtgacagtggagagcactcccgatttggaaaaacaaccaaatgaaaatggtgtatctgttcagaatgaaaattttgaagaaattataaacttacccattggatctaaaccatccagattagatgtcaccaacagtgagagcccagaaattcctttgaatccaattttggcctttgatgatgaagggacacttgggcccctgcctcaggtagatggtgttcagacacagcagactgcagaagttatatgagtgtttcttctgaagaaccaaagctgaaatttaatgagaatttctacaattaatggaattcctttcctgctataaaggagcatcccctccacccgttttctagagttcttgaccatcattttgaaaagatttattaaaactagctaaagacaacagactggatagcttttctaataattttcatcaataggaaaaaagaaatacgtctcattcttcaatactttaaaatggctttttccagtgtgctccttcttagcaatcaatatttttctgcattctttaaaagacaagagaatttggttataaaagaaatgggctgactaggcatgatttttttggtcttaaaagcttaacatgtaaaattggcaaaaaaaattttttaccttttataatacttgaaaaataagtacctctttgttctacaagtagaatgaataggagaagag

SEQ ID NO: 153969 - DNA, 4536 bp, Homo sapiens
  Payload ID: 10265
  Gene Symbol: MAP7
  Gene Name: microtubule-associated protein 7
  ENST ID: ENST00000617204
  CDS Start-End: 250-2589
agtgggagggggctggtaggggaggtggggaagctgctgctaggtgaggggaactgcagggcctcagttgccaagtggctggtactatctgtcagctgtttgcaaactgtttacccataggggatctattacaagtgctcaaatgaacaggcagcttaggaactagcagcttcctgggagctgcaattacataagcatatatttttaatataatcacaattaaaaaaaaaaaaaacaagtagcagcggtatgcctggatcagctacagctctccgacatgagagactgaagaagaccaatgcaaggccaattcctcttggtttattcaccattaatgaggaagacgaacagcaaaagaatggaaattccagaagaccaaaagcacccgacagctacaaagtgcaagataagaaaaatgcctccagccgccctgcctctgcaatttcaggacaaaataacaaccactcaggaaataaaccagaccctccgcctgtgttacgtgttgatgaccggcagcggctggcccgggagcgacgtgaggaacgggagaaacagctagctgcaagagaaatagtgtggttagaaagagaagagcgagccaggcagcactacgagaagcacctggaagagcggaagaagaggttggaggagcagaggcagaaggaggagcggaggagggctgctgtggaggagaagcggaggcagagacttgaggaggacaaagaacgccacgaagctgttgtacggcgcacaatggaaaggagccagaagccaaaacagaagcataaccgttggtcgtggggaggctctctccatgggagccctagcatccacagtgcagatccagacaggcggtcagtttccaccatgaatctttcgaaatatgttgatcccgtcattagcaagcggctctcctcttcatctgcaactttactaaattctccagatagagctcgccgcctgcagctcagcccatgggagagcagcgttgttaacagactcctgacgcccacacattcgttcctggccagaagtaaaagcacagctgccttgtctggagaagcagttatccccatttgtcctcgttcagcatcttgcagccccatcatcatgccctacaaagctgcacactctagaaattcgatggatcgaccaaaactctttgtaacaccacctgagggctcttctcgcaggaggatcattcatggcacagcgagctataaaaaagaaagagagagagaaaatgtactcttcctcacatctggcacccgaagggctgtatctccatctaatcccaaagcaagacaaccagctcgctcccgactttggcttccgtccaagtctcttcctcatttgcctggcacacccagaccgacatcctccttgccacccggctcagtcaaagctgctcctgctcaggtccggcccccatcccccggcaacatccgccctgtcaagagggaagtcaaagtggagcctgagaagaaagatcctgagaaggaacctcagaaagttgccaatgagccctcactaaagggcagagcacctttagtgaaggtagaagaagccacagttgaagagcggacacctgctgaaccagaagttggccctgctgctccagccatggccccagctccagcctcggccccagctccagcctcggccccagctccagccccggtccccaccccagccatggtctcagccccgtcatccactgtgaatgccagtgcttctgttaagacttctgcaggcaccaccgacccagaggaggccacaaggcttctagctgagaagaggcggctggcccgagagcagagagaaaaggaagaaagggagaggagggagcaggaagagcttgaaagacaaaagagagaggaattggctcaacgtgtggctgaagagaggacgactcgccgtgaggaggagtcgcgcaggctggaagccgagcaggcccgggagaaggaggagcagctgcagcggcaggcggaggagcgggcgctgcgcgagcgggaggaggcagagcgcgcccagaggcagaaagaagaagaagctcgcgttcgtgaagaagcagagagggtccggcaggaacgagagaagcatttccagagagaagagcaagagcgcctggagagaaagaagcgacttgaggagattatgaaaagaaccaggagaacagaagctacagataagaaaaccagtgatcagagaaacggtgatatagccaagggagctctcactggaggaacagaggtgtctgcacttccatgtacaacaaacgctccgggaaatggaaagccagttggcagcccacatgtggttacctcacaccagtcaaaagtgacagtggagagcactcccgatttggaaaaacaaccaaatgaaaatggtgtatctgttcagaatgaaaattttgaagaaattataaacttacccattggatctaaaccatccagattagatgtcaccaacagtgagagcccagaaattcctttgaatccaattttggcctttgatgatgaagggacacttgggcccctgcctcaggtagatggtgttcagacacagcagactgcagaagttatatgagtgtttcttctgaagaaccaaagctgaaatttaatgagaatttctacaattaatggaattcctttcctgctataaaggagcatcccctccacccgttttctagagttcttgaccatcattttgaaaagatttattaaaactagctaaagacaacagactggatagcttttctaataattttcatcaataggaaaaaagaaatacgtctcattcttcaatactttaaaatggctttttccagtgtgctccttcttagcaatcaatatttttctgcattctttaaaagacaagagaatttggttataaaagaaatgggctgactaggcatgatttttttggtcttaaaagcttaacatgtaaaattggcaaaaaaaattttttaccttttataatacttgaaaaataagtacctctttgttctacaagtagaatgaataggagaagagtttaagcctgtttttttaaaatattattgcaaagagctctatttgtagaagcaaattataggcagattaccaggttcttataaatacagcttgtacatggacattctgcaaacccagctgtcacatttttcttgcaactccttttgcaaaagcagactaaaatgttttaaaatgtgaaaaaacattattttttcaaagcaagaaaataatttactgccctcttacataatgtatttataaagtttttccagataaactaatcaaataaattagaataatgtgacaacattacaaatttaatttgttagctgcattccttctgatgttaccacgatagaatgttactgatgattcagggctatttctgaagtctgtatgttgctgctgtccccagtgatggtggacttatctttgccttacctgatcacaaattatgttggggaaaataaagatttaatatttctttaaatagaaaaagaatttggttttgctcgtttaagagcaatgagaaaatgatggaatgttgactgtgtttggcacacaggacacggaccttcatggaagtccttgctctgcgtggcatctgtcagcttttcacctttcattcttattcttcacttttgctgctgagcctagctgtacaaacttgcactttcatttgctaatataaattcagttttattttaccattttagagactactaatgattaaatgtagaaggagagggtgcacatgtttttatgtggagtgtttaaaagataaatttataccactgtaatgtgcagcttttattaaaagagaaattggttgaactgctaggttgaatgagagacttcatctattggactattttttttaatccaggcatatggtctttagtaatggcttgtaatttgtgaaaacattaatttgggggttttccctgttttcagttgtccatgtacacatagtcattatattagaaaagaaatctgttcaacaaacttgtttaatttgtttaaatcaacatagcatgaaacaccaaataaaatgtttgacatagttttacttttagctttctcatatgttataacttcactcagattgattcttgagtcttcagattgtccttcatttaactcagtgacattttcctagcctcctgttgattaagcatataggatagccttatttaaaatttagagcagtaggtgtattttggctgtttttctttttcatgtgtgtttttaaactttagtcatcattagcaaacggaaagccttctaagtaatcaagttttaattagaagtggtgcaaaattcttaattatattgtgttaaagagcagcgctgccagagaatgaccctgacctttacaatggctggcttgctttttggccagcactggaaaaatctatatttacttgcagaccttaaggaggtcttcagtattcaccctacattaaggggagcgctcaggaatcaaatatggccctcagtatgaaatgagagtgaatgggct

SEQ ID NO: 153970 - DNA, 4497 bp, Homo sapiens
  Payload ID: 10265
  Gene Symbol: MAP7
  Gene Name: microtubule-associated protein 7
  Uniprot ID: Q14244
  ENST ID: ENST00000618822
  CDS Start-End: 412-2550
gggaaatagcgtctccgtaccctcgccccacctgggctgctcctcggaccgccgctcgtcccagactccaggaggcgccaccaggcctcgctgaccccgctccatatctccgggagccctcagctggtcggccgcggcgaccggaagctccggactgaggtactggttccgcccgccgctcttccagccgagactcggcagcggcggtcggagcggctgccacgccgcacctgcccgcgagggggcgcgccaggcccaggccgcagccgactgccgcgctctctgtccccgccctccgccatccccggactgcgctcacctgtctgggccgctggcctgggaggcgggggccggcgggagccaagccgaggaaagggcggagcggctctccgggcgcgtcatcggagcaccatggcggagctaggagctggcggcgacggccacaggggcggcgacggcgcagtgcgaagcgaaacagcacccgacagctacaaagtgcaagataagaaaaatgcctccagccgccctgcctctgcaatttcaggacaaaataacaaccactcaggaaataaaccagaccctccgcctgtgttacgtgttgatgaccggcagcggctggcccgggagcgacgtgaggaacgggagaaacagctagctgcaagagaaatagtgtggttagaaagagaagagcgagccaggcagcactacgagaagcacctggaagagcggaagaagaggttggaggagcagaggcagaaggaggagcggaggagggctgctgtggaggagaagcggaggcagagacttgaggaggacaaagaacgccacgaagctgttgtacggcgcacaatggaaaggagccagaagccaaaacagaagcataaccgttggtcgtggggaggctctctccatgggagccctagcatccacagtgcagctcgccgcctgcagctcagcccatgggagagcagcgttgttaacagactcctgacgcccacacattcgttcctggccagaagtaaaagcacagctgccttgtctggagaagcagcatcttgcagccccatcatcatgccctacaaagctgcacactctagaaattcgatggatcgaccaaaactctttgtaacaccacctgagggctcttctcgcaggaggatcattcatggcacagcgagctataaaaaagaaagagagagagaaaatgtactcttcctcacatctggcacccgaagggctgtatctccatctaatcccaaagcaagacaaccagctcgctcccgactttggcttccgtccaagtctcttcctcatttgcctggcacacccagaccgacatcctccttgccacccggctcagtcaaagctgctcctgctcaggtccggcccccatcccccggcaacatccgccctgtcaagagggaagtcaaagtggagcctgagaagaaagatcctgagaaggaacctcagaaagttgccaatgagccctcactaaagggcagagcacctttagtgaaggtagaagaagccacagttgaagagcggacacctgctgaaccagaagttggccctgctgctccagccatggccccagctccagcctcggccccagctccagcctcggccccagctccagccccggtccccaccccagccatggtctcagccccgtcatccactgtgaatgccagtgcttctgttaagacttctgcaggcaccaccgacccagaggaggccacaaggcttctagctgagaagaggcggctggcccgagagcagagagaaaaggaagaaagggagaggagggagcaggaagagcttgaaagacaaaagagagaggaattggctcaacgtgtggctgaagagaggacgactcgccgtgaggaggagtcgcgcaggctggaagccgagcaggcccgggagaaggaggagcagctgcagcggcaggcggaggagcgggcgctgcgcgagcgggaggaggcagagcgcgcccagaggcagaaagaagaagaagctcgcgttcgtgaagaagcagagagggtccggcaggaacgagagaagcatttccagagagaagagcaagagcgcctggagagaaagaagcgacttgaggagattatgaaaagaaccaggagaacagaagctacagataagaaaaccagtgatcagagaaacggtgatatagccaagggagctctcactggaggaacagaggtgtctgcacttccatgtacaacaaacgctccgggaaatggaaagccagttggcagcccacatgtggttacctcacaccagtcaaaagtgacagtggagagcactcccgatttggaaaaacaaccaaatgaaaatggtgtatctgttcagaatgaaaattttgaagaaattataaacttacccattggatctaaaccatccagattagatgtcaccaacagtgagagcccagaaattcctttgaatccaattttggcctttgatgatgaagggacacttgggcccctgcctcaggtagatggtgttcagacacagcagactgcagaagttatatgagtgtttcttctgaagaaccaaagctgaaatttaatgagaatttctacaattaatggaattcctttcctgctataaaggagcatcccctccacccgttttctagagttcttgaccatcattttgaaaagatttattaaaactagctaaagacaacagactggatagcttttctaataattttcatcaataggaaaaaagaaatacgtctcattcttcaatactttaaaatggctttttccagtgtgctccttcttagcaatcaatatttttctgcattctttaaaagacaagagaatttggttataaaagaaatgggctgactaggcatgatttttttggtcttaaaagcttaacatgtaaaattggcaaaaaaaattttttaccttttataatacttgaaaaataagtacctctttgttctacaagtagaatgaataggagaagagtttaagcctgtttttttaaaatattattgcaaagagctctatttgtagaagcaaattataggcagattaccaggttcttataaatacagcttgtacatggacattctgcaaacccagctgtcacatttttcttgcaactccttttgcaaaagcagactaaaatgttttaaaatgtgaaaaaacattattttttcaaagcaagaaaataatttactgccctcttacataatgtatttataaagtttttccagataaactaatcaaataaattagaataatgtgacaacattacaaatttaatttgttagctgcattccttctgatgttaccacgatagaatgttactgatgattcagggctatttctgaagtctgtatgttgctgctgtccccagtgatggtggacttatctttgccttacctgatcacaaattatgttggggaaaataaagatttaatatttctttaaatagaaaaagaatttggttttgctcgtttaagagcaatgagaaaatgatggaatgttgactgtgtttggcacacaggacacggaccttcatggaagtccttgctctgcgtggcatctgtcagcttttcacctttcattcttattcttcacttttgctgctgagcctagctgtacaaacttgcactttcatttgctaatataaattcagttttattttaccattttagagactactaatgattaaatgtagaaggagagggtgcacatgtttttatgtggagtgtttaaaagataaatttataccactgtaatgtgcagcttttattaaaagagaaattggttgaactgctaggttgaatgagagacttcatctattggactattttttttaatccaggcatatggtctttagtaatggcttgtaatttgtgaaaacattaatttgggggttttccctgttttcagttgtccatgtacacatagtcattatattagaaaagaaatctgttcaacaaacttgtttaatttgtttaaatcaacatagcatgaaacaccaaataaaatgtttgacatagttttacttttagctttctcatatgttataacttcactcagattgattcttgagtcttcagattgtccttcatttaactcagtgacattttcctagcctcctgttgattaagcatataggatagccttatttaaaatttagagcagtaggtgtattttggctgtttttctttttcatgtgtgtttttaaactttagtcatcattagcaaacggaaagccttctaagtaatcaagttttaattagaagtggtgcaaaattcttaattatattgtgttaaagagcagcgctgccagagaatgaccctgacctttacaatggctggcttgctttttggccagcactggaaaaatctatatttacttgcagaccttaaggaggtcttcagtattcaccctacattaaggggagcgctcaggaatcaaatatggccctcagtatgaaatgagagtgaatgggct

SEQ ID NO: 153971 - DNA, 2317 bp, Homo sapiens
  Payload ID: 10265
  Gene Symbol: MAP7
  Gene Name: microtubule-associated protein 7
  Uniprot ID: Q14244
  ENST ID: ENST00000611373
  CDS Start-End: 118-1929
atcctgctgcgctgccgctgagaggaagagggagctgcccagcggcctcacgctgtaaccctctgctgctcttctattccatctaaggaacgccacgaagctgttgtacggcgcacaatggaaaggagccagaagccaaaacagaagcataaccgttggtcgtggggaggctctctccatgggagccctagcatccacagtgcagatccagacaggcggtcagtttccaccatgaatctttcgaaatatgttgatcccgtcattagcaagcggctctcctcttcatctgcaactttactaaattctccagatagagctcgccgcctgcagctcagcccatgggagagcagcgttgttaacagactcctgacgcccacacattcgttcctggccagaagtaaaagcacagctgccttgtctggagaagcagcatcttgcagccccatcatcatgccctacaaagctgcacactctagaaattcgatggatcgaccaaaactctttgtaacaccacctgagggctcttctcgcaggaggatcattcatggcacagcgagctataaaaaagaaagagagagagaaaatgtactcttcctcacatctggcacccgaagggctgtatctccatctaatcccaaagcaagacaaccagctcgctcccgactttggcttccgtccaagtctcttcctcatttgcctggcacacccagaccgacatcctccttgccacccggctcagtcaaagctgctcctgctcaggtccggcccccatcccccggcaacatccgccctgtcaagagggaagtcaaagtggagcctgagaagaaagatcctgagaaggaacctcagaaagttgccaatgagccctcactaaagggcagagcacctttagtgaaggtagaagaagccacagttgaagagcggacacctgctgaaccagaagttggccctgctgctccagccatggccccagctccagcctcggccccagctccagcctcggccccagctccagccccggtccccaccccagccatggtctcagccccgtcatccactgtgaatgccagtgcttctgttaagacttctgcaggcaccaccgacccagaggaggccacaaggcttctagctgagaagaggcggctggcccgagagcagagagaaaaggaagaaagggagaggagggagcaggaagagcttgaaagacaaaagagagaggaattggctcaacgtgtggctgaagagaggacgactcgccgtgaggaggagtcgcgcaggctggaagccgagcaggcccgggagaaggaggagcagctgcagcggcaggcggaggagcgggcgctgcgcgagcgggaggaggcagagcgcgcccagaggcagaaagaagaagaagctcgcgttcgtgaagaagcagagagggtccggcaggaacgagagaagcatttccagagagaagagcaagagcgcctggagagaaagaagcgacttgaggagattatgaaaagaaccaggagaacagaagctacagataagaaaaccagtgatcagagaaacggtgatatagccaagggagctctcactggaggaacagaggtgtctgcacttccatgtacaacaaacgctccgggaaatggaaagccagttggcagcccacatgtggttacctcacaccagtcaaaagtgacagtggagagcactcccgatttggaaaaacaaccaaatgaaaatggtgtatctgttcagaatgaaaattttgaagaaattataaacttacccattggatctaaaccatccagattagatgtcaccaacagtgagagcccagaaattcctttgaatccaattttggcctttgatgatgaagggacacttgggcccctgcctcaggtagatggtgttcagacacagcagactgcagaagttatatgagtgtttcttctgaagaaccaaagctgaaatttaatgagaatttctacaattaatggaattcctttcctgctataaaggagcatcccctccacccgttttctagagttcttgaccatcattttgaaaagatttattaaaactagctaaagacaacagactggatagcttttctaataattttcatcaataggaaaaaagaaatacgtctcattcttcaatactttaaaatggctttttccagtgtgctccttcttagcaatcaatatttttctgcattctttaaaagacaagagaatttggttataaaagaaatgggctgactaggcatgatttttttggtcttaaaagcttaacatgtaaaattggcaaaaaaaattttttacctttt

SEQ ID NO: 153972 - DNA, 4326 bp, Homo sapiens
  Payload ID: 10265
  Gene Symbol: MAP7
  Gene Name: microtubule-associated protein 7
  Uniprot ID: Q14244
  ENST ID: ENST00000616617
  CDS Start-End: 412-2379
gggaaatagcgtctccgtaccctcgccccacctgggctgctcctcggaccgccgctcgtcccagactccaggaggcgccaccaggcctcgctgaccccgctccatatctccgggagccctcagctggtcggccgcggcgaccggaagctccggactgaggtactggttccgcccgccgctcttccagccgagactcggcagcggcggtcggagcggctgccacgccgcacctgcccgcgagggggcgcgccaggcccaggccgcagccgactgccgcgctctctgtccccgccctccgccatccccggactgcgctcacctgtctgggccgctggcctgggaggcgggggccggcgggagccaagccgaggaaagggcggagcggctctccgggcgcgtcatcggagcaccatggcggagctaggagctggcggcgacggccacaggggcggcgacggcgcagtgcgaagcgaaacagcacccgacagctacaaagtgcaagataagaaaaatgcctccagccgccctgcctctgcaatttcaggacaaaataacaaccactcaggaaataaaccagaccctccgcctgtgttacgtgttgatgaccggcagcggctggcccgggagcgacgtgaggaacgggagaaacagctagatccagacaggcggtcagtttccaccatgaatctttcgaaatatgttgatcccgtcattagcaagcggctctcctcttcatctgcaactttactaaattctccagatagagctcgccgcctgcagctcagcccatgggagagcagcgttgttaacagactcctgacgcccacacattcgttcctggccagaagtaaaagcacagctgccttgtctggagaagcagcatcttgcagccccatcatcatgccctacaaagctgcacactctagaaattcgatggatcgaccaaaactctttgtaacaccacctgagggctcttctcgcaggaggatcattcatggcacagcgagctataaaaaagaaagagagagagaaaatgtactcttcctcacatctggcacccgaagggctgtatctccatctaatcccaaagcaagacaaccagctcgctcccgactttggcttccgtccaagtctcttcctcatttgcctggcacacccagaccgacatcctccttgccacccggctcagtcaaagctgctcctgctcaggtccggcccccatcccccggcaacatccgccctgtcaagagggaagtcaaagtggagcctgagaagaaagatcctgagaaggaacctcagaaagttgccaatgagccctcactaaagggcagagcacctttagtgaaggtagaagaagccacagttgaagagcggacacctgctgaaccagaagttggccctgctgctccagccatggccccagctccagcctcggccccagctccagcctcggccccagctccagccccggtccccaccccagccatggtctcagccccgtcatccactgtgaatgccagtgcttctgttaagacttctgcaggcaccaccgacccagaggaggccacaaggcttctagctgagaagaggcggctggcccgagagcagagagaaaaggaagaaagggagaggagggagcaggaagagcttgaaagacaaaagagagaggaattggctcaacgtgtggctgaagagaggacgactcgccgtgaggaggagtcgcgcaggctggaagccgagcaggcccgggagaaggaggagcagctgcagcggcaggcggaggagcgggcgctgcgcgagcgggaggaggcagagcgcgcccagaggcagaaagaagaagaagctcgcgttcgtgaagaagcagagagggtccggcaggaacgagagaagcatttccagagagaagagcaagagcgcctggagagaaagaagcgacttgaggagattatgaaaagaaccaggagaacagaagctacagataagaaaaccagtgatcagagaaacggtgatatagccaagggagctctcactggaggaacagaggtgtctgcacttccatgtacaacaaacgctccgggaaatggaaagccagttggcagcccacatgtggttacctcacaccagtcaaaagtgacagtggagagcactcccgatttggaaaaacaaccaaatgaaaatggtgtatctgttcagaatgaaaattttgaagaaattataaacttacccattggatctaaaccatccagattagatgtcaccaacagtgagagcccagaaattcctttgaatccaattttggcctttgatgatgaagggacacttgggcccctgcctcaggtagatggtgttcagacacagcagactgcagaagttatatgagtgtttcttctgaagaaccaaagctgaaatttaatgagaatttctacaattaatggaattcctttcctgctataaaggagcatcccctccacccgttttctagagttcttgaccatcattttgaaaagatttattaaaactagctaaagacaacagactggatagcttttctaataattttcatcaataggaaaaaagaaatacgtctcattcttcaatactttaaaatggctttttccagtgtgctccttcttagcaatcaatatttttctgcattctttaaaagacaagagaatttggttataaaagaaatgggctgactaggcatgatttttttggtcttaaaagcttaacatgtaaaattggcaaaaaaaattttttaccttttataatacttgaaaaataagtacctctttgttctacaagtagaatgaataggagaagagtttaagcctgtttttttaaaatattattgcaaagagctctatttgtagaagcaaattataggcagattaccaggttcttataaatacagcttgtacatggacattctgcaaacccagctgtcacatttttcttgcaactccttttgcaaaagcagactaaaatgttttaaaatgtgaaaaaacattattttttcaaagcaagaaaataatttactgccctcttacataatgtatttataaagtttttccagataaactaatcaaataaattagaataatgtgacaacattacaaatttaatttgttagctgcattccttctgatgttaccacgatagaatgttactgatgattcagggctatttctgaagtctgtatgttgctgctgtccccagtgatggtggacttatctttgccttacctgatcacaaattatgttggggaaaataaagatttaatatttctttaaatagaaaaagaatttggttttgctcgtttaagagcaatgagaaaatgatggaatgttgactgtgtttggcacacaggacacggaccttcatggaagtccttgctctgcgtggcatctgtcagcttttcacctttcattcttattcttcacttttgctgctgagcctagctgtacaaacttgcactttcatttgctaatataaattcagttttattttaccattttagagactactaatgattaaatgtagaaggagagggtgcacatgtttttatgtggagtgtttaaaagataaatttataccactgtaatgtgcagcttttattaaaagagaaattggttgaactgctaggttgaatgagagacttcatctattggactattttttttaatccaggcatatggtctttagtaatggcttgtaatttgtgaaaacattaatttgggggttttccctgttttcagttgtccatgtacacatagtcattatattagaaaagaaatctgttcaacaaacttgtttaatttgtttaaatcaacatagcatgaaacaccaaataaaatgtttgacatagttttacttttagctttctcatatgttataacttcactcagattgattcttgagtcttcagattgtccttcatttaactcagtgacattttcctagcctcctgttgattaagcatataggatagccttatttaaaatttagagcagtaggtgtattttggctgtttttctttttcatgtgtgtttttaaactttagtcatcattagcaaacggaaagccttctaagtaatcaagttttaattagaagtggtgcaaaattcttaattatattgtgttaaagagcagcgctgccagagaatgaccctgacctttacaatggctggcttgctttttggccagcactggaaaaatctatatttacttgcagaccttaaggaggtcttcagtattcaccctacattaaggggagcgctcaggaatcaaatatggccctcagtatgaaatgagagtgaatgggct

SEQ ID NO: 153973 - DNA, 7333 bp, Homo sapiens
  Payload ID: 10266
  Gene Symbol: MAP9
  Gene Name: microtubule-associated protein 9
  Uniprot ID: Q49MG5
  ENST ID: ENST00000311277
  CDS Start-End: 265-2208
acttccttcgtctgggtggttgccccagcgacacgttgggccgaagagcggtgttgggtacccgagagacccggcggtggggaagtcacttcctcccgaagacgctgtttcctagcaaccgccctccgcctctgttattagcccctcctcctcgctcggtccaggaccggctctgcgggcgccgccaggcccagaccaagctactatcagaagttgaattctaataattagctattttataaaggtaacgagaaaaaatacactatgtctgatgaagtttttagcaccactttggcatatacaaagagtccaaaagttaccaaaagaactactttccaggatgagctaataagagcaattacagctcgctcagccagacaaaggagttctgaatactcagatgactttgacagtgatgagattgtttctttaggtgatttttctgacacttcagcagatgaaaattcagttaataaaaaaatgaatgactttcatatatcagatgatgaagaaaagaatccttcaaaactattgtttttgaaaaccaataaatcaaacggtaacataaccaaagatgagccagtgtgtgccatcaaaaatgaagaggaaatggcacctgatgggtgtgaagacattgttgtaaaatctttctctgaatctcaaaataaggatgaggaatttgaaaaagacaaaataaaaatgaaacctaaacccagaattctttcaattaaaagcacatcttcagcagaaaacaacagccttgacacagatgatcactttaaaccatcacctcggccaaggagtatgttgaaaaagaaaagtcacatggaggagaaggatggactagaagataaagaaactgccctcagtgaagaattggagttacattctgcaccttcttcccttccaacgccgaatggcatacaattagaagctgagaaaaaagcattctctgaaaaccttgatcctgaggattcatgcttaacaagtctagcatcatcatcacttaaacaaattcttggagattctttttcaccaggatctgagggaaacgcatctggaaaagatccaaatgaagaaatcactgaaaaccataattccttgaaatcagatgaaaataaagagaattcattttcagcagaccatgtgactactgcagttgagaaatccaaggaaagtcaagtgactgctgatgaccttgaagaagaaaaggcaaaagcggaactgattatggatgatgacagaacagttgatccactactatctaaatctcagagtatcttaatatctaccagtgcaacagcatcttcaaagaaaacaattgaagatagaaatataaagaataaaaagtcaacaaataatagagcatccagtgcatctgccagattaatgacctctgagtttttgaagaaatctagttctaaaaggagaactccatcgacaactacctcttctcactatttagggactttaaaagtcttggaccaaaaaccttcacagaaacagagcatagaacctgatagagcagataacataagggcagctgtttatcaggagtggttagaaaagaaaaatgtgtatttacatgaaatgcacagaataaaaagaattgaaagtgaaaacttaaggatccaaaatgaacagaaaaaagctgctaaaagagaagaagcattagcatcatttgaggcctggaaggctatgaaagaaaaggaagcaaagaaaatagctgccaaaaagaggcttgaagaaaaaaacaagaagaaaactgaagaagaaaatgctgcaagaaaaggagaagcactacaagcttttgaaaaatggaaagagaaaaagatggaatatcttaaagagaaaaatagaaaggagagagaatatgaaagagcaaagaaacagaaagaggaggaaactgttgccgagaaaaagaaagataatttaactgctgttgagaaatggaatgaaaaaaaggaagcttttttcaagcaaaaggaaaaagaaaaaataaatgagaaaagaaaggaagaactgaaaagagctgagaaaaaagataaagataaacaagctattaatgaatatgaaaaatggctggaaaataaggaaaaacaagaaagaattgaacgaaaacagaagaaacgtcattcctttcttgaaagtgaggcacttcctccgtggagccctccaagcagaactgtgttcgcaaaagtgttttgataattctagttcttacattatttggttatttatcggtttgccaatattagccatagatttaaaaccattcaattatttatagttagaggaatatattttaattaaatgccagacactcctgctgacaatgaaagaaatactttggaatgtaatcagtgaaagcatttttttgaactgtagataaactgcctcaaacaaagacctaataatcagattgtttttaccattaagatacataagattttatcatgtcctgataattcttatggtggagtgattcatgatctttttcattaagctctgtatgttatttaagtatatttaattccagtaataaaaaggaaatcatctaggtaccataatgatagaaattattccttttgtggatgattgtgaatctagattcaggtttttaaatgaagggtcgctgggaagtgcgcatatattattccttctgaaactgatgtttagctcaaagcagttgcatttgtactgtgctagttagaattttcatcagttgaggcagtagctcagtagaactctaatcatcaaggctttttatttaagaattttgccttatgttttaatatgagtgtactttatctgttccaggcttatgtgataatcataggtactttataatgagtccacctctgaaatttttctttctgaattctatctcactttattatttcagtgataccaaaagacatcaatgtcacagtagtgatatacttatgtattagttatggaaattccacaggagttcaaggtcattatcactataattattttcctgactaaagccataaaggtgatttaggcaattattgtcatcttagctagtcctgttttatagcttatattcagcagacagctgtatgggaaggtaaatatgttgacaatgtccacaaagcctttatttatttatttatttgatctctgcatgtcctcgtagtaactggtctcatacttgacctggtcatctggtttaagacagaccaagtgtatgctcacggagctgaaatgcattagtcagttgtgcaatgaggagatgatggatgagaatatatagttcctatttattgagcatctaatatataatctctactggacctttacaaatgtatttaacatctttacaacaacttttcagggtaggtgttaccggcttcatcttacatataaaaatactggcgctcagataaaccaagtaacttaccgtccatctggagtgtgcctgagttgagatcaaacgggattcagtacgtctgactgaatctgcctccttctgaaatctctatgctctttttcacacttctctgtagcctcagagactgccaagttctgtcaagacctctgcataatatcaacgttacaaacacgttttaacttttagagcctaaaatcatgtattgttatccaaagatgatctttctctacagaaatagctgcttgttcttagagatggtggaggtcattaaatctataaagtgagataaaaatccataagatttcatgagttactcaggcatcttataactactatcagaatatcagaaaactcagcaagttatgtgacaaaggctttgagatgatcactccagacgttccacatactgagcatcagccttcttgctgcagtgcatgtgcaagataagatgtcataggcagctttgtaagattgtatcagtgctatagacaattaagagaaatttcatagataaaactagaaccctttctatatggccagaactgtaatactttatgaaattgatctgattatcagcaatatgtagtatcagcatggaatttaggacctctcttactcattcctgtgtcccccatagtaccaaaaacagtgcctgccaaaatagattaaaagtgtttattgtattagctgtttagagctgaaaagatatttacaaattccagggaagtaaaaggaaaaaaactgaaaaaggtacagctacttttggggatgtgagatcatggatgtgtatcttatagatttcacattatttatttactttccattattttcttctacattatcatatttagtggctaaccattattacttcttaggttgttgtgagaaccgagttaattaatgtaaactatttgacacataataaggacttaaatgttcattgttgtcattattgatttattaccatgagccctacatttccccattcatgagtgtgcgaacattaacatagatagggttgataatggttatttgacattacacatttttaggaagaagaaatttctgtcttgctggccagtccaggctgtaacactcaaaaaaacaaaacaaaacaaaacaaaacaaaaaaacagaaagatgccttgtattagggccttcctaaaaagaaagctaagtaagtattaatttcttaggattgcttctgaggtaggatgaggtgtttgcatagacccaacaagtcattcacttcaaattttttttgtcttactatgataaataacatattatttcctgtttacagcaacctgcactgaaattaactagttgaataaaatcacctcttctagcacaaataaagctgagttcggggaggtgggtgaaaatacagtactgttgtttacttcctaagatccaagggagagaatcaagcttggtaatattctcttgaatatacatttacctatttaaaaggtatgattttcccatatttccttaggaagtatgtcatgtcaatatagatatttactcattaggtttacattaatttgtattataagggaatgtttaattcaaattaaggacattaaaagtatatagactttcatataaaagttccggttttataaattgcgttgatcacttaaagaatgcagagatctcaaagtaaagaaaacaaattttatgaatattttaaaacattacttaaaacaagtttccttagaaagcacatttgtggataaatttaaatattaatactaaataataaagtagtatacagaatttaaatttcataataatgaagaaagtggtaatgctatttaacttaaaagatgcaatatggcattttagatcaagaggttaaagttttcttaatgaaagaaagtaacgatttatgggataaaaatattccagtggtttgtatttgcttcatacttcaaaagtgttagtccatttattgtttaaagttatattgaaactgatattttcactgctgccaaagcagtacctgacagtagataggtatccacagtcttatgttccttagagttatagaactatgcctctgaaaggggttttaatactttaataaacctggcctaaactgttttatttctaagttgaagaaactgattgtcaagtactttgacttgtccaatctcatacaactaactatggtacatctagagttagatctcagtatcaggggtcccagttgtattctgctcaccattccacaatttcgatattgataaaactttcacactaacttttgaactgtggttattattaatttagttgattcatgtcctcttatttatctccttactcctccactgctgccttcataactgtccaccagatcaaagctatttgggtacctacactttaaagtgaggggaaataatgaagtttcttaaatcctgtgtcatggactaagatacaataaagaaaaggaatttcacaaagtaggggaaattacgtgttagttataatcattcccaagaataaactagtaaaagaaacttagatttccctaatttaatcttgactccgattttgatagtgctatataaaaaggtatttaaacccatatgcttccttttacataaaagaaagatatcaactttcctagtttgcatttacactggctaataggataataaaatgctgtgtaaatgttaaactggaagtttctctgagttatttttactttaaaatttcatgtgattatgccattttgaatatgtatattacatgtaattgtataatgttaactcgggtaggcaaaattcttggtattaaatttaggatgttttaaaaattattaagaagatattaatgtctgctttttgatagcatatattttcatgtaatgtttagtgtattaaaatcaaccattcaagatttattttattgggtgacactattgactgtgttccaaaatgcccatagtgttaggaaatgtggtgtgagttttatttgtgggctaaggataaaataatcatatgctaatataccttttattataaatgactaaaaatttggatataaaactgatgttttactacacaaattacagagagagataatataattatataattattaaataattagaaaatgcaaataagcaaaagtcacccatgttcccagttctcatctcctgaagatagttataactaacatattattttgtactcttcctgttaattagtttctagtgtactttctcctgtagctgaaattaagctgagaaaaaaggaagagatagttcctccctcctctttctctctcccactctgtctctctcctgtgctatctgtgtgtatatacaaatatgtatgcatatatatataatgatgtacataatatatataaaatacaaatactaatgtgcatattttcaaacatacacatattttttattatttgaaataagaatgagtcagactacatatttggtagccagatttttttcactcagtgatatatcatgaacatatttccatgctaatataattttctaataattttagatgctgtaactacaatttcattgttaatgggcaatttgttgctttacaaatggtaaattatatgataaataatatgatcattattcttgtagccaatatcattattagaaatgatggaccgcattaaagctataaaattaaataagaatttataaatgtaaggagttattcagacatcttgtatctagtattacaatatcagaaaactcagcaggttatatgacatatacactttgagatagtcactcagaggttttcacatacaggattaaccttgctgcagtgcgtgtgcaagattaaaaaagatgtcacgggtcactttgtaatgtcatatcgttgctgttgataaataaaggaaatgttataaataaaa

SEQ ID NO: 153974 - DNA, 1165 bp, Homo sapiens
  Payload ID: 10266
  Gene Symbol: MAP9
  Gene Name: microtubule-associated protein 9
  ENST ID: ENST00000379248
  CDS Start-End: 257-829
tcacttcctcccgaagacgctgtttcctagcaaccgccctccgcctctgttattagcccctcctcctcgctcggtccaggaccggctctgcgggcgccgccaggcccagaccaaggatgagctaataagagcaattacagctcgctcagccagacaaaggagttctgaatactcagatgactttgacagtgatgagattgtttctttaggtgatttttctgacacttcagcagatgaaaattcagttaataaaaaaatgaatgactttcatatatcagatgatgaagaaaagaatccttcaaaactattgtttttgaaaaccaataaatcaaacggtaacataaccaaagatgagccagtgtgtgccatcaaaaatgaagaggaaatggcacctgatgggtgtgaagacattgttgtaaaatctttctctgaatctcaaaataaggatgaggaatttgaaaaagacaaaataaaaatgaaacctaaacccagaattctttcaattaaaagcacatcttcagaaaacaacagccttgacacagatgatcactttaaaccatcacctcggccaaggagtatgttgaaaaagaaaagtcacatggaggagaaggatggactagaagataaagaaactgccctcagtgaagaattggagttacattctgcaccttcttcccttccaacgccgaatggcatacaattagaagctgagaaaaaagcattctctgaaaaccttgatcctgaggttagcactaccactaaactgttgaattgtgttcttgaatttatgcttttttatctgattatgaaaaagagaaggagagaatgaatttgtgtgcgtgtgtgtgtgttttacatactttcttctgcaactgataaggaaataatttttaaaaatacactgtattccaccgagtctaaaactgcatcaattgtaagacgtagcattattttacataccactaaggaagaaggaaatgcatccaattaaactataacacaccagtgattgtagagtttatccagttttagagaaagtaaaatgtcaaaaagtgttgcttttctgaatctatataatagtgtttatctttaataattttttaaatttatgtatctttgaattatgtaatttatggctaagaacaatatagtcagtgtcatttta

SEQ ID NO: 153975 - DNA, 1644 bp, Homo sapiens
  Payload ID: 10266
  Gene Symbol: MAP9
  Gene Name: microtubule-associated protein 9
  ENST ID: ENST00000433024
  CDS Start-End: 180-1644
tcacttcctcccgaagacgctgtttcctagcaaccgccctccgcctctgttattagcccctcctcctcgctcggtccaggaccggctctgcgggcgccgccaggcccagaccaagctactatcagaagttgaattctaataattagctattttataaaggtaacgagaaaaaatacactatgtctgatgaagtttttagcaccactttggcatatacaaagagtccaaaagttaccaaaagaactactttccaggatgagctaataagagcaattacagctcgctcagccagacaaaggagttctgaatactcagatgactttgacagtgatgagattgtttctttaggtgatttttctgacacttcagcagatgaaaattcagttaataaaaaaatgaatgactttcatatatcagatgatgaagaaaagaatccttcaaaactattgtttttgaaaaccaataaatcaaacggtaacataaccaaagatgagccagtgtgtgccatcaaaaatgaagaggaaatggcacctgatgggtgtgaagacattgttgtaaaatctttctctgaatctcaaaataaggatgaggaatttgaaaaagacaaaataaaaatgaaacctaaacccagaattctttcaattaaaagcacatcttcagaaaacaacagccttgacacagatgatcactttaaaccatcacctcggccaaggagtatgttgaaaaagaaaagtcacatggaggagaaggatggactagaagataaagaaactgccctcagtgaagaattggagttacattctgcaccttcttcccttccaacgccgaatggcatacaattagaagctgagaaaaaagcattctctgaaaaccttgatcctgaggattcatgcttaacaagtctagcatcatcatcacttaaacaaattcttggagattctttttcaccaggatctgagggaaacgcatctggaaaagatccaaatgaagaaatcactgaaaaccataattccttgaaatcagatgaaaataaagagaattcattttcagcagaccatgtgactactgcagttgagaaatccaaggaaagtcaagtgactgctgatgaccttgaagaagaaaaggcaaaagcggaactgattatggatgatgacagaacagttgatccactactatctaaatctcagagtatcttaatatctaccagtgcaacagcatcttcaaagaaaacaattgaagatagaaatataaagaataaaaagtcaacaaataatagagcatccagtgcatctgccagattaatgacctctgagtttttgaagaaatctagttctaaaaggagaactccatcgacaactacctcttctcactatttagggactttaaaagtcttggaccaaaaaccttcacagaaacagagcatagaacctgatagagcagataacataagggcagctgtttatcaggagtggttagaaaagaaaaatgtgtatttacatgaaatgcacagaataaaaagaattgaaagtgaaaacttaaggatccaaaatgaacagaaaaaagctgctaaaagagaagaagcattagcatcatttgaggcctggaaggctatgaaagaaaaggaagcaaagaaaatagctgcca

SEQ ID NO: 153976 - DNA, 560 bp, Homo sapiens
  Payload ID: 10266
  Gene Symbol: MAP9
  Gene Name: microtubule-associated protein 9
  ENST ID: ENST00000450097
  CDS Start-End: 468-560
agaccaaggtgagcagctcctacccgatgcttggctcttgattctcagggtcgcggagaactggccgcgggcgtccggggccgggaacagaaagcgggacctgggggccatgggggatccggacagagaccgcgcttggacgtgcacgggcctggcgttcgctggtgctcagcatacggcgcggtgaggagcggcgagcacccggacgtcacctggcctggtagggaacggaacccggggcgcacaacgctatgggcggccctgccaggcctctgctccgagtacgggaaaccgcgattttaatgcggctcatcgcgaaagcttcgtcgttttgtctggctctctttaacacttttgtgagaggaaaaattggcttgcaatacatctcgctggctgtttgcggctactatcagaagttgaattctaataattagctattttataaaggtaacgagaaaaaatacactatgtctgatgaagtttttagcaccactttggcatatacaaagagtccaaaagttaccaaaagaactactttccaggatgagctaataagagca

SEQ ID NO: 153977 - DNA, 1828 bp, Homo sapiens
  Payload ID: 10266
  Gene Symbol: MAP9
  Gene Name: microtubule-associated protein 9
  ENST ID: ENST00000424373
  CDS Start-End: 265-1395
acttccttcgtctgggtggttgccccagcgacacgttgggccgaagagcggtgttgggtacccgagagacccggcggtggggaagtcacttcctcccgaagacgctgtttcctagcaaccgccctccgcctctgttattagcccctcctcctcgctcggtccaggaccggctctgcgggcgccgccaggcccagaccaagctactatcagaagttgaattctaataattagctattttataaaggtaacgagaaaaaatacactatgtctgatgaagtttttagcaccactttggcatatacaaagagtccaaaagttaccaaaagaactactttccaggatgagctaataagagcaattacagctcgctcagccagacaaaggagttctgaatactcagatgactttgacagtgatgagattgtttctttaggtgatttttctgacacttcagcagatgaaaattcagttaataaaaaaatgaatgactttcatatatcagatgatgaagaaaagaatccttcaaaactattgtttttgaaaaccaataaatcaaacggtaacataaccaaagatgagccagtgtgtgccatcaaaaatgaagaggaaatggcacctgatgggtgtgaagacattgttgtaaaatctttctctgaatctcaaaataaggatgaggaatttgaaaaagacaaaataaaaatgaaacctaaacccagaattctttcaattaaaagcacatcttcagcagaaaacaacagccttgacacagatgatcactttaaaccatcacctcggccaaggagtatgttgaaaaagaaaagtcacatggaggagaaggatggactagaagataaagaaactgccctcagtgaagaattggagttacattctgcaccttcttcccttccaacgccgaatggcatacaattagaagctgagaaaaaagcattctctgaaaaccttgatcctgaggattcatgcttaacaagtctagcatcatcatcacttaaacaaattcttggagattctttttcaccaggatctgagggaaacgcatctggaaaagatccaaatgaagaaatcactgaaaaccataattccttgaaatcagatgaaaataaagagaattcattttcagcagaccatgtgactactgcagttgagaaatccaaggaaagtcaagtgactgctgatgaccttgaagaagaaaaggcaaaagcggaactgattatggatgatgacagaacagttgatccactactatctaaatctcagagtatcttaatatctaccagtgcaacagcatcttcaaagaaaacaattgaagatagaaatataaagaataaaaagtcaacaaataatagagcatccagtgcatctgccaggagtggttagaaaagaaaaatgtgtatttacatgaaatgcacagaataaaaagaattgaaagtgaaaacttaaggatccaaaatgaacagaaaaaagctgctaaaagagaagaagcattagcatcatttgaggcctggaaggctatgaaagaaaaggaagcaaagaaaatagctgccaaaaagaggcttgaagaaaaaaacaagaagaaaactgaagaagaaaatgctgcaagaaaaggagaagcactacaagcttttgaaaaatggaaagagaaaaagatggaatatcttaaagagaaaaatagaaaggagagagaatatgaaagagcaaagaaacagaaagaggaggaaactgttgccgagaaaaagaaagataatttaactgctgttgagaaatggaatgaaaaaaaggaagcttttttcaagcaaaaggaaaaagaaaa

SEQ ID NO: 153978 - DNA, 660 bp, Homo sapiens
  Payload ID: 10266
  Gene Symbol: MAP9
  Gene Name: microtubule-associated protein 9
  ENST ID: ENST00000503466
  CDS Start-End: 1-100
aaaaataaatgagaaaagaaaggaagaactgaaaagagctgagaaaaaagataaagataaacaagctattaatgaatatgaaaaatggctgatagaatagaaaaattgcccctgtataggagtctaatgacttcagttttcatggaaaacaacatctcaagctttttatatacaaactagtttgaacagtaagcatttggtgggtaattgctttaggggaaagttaatagccaaagatcaggtaagactaaaatatttttcttgccaattaccagattaattcatcattacctttagtaagaaaataagcaaaaagctcagttttccacaaataaatgtctgaaggactttttaacaaggttcttttaattactatcaaggtgactattgattcttttgaactgatattacagttaatataattgtctatttgctaccctggctttacagctccctgctagtaagatgaagcatatttcaagttactgccccctcatgttaagtgaaattacaaaaagagatttattcagtcaatttctgtggacacagtctggtcactgcttttcttccgcctagctagatggtctgtctctaaaatattaaaatgattgaagatgatctaattacagctttgcttttctcaattaaaattctgaaagg

SEQ ID NO: 153979 - DNA, 2044 bp, Homo sapiens
  Payload ID: 10266
  Gene Symbol: MAP9
  Gene Name: microtubule-associated protein 9
  ENST ID: ENST00000515654
  CDS Start-End: 131-2002
ttattagcccctcctcctcgctcggtccaggaccggctctgcgggcgccgccaggcccagaccaagctactatcagaagttgaattctaataattagctattttataaaggtaacgagaaaaaatacactatgtctgatgaagtttttagcaccactttggcatatacaaagagtccaaaagttaccaaaagaactactttccaggatgagctaataagagcaattacagctcgctcagccagacaaaggagttctgaatactcagatgactttgacagtgatgagattgtttctttaggtgatttttctgacacttcagcagatgaaaattcagttaataaaaaaatgaatgactttcatatatcagatgatgaagaaaagaatccttcaaaactattgtttttgaaaaccaataaatcaaacggtaacataaccaaagatgagccagtgtgtgccatcaaaaatgaagaggaaatggcacctgatgggtgtgaagacattgttgtaaaatctttctctgaatctcaaaataaggatgaggaatttgaaaaagacaaaataaaaatgaaacctaaacccagaattctttcaattaaaagcacatcttcagcagaaaacaacagccttgacacagatgatcactttaaaccatcacctcggccaaggagtatgttgaaaaagaaaagtcacatggaggagaaggatggactagaagataaagaaactgccctcagtgaagaattggagttacattctgcaccttcttcccttccaacgccgaatggcatacaattagaagctgagaaaaaagcattctctgaaaaccttgatcctgaggattcatgcttaacaagtctagcatcatcatcacttaaacaaattcttggagattctttttcaccaggatctgagggaaacgcatctggaaaagcagaccatgtgactactgcagttgagaaatccaaggaaagtcaagtgactgctgatgaccttgaagaagaaaaggcaaaagcggaactgattatggatgatgacagaacagttgatccactactatctaaatctcagagtatcttaatatctaccagtgcaacagcatcttcaaagaaaacaattgaagatagaaatataaagaataaaaagtcaacaaataatagagcatccagtgcatctgccagattaatgacctctgagtttttgaagaaatctagttctaaaaggagaactccatcgacaactacctcttctcactatttagggactttaaaagtcttggaccaaaaaccttcacagaaacagagcatagaacctgatagagcagataacataagggcagctgtttatcaggagtggttagaaaagaaaaatgtgtatttacatgaaatgcacagaataaaaagaattgaaagtgaaaacttaaggatccaaaatgaacagaaaaaagctgctaaaagagaagaagcattagcatcatttgaggcctggaaggctatgaaagaaaaggaagcaaagaaaatagctgccaaaaagaggcttgaagaaaaaaacaagaagaaaactgaagaagaaaatgctgcaagaaaaggagaagcactacaagcttttgaaaaatggaaagagaaaaagatggaatatcttaaagagaaaaatagaaaggagagagaatatgaaagagcaaagaaacagaaagaggaggaaactgttgccgagaaaaagaaagataatttaactgctgttgagaaatggaatgaaaaaaaggaagcttttttcaagcaaaaggaaaaagaaaaaataaatgagaaaagaaaggaagaactgaaaagagctgagaaaaaagataaagataaacaagctattaatgaatatgaaaaatggctggaaaataaggaaaaacaagaaagaattgaacgaaaacagaagaaacgtcattcctttcttgaaagtgaggcacttcctccgtggagccctccaagcagaactgtgttcgcaaaagtgttttgataattctagttcttacattatttggttatttatcggtttgcc

SEQ ID NO: 153980 - DNA, 6762 bp, Homo sapiens
  Payload ID: 10267
  Gene Symbol: MAPT
  Gene Name: microtubule-associated protein tau
  Uniprot ID: P10636
  ENST ID: ENST00000262410
  CDS Start-End: 323-2599
ggacggccgagcggcagggcgctcgcgcgcgcccactagtggccggaggagaaggctcccgcggaggccgcgctgcccgccccctcccctggggaggctcgcgttcccgctgctcgcgcctgcgccgcccgccggcctcaggaacgcgccctcttcgccggcgcgcgccctcgcagtcaccgccacccaccagctccggcaccaacagcagcgccgctgccaccgcccaccttctgccgccgccaccacagccaccttctcctcctccgctgtcctctcccgtcctcgcctctgtcgactatcaggtgaactttgaaccaggatggctgagccccgccaggagttcgaagtgatggaagatcacgctgggacgtacgggttgggggacaggaaagatcaggggggctacaccatgcaccaagaccaagagggtgacacggacgctggcctgaaagaatctcccctgcagacccccactgaggacggatctgaggaaccgggctctgaaacctctgatgctaagagcactccaacagcggaagatgtgacagcacccttagtggatgagggagctcccggcaagcaggctgccgcgcagccccacacggagatcccagaaggaaccacagctgaagaagcaggcattggagacacccccagcctggaagacgaagctgctggtcacgtgacccaagagcctgaaagtggtaaggtggtccaggaaggcttcctccgagagccaggccccccaggtctgagccaccagctcatgtccggcatgcctggggctcccctcctgcctgagggccccagagaggccacacgccaaccttcggggacaggacctgaggacacagagggcggccgccacgcccctgagctgctcaagcaccagcttctaggagacctgcaccaggaggggccgccgctgaagggggcagggggcaaagagaggccggggagcaaggaggaggtggatgaagaccgcgacgtcgatgagtcctccccccaagactcccctccctccaaggcctccccagcccaagatgggcggcctccccagacagccgccagagaagccaccagcatcccaggcttcccagcggagggtgccatccccctccctgtggatttcctctccaaagtttccacagagatcccagcctcagagcccgacgggcccagtgtagggcgggccaaagggcaggatgcccccctggagttcacgtttcacgtggaaatcacacccaacgtgcagaaggagcaggcgcactcggaggagcatttgggaagggctgcatttccaggggcccctggagaggggccagaggcccggggcccctctttgggagaggacacaaaagaggctgaccttccagagccctctgaaaagcagcctgctgctgctccgcgggggaagcccgtcagccgggtccctcaactcaaagctcgcatggtcagtaaaagcaaagacgggactggaagcgatgacaaaaaagccaagacatccacacgttcctctgctaaaaccttgaaaaataggccttgccttagccccaaacaccccactcctggtagctcagaccctctgatccaaccctccagccctgctgtgtgcccagagccaccttcctctcctaaatacgtctcttctgtcacttcccgaactggcagttctggagcaaaggagatgaaactcaagggggctgatggtaaaacgaagatcgccacaccgcggggagcagcccctccaggccagaagggccaggccaacgccaccaggattccagcaaaaaccccgcccgctccaaagacaccacccagctctggtgaacctccaaaatcaggggatcgcagcggctacagcagccccggctccccaggcactcccggcagccgctcccgcaccccgtcccttccaaccccacccacccgggagcccaagaaggtggcagtggtccgtactccacccaagtcgccgtcttccgccaagagccgcctgcagacagcccccgtgcccatgccagacctgaagaatgtcaagtccaagatcggctccactgagaacctgaagcaccagccgggaggcgggaaggtgcagataattaataagaagctggatcttagcaacgtccagtccaagtgtggctcaaaggataatatcaaacacgtcccgggaggcggcagtgtgcaaatagtctacaaaccagttgacctgagcaaggtgacctccaagtgtggctcattaggcaacatccatcataaaccaggaggtggccaggtggaagtaaaatctgagaagcttgacttcaaggacagagtccagtcgaagattgggtccctggacaatatcacccacgtccctggcggaggaaataaaaagattgaaacccacaagctgaccttccgcgagaacgccaaagccaagacagaccacggggcggagatcgtgtacaagtcgccagtggtgtctggggacacgtctccacggcatctcagcaatgtctcctccaccggcagcatcgacatggtagactcgccccagctcgccacgctagctgacgaggtgtctgcctccctggccaagcagggtttgtgatcaggcccctggggcggtcaataattgtggagaggagagaatgagagagtgtggaaaaaaaaagaataatgacccggcccccgccctctgcccccagctgctcctcgcagttcggttaattggttaatcacttaacctgcttttgtcactcggctttggctcgggacttcaaaatcagtgatgggagtaagagcaaatttcatctttccaaattgatgggtgggctagtaataaaatatttaaaaaaaaacattcaaaaacatggccacatccaacatttcctcaggcaattccttttgattcttttttcttccccctccatgtagaagagggagaaggagaggctctgaaagctgcttctgggggatttcaagggactgggggtgccaaccacctctggccctgttgtgggggtgtcacagaggcagtggcagcaacaaaggatttgaaacttggtgtgttcgtggagccacaggcagacgatgtcaaccttgtgtgagtgtgacgggggttggggtggggcgggaggccacgggggaggccgaggcaggggctgggcagaggggagaggaagcacaagaagtgggagtgggagaggaagccacgtgctggagagtagacatccccctccttgccgctgggagagccaaggcctatgccacctgcagcgtctgagcggccgcctgtccttggtggccgggggtgggggcctgctgtgggtcagtgtgccaccctctgcagggcagcctgtgggagaagggacagcgggtaaaaagagaaggcaagctggcaggagggtggcacttcgtggatgacctccttagaaaagactgaccttgatgtcttgagagcgctggcctcttcctccctccctgcagggtagggggcctgagttgaggggcttccctctgctccacagaaaccctgttttattgagttctgaaggttggaactgctgccatgattttggccactttgcagacctgggactttagggctaaccagttctctttgtaaggacttgtgcctcttgggagacgtccacccgtttccaagcctgggccactggcatctctggagtgtgtgggggtctgggaggcaggtcccgagccccctgtccttcccacggccactgcagtcaccccgtctgcgccgctgtgctgttgtctgccgtgagagcccaatcactgcctatacccctcatcacacgtcacaatgtcccgaattcccagcctcaccaccccttctcagtaatgaccctggttggttgcaggaggtacctactccatactgagggtgaaattaagggaaggcaaagtccaggcacaagagtgggaccccagcctctcactctcagttccactcatccaactgggaccctcaccacgaatctcatgatctgattcggttccctgtctcctcctcccgtcacagatgtgagccagggcactgctcagctgtgaccctaggtgtttctgccttgttgacatggagagagccctttcccctgagaaggcctggccccttcctgtgctgagcccacagcagcaggctgggtgtcttggttgtcagtggtggcaccaggatggaagggcaaggcacccagggcaggcccacagtcccgctgtcccccacttgcaccctagcttgtagctgccaacctcccagacagcccagcccgctgctcagctccacatgcatagtatcagccctccacacccgacaaaggggaacacacccccttggaaatggttcttttcccccagtcccagctggaagccatgctgtctgttctgctggagcagctgaacatatacatagatgttgccctgccctccccatctgcaccctgttgagttgtagttggatttgtctgtttatgcttggattcaccagagtgactatgatagtgaaaagaaaaaaaaaaaaaaaaaaggacgcatgtatcttgaaatgcttgtaaagaggtttctaacccaccctcacgaggtgtctctcacccccacactgggactcgtgtggcctgtgtggtgccaccctgctggggcctcccaagttttgaaaggctttcctcagcacctgggacccaacagagaccagcttctagcagctaaggaggccgttcagctgtgacgaaggcctgaagcacaggattaggactgaagcgatgatgtccccttccctacttccccttggggctccctgtgtcagggcacagactaggtcttgtggctggtctggcttgcggcgcgaggatggttctctctggtcatagcccgaagtctcatggcagtcccaaaggaggcttacaactcctgcatcacaagaaaaaggaagccactgccagctggggggatctgcagctcccagaagctccgtgagcctcagccacccctcagactgggttcctctccaagctcgccctctggaggggcagcgcagcctcccaccaagggccctgcgaccacagcagggattgggatgaattgcctgtcctggatctgctctagaggcccaagctgcctgcctgaggaaggatgacttgacaagtcaggagacactgttcccaaagccttgaccagagcacctcagcccgctgaccttgcacaaactccatctgctgccatgagaaaagggaagccgcctttgcaaaacattgctgcctaaagaaactcagcagcctcaggcccaattctgccacttctggtttgggtacagttaaaggcaaccctgagggacttggcagtagaaatccagggcctcccctggggctggcagcttcgtgtgcagctagagctttacctgaaaggaagtctctgggcccagaactctccaccaagagcctccctgccgttcgctgagtcccagcaattctcctaagttgaagggatctgagaaggagaaggaaatgtggggtagatttggtggtggttagagatatgcccccctcattactgccaacagtttcggctgcatttcttcacgcacctcggttcctcttcctgaagttcttgtgccctgctcttcagcaccatgggccttcttatacggaaggctctgggatctcccccttgtggggcaggctcttggggccagcctaagatcatggtttagggtgatcagtgctggcagataaattgaaaaggcacgctggcttgtgatcttaaatgaggacaatccccccagggctgggcactcctcccctcccctcacttctcccacctgcagagccagtgtccttgggtgggctagataggatatactgtatgccggctccttcaagctgctgactcactttatcaatagttccatttaaattgacttcagtggtgagactgtatcctgtttgctattgcttgttgtgctatggggggaggggggaggaatgtgtaagatagttaacatgggcaaagggagatcttggggtgcagcacttaaactgcctcgtaacccttttcatgatttcaaccacatttgctagagggagggagcagccacggagttagaggcccttggggtttctcttttccactgacaggctttcccaggcagctggctagttcattccctccccagccaggtgcaggcgtaggaatatggacatctggttgctttggcctgctgccctctttcaggggtcctaagcccacaatcatgcctccctaagaccttggcatccttccctctaagccgttggcacctctgtgccacctctcacactggctccagacacacagcctgtgcttttggagctgagatcactcgcttcaccctcctcatctttgttctccaagtaaagccacgaggtcggggcgagggcagaggtgatcacctgcgtgtcccatctacagacctgcagcttcataaaacttctgatttctcttcagctttgaaaagggttaccctgggcactggcctagagcctcacctcctaatagacttagccccatgagtttgccatgttgagcaggactatttctggcacttgcaagtcccatgatttcttcggtaattctgagggtggggggagggacatgaaatcatcttagcttagctttctgtctgtgaatgtctatatagtgtattgtgtgttttaacaaatgatttacactgactgttgctgtaaaagtgaatttggaaataaagttattactctgattaaa

SEQ ID NO: 153981 - DNA, 5811 bp, Homo sapiens
  Payload ID: 10267
  Gene Symbol: MAPT
  Gene Name: microtubule-associated protein tau
  Uniprot ID: P10636
  ENST ID: ENST00000351559
  CDS Start-End: 323-1648
ggacggccgagcggcagggcgctcgcgcgcgcccactagtggccggaggagaaggctcccgcggaggccgcgctgcccgccccctcccctggggaggctcgcgttcccgctgctcgcgcctgcgccgcccgccggcctcaggaacgcgccctcttcgccggcgcgcgccctcgcagtcaccgccacccaccagctccggcaccaacagcagcgccgctgccaccgcccaccttctgccgccgccaccacagccaccttctcctcctccgctgtcctctcccgtcctcgcctctgtcgactatcaggtgaactttgaaccaggatggctgagccccgccaggagttcgaagtgatggaagatcacgctgggacgtacgggttgggggacaggaaagatcaggggggctacaccatgcaccaagaccaagagggtgacacggacgctggcctgaaagaatctcccctgcagacccccactgaggacggatctgaggaaccgggctctgaaacctctgatgctaagagcactccaacagcggaagatgtgacagcacccttagtggatgagggagctcccggcaagcaggctgccgcgcagccccacacggagatcccagaaggaaccacagctgaagaagcaggcattggagacacccccagcctggaagacgaagctgctggtcacgtgacccaagctcgcatggtcagtaaaagcaaagacgggactggaagcgatgacaaaaaagccaagggggctgatggtaaaacgaagatcgccacaccgcggggagcagcccctccaggccagaagggccaggccaacgccaccaggattccagcaaaaaccccgcccgctccaaagacaccacccagctctggtgaacctccaaaatcaggggatcgcagcggctacagcagccccggctccccaggcactcccggcagccgctcccgcaccccgtcccttccaaccccacccacccgggagcccaagaaggtggcagtggtccgtactccacccaagtcgccgtcttccgccaagagccgcctgcagacagcccccgtgcccatgccagacctgaagaatgtcaagtccaagatcggctccactgagaacctgaagcaccagccgggaggcgggaaggtgcagataattaataagaagctggatcttagcaacgtccagtccaagtgtggctcaaaggataatatcaaacacgtcccgggaggcggcagtgtgcaaatagtctacaaaccagttgacctgagcaaggtgacctccaagtgtggctcattaggcaacatccatcataaaccaggaggtggccaggtggaagtaaaatctgagaagcttgacttcaaggacagagtccagtcgaagattgggtccctggacaatatcacccacgtccctggcggaggaaataaaaagattgaaacccacaagctgaccttccgcgagaacgccaaagccaagacagaccacggggcggagatcgtgtacaagtcgccagtggtgtctggggacacgtctccacggcatctcagcaatgtctcctccaccggcagcatcgacatggtagactcgccccagctcgccacgctagctgacgaggtgtctgcctccctggccaagcagggtttgtgatcaggcccctggggcggtcaataattgtggagaggagagaatgagagagtgtggaaaaaaaaagaataatgacccggcccccgccctctgcccccagctgctcctcgcagttcggttaattggttaatcacttaacctgcttttgtcactcggctttggctcgggacttcaaaatcagtgatgggagtaagagcaaatttcatctttccaaattgatgggtgggctagtaataaaatatttaaaaaaaaacattcaaaaacatggccacatccaacatttcctcaggcaattccttttgattcttttttcttccccctccatgtagaagagggagaaggagaggctctgaaagctgcttctgggggatttcaagggactgggggtgccaaccacctctggccctgttgtgggggtgtcacagaggcagtggcagcaacaaaggatttgaaacttggtgtgttcgtggagccacaggcagacgatgtcaaccttgtgtgagtgtgacgggggttggggtggggcgggaggccacgggggaggccgaggcaggggctgggcagaggggagaggaagcacaagaagtgggagtgggagaggaagccacgtgctggagagtagacatccccctccttgccgctgggagagccaaggcctatgccacctgcagcgtctgagcggccgcctgtccttggtggccgggggtgggggcctgctgtgggtcagtgtgccaccctctgcagggcagcctgtgggagaagggacagcgggtaaaaagagaaggcaagctggcaggagggtggcacttcgtggatgacctccttagaaaagactgaccttgatgtcttgagagcgctggcctcttcctccctccctgcagggtagggggcctgagttgaggggcttccctctgctccacagaaaccctgttttattgagttctgaaggttggaactgctgccatgattttggccactttgcagacctgggactttagggctaaccagttctctttgtaaggacttgtgcctcttgggagacgtccacccgtttccaagcctgggccactggcatctctggagtgtgtgggggtctgggaggcaggtcccgagccccctgtccttcccacggccactgcagtcaccccgtctgcgccgctgtgctgttgtctgccgtgagagcccaatcactgcctatacccctcatcacacgtcacaatgtcccgaattcccagcctcaccaccccttctcagtaatgaccctggttggttgcaggaggtacctactccatactgagggtgaaattaagggaaggcaaagtccaggcacaagagtgggaccccagcctctcactctcagttccactcatccaactgggaccctcaccacgaatctcatgatctgattcggttccctgtctcctcctcccgtcacagatgtgagccagggcactgctcagctgtgaccctaggtgtttctgccttgttgacatggagagagccctttcccctgagaaggcctggccccttcctgtgctgagcccacagcagcaggctgggtgtcttggttgtcagtggtggcaccaggatggaagggcaaggcacccagggcaggcccacagtcccgctgtcccccacttgcaccctagcttgtagctgccaacctcccagacagcccagcccgctgctcagctccacatgcatagtatcagccctccacacccgacaaaggggaacacacccccttggaaatggttcttttcccccagtcccagctggaagccatgctgtctgttctgctggagcagctgaacatatacatagatgttgccctgccctccccatctgcaccctgttgagttgtagttggatttgtctgtttatgcttggattcaccagagtgactatgatagtgaaaagaaaaaaaaaaaaaaaaaaggacgcatgtatcttgaaatgcttgtaaagaggtttctaacccaccctcacgaggtgtctctcacccccacactgggactcgtgtggcctgtgtggtgccaccctgctggggcctcccaagttttgaaaggctttcctcagcacctgggacccaacagagaccagcttctagcagctaaggaggccgttcagctgtgacgaaggcctgaagcacaggattaggactgaagcgatgatgtccccttccctacttccccttggggctccctgtgtcagggcacagactaggtcttgtggctggtctggcttgcggcgcgaggatggttctctctggtcatagcccgaagtctcatggcagtcccaaaggaggcttacaactcctgcatcacaagaaaaaggaagccactgccagctggggggatctgcagctcccagaagctccgtgagcctcagccacccctcagactgggttcctctccaagctcgccctctggaggggcagcgcagcctcccaccaagggccctgcgaccacagcagggattgggatgaattgcctgtcctggatctgctctagaggcccaagctgcctgcctgaggaaggatgacttgacaagtcaggagacactgttcccaaagccttgaccagagcacctcagcccgctgaccttgcacaaactccatctgctgccatgagaaaagggaagccgcctttgcaaaacattgctgcctaaagaaactcagcagcctcaggcccaattctgccacttctggtttgggtacagttaaaggcaaccctgagggacttggcagtagaaatccagggcctcccctggggctggcagcttcgtgtgcagctagagctttacctgaaaggaagtctctgggcccagaactctccaccaagagcctccctgccgttcgctgagtcccagcaattctcctaagttgaagggatctgagaaggagaaggaaatgtggggtagatttggtggtggttagagatatgcccccctcattactgccaacagtttcggctgcatttcttcacgcacctcggttcctcttcctgaagttcttgtgccctgctcttcagcaccatgggccttcttatacggaaggctctgggatctcccccttgtggggcaggctcttggggccagcctaagatcatggtttagggtgatcagtgctggcagataaattgaaaaggcacgctggcttgtgatcttaaatgaggacaatccccccagggctgggcactcctcccctcccctcacttctcccacctgcagagccagtgtccttgggtgggctagataggatatactgtatgccggctccttcaagctgctgactcactttatcaatagttccatttaaattgacttcagtggtgagactgtatcctgtttgctattgcttgttgtgctatggggggaggggggaggaatgtgtaagatagttaacatgggcaaagggagatcttggggtgcagcacttaaactgcctcgtaacccttttcatgatttcaaccacatttgctagagggagggagcagccacggagttagaggcccttggggtttctcttttccactgacaggctttcccaggcagctggctagttcattccctccccagccaggtgcaggcgtaggaatatggacatctggttgctttggcctgctgccctctttcaggggtcctaagcccacaatcatgcctccctaagaccttggcatccttccctctaagccgttggcacctctgtgccacctctcacactggctccagacacacagcctgtgcttttggagctgagatcactcgcttcaccctcctcatctttgttctccaagtaaagccacgaggtcggggcgagggcagaggtgatcacctgcgtgtcccatctacagacctgcagcttcataaaacttctgatttctcttcagctttgaaaagggttaccctgggcactggcctagagcctcacctcctaatagacttagccccatgagtttgccatgttgagcaggactatttctggcacttgcaagtcccatgatttcttcggtaattctgagggtggggggagggacatgaaatcatcttagcttagctttctgtctgtgaatgtctatatagtgtattgtgtgttttaacaaatgatttacactgactgttgctgtaaaagtgaatttggaaataaagttattactctgattaaa

SEQ ID NO: 153982 - DNA, 1107 bp, Homo sapiens
  Payload ID: 10267
  Gene Symbol: MAPT
  Gene Name: microtubule-associated protein tau
  Uniprot ID: P10636
  ENST ID: ENST00000334239
  CDS Start-End: 37-1095
cgcctctgtcgactatcaggtgaactttgaaccaggatggctgagccccgccaggagttcgaagtgatggaagatcacgctgggacgtacgggttgggggacaggaaagatcaggggggctacaccatgcaccaagaccaagagggtgacacggacgctggcctgaaagctgaagaagcaggcattggagacacccccagcctggaagacgaagctgctggtcacgtgacccaagctcgcatggtcagtaaaagcaaagacgggactggaagcgatgacaaaaaagccaagggggctgatggtaaaacgaagatcgccacaccgcggggagcagcccctccaggccagaagggccaggccaacgccaccaggattccagcaaaaaccccgcccgctccaaagacaccacccagctctggtgaacctccaaaatcaggggatcgcagcggctacagcagccccggctccccaggcactcccggcagccgctcccgcaccccgtcccttccaaccccacccacccgggagcccaagaaggtggcagtggtccgtactccacccaagtcgccgtcttccgccaagagccgcctgcagacagcccccgtgcccatgccagacctgaagaatgtcaagtccaagatcggctccactgagaacctgaagcaccagccgggaggcgggaaggtgcaaatagtctacaaaccagttgacctgagcaaggtgacctccaagtgtggctcattaggcaacatccatcataaaccaggaggtggccaggtggaagtaaaatctgagaagcttgacttcaaggacagagtccagtcgaagattgggtccctggacaatatcacccacgtccctggcggaggaaataaaaagattgaaacccacaagctgaccttccgcgagaacgccaaagccaagacagaccacggggcggagatcgtgtacaagtcgccagtggtgtctggggacacgtctccacggcatctcagcaatgtctcctccaccggcagcatcgacatggtagactcgccccagctcgccacgctagctgacgaggtgtctgcctccctggccaagcagggtttgtgatcaggcccctgg

SEQ ID NO: 153983 - DNA, 5724 bp, Homo sapiens
  Payload ID: 10267
  Gene Symbol: MAPT
  Gene Name: microtubule-associated protein tau
  Uniprot ID: P10636
  ENST ID: ENST00000340799
  CDS Start-End: 323-1561
ggacggccgagcggcagggcgctcgcgcgcgcccactagtggccggaggagaaggctcccgcggaggccgcgctgcccgccccctcccctggggaggctcgcgttcccgctgctcgcgcctgcgccgcccgccggcctcaggaacgcgccctcttcgccggcgcgcgccctcgcagtcaccgccacccaccagctccggcaccaacagcagcgccgctgccaccgcccaccttctgccgccgccaccacagccaccttctcctcctccgctgtcctctcccgtcctcgcctctgtcgactatcaggtgaactttgaaccaggatggctgagccccgccaggagttcgaagtgatggaagatcacgctgggacgtacgggttgggggacaggaaagatcaggggggctacaccatgcaccaagaccaagagggtgacacggacgctggcctgaaagaatctcccctgcagacccccactgaggacggatctgaggaaccgggctctgaaacctctgatgctaagagcactccaacagcggaagctgaagaagcaggcattggagacacccccagcctggaagacgaagctgctggtcacgtgacccaagctcgcatggtcagtaaaagcaaagacgggactggaagcgatgacaaaaaagccaagggggctgatggtaaaacgaagatcgccacaccgcggggagcagcccctccaggccagaagggccaggccaacgccaccaggattccagcaaaaaccccgcccgctccaaagacaccacccagctctggtgaacctccaaaatcaggggatcgcagcggctacagcagccccggctccccaggcactcccggcagccgctcccgcaccccgtcccttccaaccccacccacccgggagcccaagaaggtggcagtggtccgtactccacccaagtcgccgtcttccgccaagagccgcctgcagacagcccccgtgcccatgccagacctgaagaatgtcaagtccaagatcggctccactgagaacctgaagcaccagccgggaggcgggaaggtgcagataattaataagaagctggatcttagcaacgtccagtccaagtgtggctcaaaggataatatcaaacacgtcccgggaggcggcagtgtgcaaatagtctacaaaccagttgacctgagcaaggtgacctccaagtgtggctcattaggcaacatccatcataaaccaggaggtggccaggtggaagtaaaatctgagaagcttgacttcaaggacagagtccagtcgaagattgggtccctggacaatatcacccacgtccctggcggaggaaataaaaagattgaaacccacaagctgaccttccgcgagaacgccaaagccaagacagaccacggggcggagatcgtgtacaagtcgccagtggtgtctggggacacgtctccacggcatctcagcaatgtctcctccaccggcagcatcgacatggtagactcgccccagctcgccacgctagctgacgaggtgtctgcctccctggccaagcagggtttgtgatcaggcccctggggcggtcaataattgtggagaggagagaatgagagagtgtggaaaaaaaaagaataatgacccggcccccgccctctgcccccagctgctcctcgcagttcggttaattggttaatcacttaacctgcttttgtcactcggctttggctcgggacttcaaaatcagtgatgggagtaagagcaaatttcatctttccaaattgatgggtgggctagtaataaaatatttaaaaaaaaacattcaaaaacatggccacatccaacatttcctcaggcaattccttttgattcttttttcttccccctccatgtagaagagggagaaggagaggctctgaaagctgcttctgggggatttcaagggactgggggtgccaaccacctctggccctgttgtgggggtgtcacagaggcagtggcagcaacaaaggatttgaaacttggtgtgttcgtggagccacaggcagacgatgtcaaccttgtgtgagtgtgacgggggttggggtggggcgggaggccacgggggaggccgaggcaggggctgggcagaggggagaggaagcacaagaagtgggagtgggagaggaagccacgtgctggagagtagacatccccctccttgccgctgggagagccaaggcctatgccacctgcagcgtctgagcggccgcctgtccttggtggccgggggtgggggcctgctgtgggtcagtgtgccaccctctgcagggcagcctgtgggagaagggacagcgggtaaaaagagaaggcaagctggcaggagggtggcacttcgtggatgacctccttagaaaagactgaccttgatgtcttgagagcgctggcctcttcctccctccctgcagggtagggggcctgagttgaggggcttccctctgctccacagaaaccctgttttattgagttctgaaggttggaactgctgccatgattttggccactttgcagacctgggactttagggctaaccagttctctttgtaaggacttgtgcctcttgggagacgtccacccgtttccaagcctgggccactggcatctctggagtgtgtgggggtctgggaggcaggtcccgagccccctgtccttcccacggccactgcagtcaccccgtctgcgccgctgtgctgttgtctgccgtgagagcccaatcactgcctatacccctcatcacacgtcacaatgtcccgaattcccagcctcaccaccccttctcagtaatgaccctggttggttgcaggaggtacctactccatactgagggtgaaattaagggaaggcaaagtccaggcacaagagtgggaccccagcctctcactctcagttccactcatccaactgggaccctcaccacgaatctcatgatctgattcggttccctgtctcctcctcccgtcacagatgtgagccagggcactgctcagctgtgaccctaggtgtttctgccttgttgacatggagagagccctttcccctgagaaggcctggccccttcctgtgctgagcccacagcagcaggctgggtgtcttggttgtcagtggtggcaccaggatggaagggcaaggcacccagggcaggcccacagtcccgctgtcccccacttgcaccctagcttgtagctgccaacctcccagacagcccagcccgctgctcagctccacatgcatagtatcagccctccacacccgacaaaggggaacacacccccttggaaatggttcttttcccccagtcccagctggaagccatgctgtctgttctgctggagcagctgaacatatacatagatgttgccctgccctccccatctgcaccctgttgagttgtagttggatttgtctgtttatgcttggattcaccagagtgactatgatagtgaaaagaaaaaaaaaaaaaaaaaaggacgcatgtatcttgaaatgcttgtaaagaggtttctaacccaccctcacgaggtgtctctcacccccacactgggactcgtgtggcctgtgtggtgccaccctgctggggcctcccaagttttgaaaggctttcctcagcacctgggacccaacagagaccagcttctagcagctaaggaggccgttcagctgtgacgaaggcctgaagcacaggattaggactgaagcgatgatgtccccttccctacttccccttggggctccctgtgtcagggcacagactaggtcttgtggctggtctggcttgcggcgcgaggatggttctctctggtcatagcccgaagtctcatggcagtcccaaaggaggcttacaactcctgcatcacaagaaaaaggaagccactgccagctggggggatctgcagctcccagaagctccgtgagcctcagccacccctcagactgggttcctctccaagctcgccctctggaggggcagcgcagcctcccaccaagggccctgcgaccacagcagggattgggatgaattgcctgtcctggatctgctctagaggcccaagctgcctgcctgaggaaggatgacttgacaagtcaggagacactgttcccaaagccttgaccagagcacctcagcccgctgaccttgcacaaactccatctgctgccatgagaaaagggaagccgcctttgcaaaacattgctgcctaaagaaactcagcagcctcaggcccaattctgccacttctggtttgggtacagttaaaggcaaccctgagggacttggcagtagaaatccagggcctcccctggggctggcagcttcgtgtgcagctagagctttacctgaaaggaagtctctgggcccagaactctccaccaagagcctccctgccgttcgctgagtcccagcaattctcctaagttgaagggatctgagaaggagaaggaaatgtggggtagatttggtggtggttagagatatgcccccctcattactgccaacagtttcggctgcatttcttcacgcacctcggttcctcttcctgaagttcttgtgccctgctcttcagcaccatgggccttcttatacggaaggctctgggatctcccccttgtggggcaggctcttggggccagcctaagatcatggtttagggtgatcagtgctggcagataaattgaaaaggcacgctggcttgtgatcttaaatgaggacaatccccccagggctgggcactcctcccctcccctcacttctcccacctgcagagccagtgtccttgggtgggctagataggatatactgtatgccggctccttcaagctgctgactcactttatcaatagttccatttaaattgacttcagtggtgagactgtatcctgtttgctattgcttgttgtgctatggggggaggggggaggaatgtgtaagatagttaacatgggcaaagggagatcttggggtgcagcacttaaactgcctcgtaacccttttcatgatttcaaccacatttgctagagggagggagcagccacggagttagaggcccttggggtttctcttttccactgacaggctttcccaggcagctggctagttcattccctccccagccaggtgcaggcgtaggaatatggacatctggttgctttggcctgctgccctctttcaggggtcctaagcccacaatcatgcctccctaagaccttggcatccttccctctaagccgttggcacctctgtgccacctctcacactggctccagacacacagcctgtgcttttggagctgagatcactcgcttcaccctcctcatctttgttctccaagtaaagccacgaggtcggggcgagggcagaggtgatcacctgcgtgtcccatctacagacctgcagcttcataaaacttctgatttctcttcagctttgaaaagggttaccctgggcactggcctagagcctcacctcctaatagacttagccccatgagtttgccatgttgagcaggactatttctggcacttgcaagtcccatgatttcttcggtaattctgagggtggggggagggacatgaaatcatcttagcttagctttctgtctgtgaatgtctatatagtgtattgtgtgttttaacaaatgatttacactgactgttgctgtaaaagtgaatttggaaataaagttattactctgattaaa

SEQ ID NO: 153984 - DNA, 6816 bp, Homo sapiens
  Payload ID: 10267
  Gene Symbol: MAPT
  Gene Name: microtubule-associated protein tau
  Uniprot ID: P10636
  ENST ID: ENST00000344290
  CDS Start-End: 323-2653
ggacggccgagcggcagggcgctcgcgcgcgcccactagtggccggaggagaaggctcccgcggaggccgcgctgcccgccccctcccctggggaggctcgcgttcccgctgctcgcgcctgcgccgcccgccggcctcaggaacgcgccctcttcgccggcgcgcgccctcgcagtcaccgccacccaccagctccggcaccaacagcagcgccgctgccaccgcccaccttctgccgccgccaccacagccaccttctcctcctccgctgtcctctcccgtcctcgcctctgtcgactatcaggtgaactttgaaccaggatggctgagccccgccaggagttcgaagtgatggaagatcacgctgggacgtacgggttgggggacaggaaagatcaggggggctacaccatgcaccaagaccaagagggtgacacggacgctggcctgaaagaatctcccctgcagacccccactgaggacggatctgaggaaccgggctctgaaacctctgatgctaagagcactccaacagcggaagatgtgacagcacccttagtggatgagggagctcccggcaagcaggctgccgcgcagccccacacggagatcccagaaggaaccacagctgaagaagcaggcattggagacacccccagcctggaagacgaagctgctggtcacgtgacccaagagcctgaaagtggtaaggtggtccaggaaggcttcctccgagagccaggccccccaggtctgagccaccagctcatgtccggcatgcctggggctcccctcctgcctgagggccccagagaggccacacgccaaccttcggggacaggacctgaggacacagagggcggccgccacgcccctgagctgctcaagcaccagcttctaggagacctgcaccaggaggggccgccgctgaagggggcagggggcaaagagaggccggggagcaaggaggaggtggatgaagaccgcgacgtcgatgagtcctccccccaagactcccctccctccaaggcctccccagcccaagatgggcggcctccccagacagccgccagagaagccaccagcatcccaggcttcccagcggagggtgccatccccctccctgtggatttcctctccaaagtttccacagagatcccagcctcagagcccgacgggcccagtgtagggcgggccaaagggcaggatgcccccctggagttcacgtttcacgtggaaatcacacccaacgtgcagaaggagcaggcgcactcggaggagcatttgggaagggctgcatttccaggggcccctggagaggggccagaggcccggggcccctctttgggagaggacacaaaagaggctgaccttccagagccctctgaaaagcagcctgctgctgctccgcgggggaagcccgtcagccgggtccctcaactcaaagctcgcatggtcagtaaaagcaaagacgggactggaagcgatgacaaaaaagccaagacatccacacgttcctctgctaaaaccttgaaaaataggccttgccttagccccaaacaccccactcctggtagctcagaccctctgatccaaccctccagccctgctgtgtgcccagagccaccttcctctcctaaatacgtctcttctgtcacttcccgaactggcagttctggagcaaaggagatgaaactcaagggggctgatggtaaaacgaagatcgccacaccgcggggagcagcccctccaggccagaagggccaggccaacgccaccaggattccagcaaaaaccccgcccgctccaaagacaccacccagctctgcgactaagcaagtccagagaagaccaccccctgcagggcccagatctgagagaggtgaacctccaaaatcaggggatcgcagcggctacagcagccccggctccccaggcactcccggcagccgctcccgcaccccgtcccttccaaccccacccacccgggagcccaagaaggtggcagtggtccgtactccacccaagtcgccgtcttccgccaagagccgcctgcagacagcccccgtgcccatgccagacctgaagaatgtcaagtccaagatcggctccactgagaacctgaagcaccagccgggaggcgggaaggtgcagataattaataagaagctggatcttagcaacgtccagtccaagtgtggctcaaaggataatatcaaacacgtcccgggaggcggcagtgtgcaaatagtctacaaaccagttgacctgagcaaggtgacctccaagtgtggctcattaggcaacatccatcataaaccaggaggtggccaggtggaagtaaaatctgagaagcttgacttcaaggacagagtccagtcgaagattgggtccctggacaatatcacccacgtccctggcggaggaaataaaaagattgaaacccacaagctgaccttccgcgagaacgccaaagccaagacagaccacggggcggagatcgtgtacaagtcgccagtggtgtctggggacacgtctccacggcatctcagcaatgtctcctccaccggcagcatcgacatggtagactcgccccagctcgccacgctagctgacgaggtgtctgcctccctggccaagcagggtttgtgatcaggcccctggggcggtcaataattgtggagaggagagaatgagagagtgtggaaaaaaaaagaataatgacccggcccccgccctctgcccccagctgctcctcgcagttcggttaattggttaatcacttaacctgcttttgtcactcggctttggctcgggacttcaaaatcagtgatgggagtaagagcaaatttcatctttccaaattgatgggtgggctagtaataaaatatttaaaaaaaaacattcaaaaacatggccacatccaacatttcctcaggcaattccttttgattcttttttcttccccctccatgtagaagagggagaaggagaggctctgaaagctgcttctgggggatttcaagggactgggggtgccaaccacctctggccctgttgtgggggtgtcacagaggcagtggcagcaacaaaggatttgaaacttggtgtgttcgtggagccacaggcagacgatgtcaaccttgtgtgagtgtgacgggggttggggtggggcgggaggccacgggggaggccgaggcaggggctgggcagaggggagaggaagcacaagaagtgggagtgggagaggaagccacgtgctggagagtagacatccccctccttgccgctgggagagccaaggcctatgccacctgcagcgtctgagcggccgcctgtccttggtggccgggggtgggggcctgctgtgggtcagtgtgccaccctctgcagggcagcctgtgggagaagggacagcgggtaaaaagagaaggcaagctggcaggagggtggcacttcgtggatgacctccttagaaaagactgaccttgatgtcttgagagcgctggcctcttcctccctccctgcagggtagggggcctgagttgaggggcttccctctgctccacagaaaccctgttttattgagttctgaaggttggaactgctgccatgattttggccactttgcagacctgggactttagggctaaccagttctctttgtaaggacttgtgcctcttgggagacgtccacccgtttccaagcctgggccactggcatctctggagtgtgtgggggtctgggaggcaggtcccgagccccctgtccttcccacggccactgcagtcaccccgtctgcgccgctgtgctgttgtctgccgtgagagcccaatcactgcctatacccctcatcacacgtcacaatgtcccgaattcccagcctcaccaccccttctcagtaatgaccctggttggttgcaggaggtacctactccatactgagggtgaaattaagggaaggcaaagtccaggcacaagagtgggaccccagcctctcactctcagttccactcatccaactgggaccctcaccacgaatctcatgatctgattcggttccctgtctcctcctcccgtcacagatgtgagccagggcactgctcagctgtgaccctaggtgtttctgccttgttgacatggagagagccctttcccctgagaaggcctggccccttcctgtgctgagcccacagcagcaggctgggtgtcttggttgtcagtggtggcaccaggatggaagggcaaggcacccagggcaggcccacagtcccgctgtcccccacttgcaccctagcttgtagctgccaacctcccagacagcccagcccgctgctcagctccacatgcatagtatcagccctccacacccgacaaaggggaacacacccccttggaaatggttcttttcccccagtcccagctggaagccatgctgtctgttctgctggagcagctgaacatatacatagatgttgccctgccctccccatctgcaccctgttgagttgtagttggatttgtctgtttatgcttggattcaccagagtgactatgatagtgaaaagaaaaaaaaaaaaaaaaaaggacgcatgtatcttgaaatgcttgtaaagaggtttctaacccaccctcacgaggtgtctctcacccccacactgggactcgtgtggcctgtgtggtgccaccctgctggggcctcccaagttttgaaaggctttcctcagcacctgggacccaacagagaccagcttctagcagctaaggaggccgttcagctgtgacgaaggcctgaagcacaggattaggactgaagcgatgatgtccccttccctacttccccttggggctccctgtgtcagggcacagactaggtcttgtggctggtctggcttgcggcgcgaggatggttctctctggtcatagcccgaagtctcatggcagtcccaaaggaggcttacaactcctgcatcacaagaaaaaggaagccactgccagctggggggatctgcagctcccagaagctccgtgagcctcagccacccctcagactgggttcctctccaagctcgccctctggaggggcagcgcagcctcccaccaagggccctgcgaccacagcagggattgggatgaattgcctgtcctggatctgctctagaggcccaagctgcctgcctgaggaaggatgacttgacaagtcaggagacactgttcccaaagccttgaccagagcacctcagcccgctgaccttgcacaaactccatctgctgccatgagaaaagggaagccgcctttgcaaaacattgctgcctaaagaaactcagcagcctcaggcccaattctgccacttctggtttgggtacagttaaaggcaaccctgagggacttggcagtagaaatccagggcctcccctggggctggcagcttcgtgtgcagctagagctttacctgaaaggaagtctctgggcccagaactctccaccaagagcctccctgccgttcgctgagtcccagcaattctcctaagttgaagggatctgagaaggagaaggaaatgtggggtagatttggtggtggttagagatatgcccccctcattactgccaacagtttcggctgcatttcttcacgcacctcggttcctcttcctgaagttcttgtgccctgctcttcagcaccatgggccttcttatacggaaggctctgggatctcccccttgtggggcaggctcttggggccagcctaagatcatggtttagggtgatcagtgctggcagataaattgaaaaggcacgctggcttgtgatcttaaatgaggacaatccccccagggctgggcactcctcccctcccctcacttctcccacctgcagagccagtgtccttgggtgggctagataggatatactgtatgccggctccttcaagctgctgactcactttatcaatagttccatttaaattgacttcagtggtgagactgtatcctgtttgctattgcttgttgtgctatggggggaggggggaggaatgtgtaagatagttaacatgggcaaagggagatcttggggtgcagcacttaaactgcctcgtaacccttttcatgatttcaaccacatttgctagagggagggagcagccacggagttagaggcccttggggtttctcttttccactgacaggctttcccaggcagctggctagttcattccctccccagccaggtgcaggcgtaggaatatggacatctggttgctttggcctgctgccctctttcaggggtcctaagcccacaatcatgcctccctaagaccttggcatccttccctctaagccgttggcacctctgtgccacctctcacactggctccagacacacagcctgtgcttttggagctgagatcactcgcttcaccctcctcatctttgttctccaagtaaagccacgaggtcggggcgagggcagaggtgatcacctgcgtgtcccatctacagacctgcagcttcataaaacttctgatttctcttcagctttgaaaagggttaccctgggcactggcctagagcctcacctcctaatagacttagccccatgagtttgccatgttgagcaggactatttctggcacttgcaagtcccatgatttcttcggtaattctgagggtggggggagggacatgaaatcatcttagcttagctttctgtctgtgaatgtctatatagtgtattgtgtgttttaacaaatgatttacactgactgttgctgtaaaagtgaatttggaaataaagttattactctgattaaa

SEQ ID NO: 153985 - DNA, 1233 bp, Homo sapiens
  Payload ID: 10267
  Gene Symbol: MAPT
  Gene Name: microtubule-associated protein tau
  Uniprot ID: P10636
  ENST ID: ENST00000431008
  CDS Start-End: 1-1233
atggctgagccccgccaggagttcgaagtgatggaagatcacgctgggacgtacgggttgggggacaggaaagatcaggggggctacaccatgcaccaagaccaagagggtgacacggacgctggcctgaaagaatctcccctgcagacccccactgaggacggatctgaggaaccgggctctgaaacctctgatgctaagagcactccaacagcggaagatgtgacagcacccttagtggatgagggagctcccggcaagcaggctgccgcgcagccccacacggagatcccagaaggaaccacagctgaagaagcaggcattggagacacccccagcctggaagacgaagctgctggtcacgtgacccaagctcgcatggtcagtaaaagcaaagacgggactggaagcgatgacaaaaaagccaagggggctgatggtaaaacgaagatcgccacaccgcggggagcagcccctccaggccagaagggccaggccaacgccaccaggattccagcaaaaaccccgcccgctccaaagacaccacccagctctggtgaacctccaaaatcaggggatcgcagcggctacagcagccccggctccccaggcactcccggcagccgctcccgcaccccgtcccttccaaccccacccacccgggagcccaagaaggtggcagtggtccgtactccacccaagtcgccgtcttccgccaagagccgcctgcagacagcccccgtgcccatgccagacctgaagaatgtcaagtccaagatcggctccactgagaacctgaagcaccagccgggaggcgggaaggtgcaaatagtctacaaaccagttgacctgagcaaggtgacctccaagtgtggctcattaggcaacatccatcataaaccaggaggtggccaggtggaagtaaaatctgagaagcttgacttcaaggacagagtccagtcgaagattgggtccctggacaatatcacccacgtccctggcggaggaaataaaaagattgaaacccacaagctgaccttccgcgagaacgccaaagccaagacagaccacggggcggagatcgtgtacaagtcgccagtggtgtctggggacacgtctccacggcatctcagcaatgtctcctccaccggcagcatcgacatggtagactcgccccagctcgccacgctagctgacgaggtgtctgcctccctggccaagcagggtttgtga

SEQ ID NO: 153986 - DNA, 5345 bp, Homo sapiens
  Payload ID: 10267
  Gene Symbol: MAPT
  Gene Name: microtubule-associated protein tau
  Uniprot ID: P10636
  ENST ID: ENST00000446361
  CDS Start-End: 31-1182
tgtcgactatcaggtgaactttgaaccaggatggctgagccccgccaggagttcgaagtgatggaagatcacgctgggacgtacgggttgggggacaggaaagatcaggggggctacaccatgcaccaagaccaagagggtgacacggacgctggcctgaaagctgaagaagcaggcattggagacacccccagcctggaagacgaagctgctggtcacgtgacccaagctcgcatggtcagtaaaagcaaagacgggactggaagcgatgacaaaaaagccaagggggctgatggtaaaacgaagatcgccacaccgcggggagcagcccctccaggccagaagggccaggccaacgccaccaggattccagcaaaaaccccgcccgctccaaagacaccacccagctctggtgaacctccaaaatcaggggatcgcagcggctacagcagccccggctccccaggcactcccggcagccgctcccgcaccccgtcccttccaaccccacccacccgggagcccaagaaggtggcagtggtccgtactccacccaagtcgccgtcttccgccaagagccgcctgcagacagcccccgtgcccatgccagacctgaagaatgtcaagtccaagatcggctccactgagaacctgaagcaccagccgggaggcgggaaggtgcagataattaataagaagctggatcttagcaacgtccagtccaagtgtggctcaaaggataatatcaaacacgtcccgggaggcggcagtgtgcaaatagtctacaaaccagttgacctgagcaaggtgacctccaagtgtggctcattaggcaacatccatcataaaccaggaggtggccaggtggaagtaaaatctgagaagcttgacttcaaggacagagtccagtcgaagattgggtccctggacaatatcacccacgtccctggcggaggaaataaaaagattgaaacccacaagctgaccttccgcgagaacgccaaagccaagacagaccacggggcggagatcgtgtacaagtcgccagtggtgtctggggacacgtctccacggcatctcagcaatgtctcctccaccggcagcatcgacatggtagactcgccccagctcgccacgctagctgacgaggtgtctgcctccctggccaagcagggtttgtgatcaggcccctggggcggtcaataattgtggagaggagagaatgagagagtgtggaaaaaaaaagaataatgacccggcccccgccctctgcccccagctgctcctcgcagttcggttaattggttaatcacttaacctgcttttgtcactcggctttggctcgggacttcaaaatcagtgatgggagtaagagcaaatttcatctttccaaattgatgggtgggctagtaataaaatatttaaaaaaaaacattcaaaaacatggccacatccaacatttcctcaggcaattccttttgattcttttttcttccccctccatgtagaagagggagaaggagaggctctgaaagctgcttctgggggatttcaagggactgggggtgccaaccacctctggccctgttgtgggggtgtcacagaggcagtggcagcaacaaaggatttgaaacttggtgtgttcgtggagccacaggcagacgatgtcaaccttgtgtgagtgtgacgggggttggggtggggcgggaggccacgggggaggccgaggcaggggctgggcagaggggagaggaagcacaagaagtgggagtgggagaggaagccacgtgctggagagtagacatccccctccttgccgctgggagagccaaggcctatgccacctgcagcgtctgagcggccgcctgtccttggtggccgggggtgggggcctgctgtgggtcagtgtgccaccctctgcagggcagcctgtgggagaagggacagcgggtaaaaagagaaggcaagctggcaggagggtggcacttcgtggatgacctccttagaaaagactgaccttgatgtcttgagagcgctggcctcttcctccctccctgcagggtagggggcctgagttgaggggcttccctctgctccacagaaaccctgttttattgagttctgaaggttggaactgctgccatgattttggccactttgcagacctgggactttagggctaaccagttctctttgtaaggacttgtgcctcttgggagacgtccacccgtttccaagcctgggccactggcatctctggagtgtgtgggggtctgggaggcaggtcccgagccccctgtccttcccacggccactgcagtcaccccgtctgcgccgctgtgctgttgtctgccgtgagagcccaatcactgcctatacccctcatcacacgtcacaatgtcccgaattcccagcctcaccaccccttctcagtaatgaccctggttggttgcaggaggtacctactccatactgagggtgaaattaagggaaggcaaagtccaggcacaagagtgggaccccagcctctcactctcagttccactcatccaactgggaccctcaccacgaatctcatgatctgattcggttccctgtctcctcctcccgtcacagatgtgagccagggcactgctcagctgtgaccctaggtgtttctgccttgttgacatggagagagccctttcccctgagaaggcctggccccttcctgtgctgagcccacagcagcaggctgggtgtcttggttgtcagtggtggcaccaggatggaagggcaaggcacccagggcaggcccacagtcccgctgtcccccacttgcaccctagcttgtagctgccaacctcccagacagcccagcccgctgctcagctccacatgcatagtatcagccctccacacccgacaaaggggaacacacccccttggaaatggttcttttcccccagtcccagctggaagccatgctgtctgttctgctggagcagctgaacatatacatagatgttgccctgccctccccatctgcaccctgttgagttgtagttggatttgtctgtttatgcttggattcaccagagtgactatgatagtgaaaagaaaaaaaaaaaaaaaaaaggacgcatgtatcttgaaatgcttgtaaagaggtttctaacccaccctcacgaggtgtctctcacccccacactgggactcgtgtggcctgtgtggtgccaccctgctggggcctcccaagttttgaaaggctttcctcagcacctgggacccaacagagaccagcttctagcagctaaggaggccgttcagctgtgacgaaggcctgaagcacaggattaggactgaagcgatgatgtccccttccctacttccccttggggctccctgtgtcagggcacagactaggtcttgtggctggtctggcttgcggcgcgaggatggttctctctggtcatagcccgaagtctcatggcagtcccaaaggaggcttacaactcctgcatcacaagaaaaaggaagccactgccagctggggggatctgcagctcccagaagctccgtgagcctcagccacccctcagactgggttcctctccaagctcgccctctggaggggcagcgcagcctcccaccaagggccctgcgaccacagcagggattgggatgaattgcctgtcctggatctgctctagaggcccaagctgcctgcctgaggaaggatgacttgacaagtcaggagacactgttcccaaagccttgaccagagcacctcagcccgctgaccttgcacaaactccatctgctgccatgagaaaagggaagccgcctttgcaaaacattgctgcctaaagaaactcagcagcctcaggcccaattctgccacttctggtttgggtacagttaaaggcaaccctgagggacttggcagtagaaatccagggcctcccctggggctggcagcttcgtgtgcagctagagctttacctgaaaggaagtctctgggcccagaactctccaccaagagcctccctgccgttcgctgagtcccagcaattctcctaagttgaagggatctgagaaggagaaggaaatgtggggtagatttggtggtggttagagatatgcccccctcattactgccaacagtttcggctgcatttcttcacgcacctcggttcctcttcctgaagttcttgtgccctgctcttcagcaccatgggccttcttatacggaaggctctgggatctcccccttgtggggcaggctcttggggccagcctaagatcatggtttagggtgatcagtgctggcagataaattgaaaaggcacgctggcttgtgatcttaaatgaggacaatccccccagggctgggcactcctcccctcccctcacttctcccacctgcagagccagtgtccttgggtgggctagataggatatactgtatgccggctccttcaagctgctgactcactttatcaatagttccatttaaattgacttcagtggtgagactgtatcctgtttgctattgcttgttgtgctatggggggaggggggaggaatgtgtaagatagttaacatgggcaaagggagatcttggggtgcagcacttaaactgcctcgtaacccttttcatgatttcaaccacatttgctagagggagggagcagccacggagttagaggcccttggggtttctcttttccactgacaggctttcccaggcagctggctagttcattccctccccagccaggtgcaggcgtaggaatatggacatctggttgctttggcctgctgccctctttcaggggtcctaagcccacaatcatgcctccctaagaccttggcatccttccctctaagccgttggcacctctgtgccacctctcacactggctccagacacacagcctgtgcttttggagctgagatcactcgcttcaccctcctcatctttgttctccaagtaaagccacgaggtcggggcgagggcagaggtgatcacctgcgtgtcccatctacagacctgcagcttcataaaacttctgatttctcttcagctttgaaaagggttaccctgggcactggcctagagcctcacctcctaatagacttagccccatgagtttgccatgttgagcaggactatttctggcacttgcaagtcccatgatttcttcggtaattctgagggtggggggagggacatgaaatcatcttagcttagctttctgtctgtgaatgtctatatagtgtattgtgtgttttaacaaatgatttacactgactgttgctgtaaaagtgaatttggaaataaagttattactctgattaaa

SEQ ID NO: 153987 - DNA, 2331 bp, Homo sapiens
  Payload ID: 10267
  Gene Symbol: MAPT
  Gene Name: microtubule-associated protein tau
  Uniprot ID: P10636
  ENST ID: ENST00000415613
  CDS Start-End: 1-2331
atggctgagccccgccaggagttcgaagtgatggaagatcacgctgggacgtacgggttgggggacaggaaagatcaggggggctacaccatgcaccaagaccaagagggtgacacggacgctggcctgaaagaatctcccctgcagacccccactgaggacggatctgaggaaccgggctctgaaacctctgatgctaagagcactccaacagcggaagatgtgacagcacccttagtggatgagggagctcccggcaagcaggctgccgcgcagccccacacggagatcccagaaggaaccacagctgaagaagcaggcattggagacacccccagcctggaagacgaagctgctggtcacgtgacccaagagcctgaaagtggtaaggtggtccaggaaggcttcctccgagagccaggccccccaggtctgagccaccagctcatgtccggcatgcctggggctcccctcctgcctgagggccccagagaggccacacgccaaccttcggggacaggacctgaggacacagagggcggccgccacgcccctgagctgctcaagcaccagcttctaggagacctgcaccaggaggggccgccgctgaagggggcagggggcaaagagaggccggggagcaaggaggaggtggatgaagaccgcgacgtcgatgagtcctccccccaagactcccctccctccaaggcctccccagcccaagatgggcggcctccccagacagccgccagagaagccaccagcatcccaggcttcccagcggagggtgccatccccctccctgtggatttcctctccaaagtttccacagagatcccagcctcagagcccgacgggcccagtgtagggcgggccaaagggcaggatgcccccctggagttcacgtttcacgtggaaatcacacccaacgtgcagaaggagcaggcgcactcggaggagcatttgggaagggctgcatttccaggggcccctggagaggggccagaggcccggggcccctctttgggagaggacacaaaagaggctgaccttccagagccctctgaaaagcagcctgctgctgctccgcgggggaagcccgtcagccgggtccctcaactcaaagctcgcatggtcagtaaaagcaaagacgggactggaagcgatgacaaaaaagccaagacatccacacgttcctctgctaaaaccttgaaaaataggccttgccttagccccaaacaccccactcctggtagctcagaccctctgatccaaccctccagccctgctgtgtgcccagagccaccttcctctcctaaatacgtctcttctgtcacttcccgaactggcagttctggagcaaaggagatgaaactcaagggggctgatggtaaaacgaagatcgccacaccgcggggagcagcccctccaggccagaagggccaggccaacgccaccaggattccagcaaaaaccccgcccgctccaaagacaccacccagctctgcgactaagcaagtccagagaagaccaccccctgcagggcccagatctgagagaggtgaacctccaaaatcaggggatcgcagcggctacagcagccccggctccccaggcactcccggcagccgctcccgcaccccgtcccttccaaccccacccacccgggagcccaagaaggtggcagtggtccgtactccacccaagtcgccgtcttccgccaagagccgcctgcagacagcccccgtgcccatgccagacctgaagaatgtcaagtccaagatcggctccactgagaacctgaagcaccagccgggaggcgggaaggtgcagataattaataagaagctggatcttagcaacgtccagtccaagtgtggctcaaaggataatatcaaacacgtcccgggaggcggcagtgtgcaaatagtctacaaaccagttgacctgagcaaggtgacctccaagtgtggctcattaggcaacatccatcataaaccaggaggtggccaggtggaagtaaaatctgagaagcttgacttcaaggacagagtccagtcgaagattgggtccctggacaatatcacccacgtccctggcggaggaaataaaaagattgaaacccacaagctgaccttccgcgagaacgccaaagccaagacagaccacggggcggagatcgtgtacaagtcgccagtggtgtctggggacacgtctccacggcatctcagcaatgtctcctccaccggcagcatcgacatggtagactcgccccagctcgccacgctagctgacgaggtgtctgcctccctggccaagcagggtttgtga

SEQ ID NO: 153988 - DNA, 1239 bp, Homo sapiens
  Payload ID: 10267
  Gene Symbol: MAPT
  Gene Name: microtubule-associated protein tau
  Uniprot ID: P10636
  ENST ID: ENST00000420682
  CDS Start-End: 1-1239
atggctgagccccgccaggagttcgaagtgatggaagatcacgctgggacgtacgggttgggggacaggaaagatcaggggggctacaccatgcaccaagaccaagagggtgacacggacgctggcctgaaagaatctcccctgcagacccccactgaggacggatctgaggaaccgggctctgaaacctctgatgctaagagcactccaacagcggaagctgaagaagcaggcattggagacacccccagcctggaagacgaagctgctggtcacgtgacccaagctcgcatggtcagtaaaagcaaagacgggactggaagcgatgacaaaaaagccaagggggctgatggtaaaacgaagatcgccacaccgcggggagcagcccctccaggccagaagggccaggccaacgccaccaggattccagcaaaaaccccgcccgctccaaagacaccacccagctctggtgaacctccaaaatcaggggatcgcagcggctacagcagccccggctccccaggcactcccggcagccgctcccgcaccccgtcccttccaaccccacccacccgggagcccaagaaggtggcagtggtccgtactccacccaagtcgccgtcttccgccaagagccgcctgcagacagcccccgtgcccatgccagacctgaagaatgtcaagtccaagatcggctccactgagaacctgaagcaccagccgggaggcgggaaggtgcagataattaataagaagctggatcttagcaacgtccagtccaagtgtggctcaaaggataatatcaaacacgtcccgggaggcggcagtgtgcaaatagtctacaaaccagttgacctgagcaaggtgacctccaagtgtggctcattaggcaacatccatcataaaccaggaggtggccaggtggaagtaaaatctgagaagcttgacttcaaggacagagtccagtcgaagattgggtccctggacaatatcacccacgtccctggcggaggaaataaaaagattgaaacccacaagctgaccttccgcgagaacgccaaagccaagacagaccacggggcggagatcgtgtacaagtcgccagtggtgtctggggacacgtctccacggcatctcagcaatgtctcctccaccggcagcatcgacatggtagactcgccccagctcgccacgctagctgacgaggtgtctgcctccctggccaagcagggtttgtga

SEQ ID NO: 153989 - DNA, 5718 bp, Homo sapiens
  Payload ID: 10267
  Gene Symbol: MAPT
  Gene Name: microtubule-associated protein tau
  Uniprot ID: P10636
  ENST ID: ENST00000535772
  CDS Start-End: 323-1555
ggacggccgagcggcagggcgctcgcgcgcgcccactagtggccggaggagaaggctcccgcggaggccgcgctgcccgccccctcccctggggaggctcgcgttcccgctgctcgcgcctgcgccgcccgccggcctcaggaacgcgccctcttcgccggcgcgcgccctcgcagtcaccgccacccaccagctccggcaccaacagcagcgccgctgccaccgcccaccttctgccgccgccaccacagccaccttctcctcctccgctgtcctctcccgtcctcgcctctgtcgactatcaggtgaactttgaaccaggatggctgagccccgccaggagttcgaagtgatggaagatcacgctgggacgtacgggttgggggacaggaaagatcaggggggctacaccatgcaccaagaccaagagggtgacacggacgctggcctgaaagaatctcccctgcagacccccactgaggacggatctgaggaaccgggctctgaaacctctgatgctaagagcactccaacagcggaagatgtgacagcacccttagtggatgagggagctcccggcaagcaggctgccgcgcagccccacacggagatcccagaaggaaccacagctgaagaagcaggcattggagacacccccagcctggaagacgaagctgctggtcacgtgacccaagctcgcatggtcagtaaaagcaaagacgggactggaagcgatgacaaaaaagccaagggggctgatggtaaaacgaagatcgccacaccgcggggagcagcccctccaggccagaagggccaggccaacgccaccaggattccagcaaaaaccccgcccgctccaaagacaccacccagctctggtgaacctccaaaatcaggggatcgcagcggctacagcagccccggctccccaggcactcccggcagccgctcccgcaccccgtcccttccaaccccacccacccgggagcccaagaaggtggcagtggtccgtactccacccaagtcgccgtcttccgccaagagccgcctgcagacagcccccgtgcccatgccagacctgaagaatgtcaagtccaagatcggctccactgagaacctgaagcaccagccgggaggcgggaaggtgcaaatagtctacaaaccagttgacctgagcaaggtgacctccaagtgtggctcattaggcaacatccatcataaaccaggaggtggccaggtggaagtaaaatctgagaagcttgacttcaaggacagagtccagtcgaagattgggtccctggacaatatcacccacgtccctggcggaggaaataaaaagattgaaacccacaagctgaccttccgcgagaacgccaaagccaagacagaccacggggcggagatcgtgtacaagtcgccagtggtgtctggggacacgtctccacggcatctcagcaatgtctcctccaccggcagcatcgacatggtagactcgccccagctcgccacgctagctgacgaggtgtctgcctccctggccaagcagggtttgtgatcaggcccctggggcggtcaataattgtggagaggagagaatgagagagtgtggaaaaaaaaagaataatgacccggcccccgccctctgcccccagctgctcctcgcagttcggttaattggttaatcacttaacctgcttttgtcactcggctttggctcgggacttcaaaatcagtgatgggagtaagagcaaatttcatctttccaaattgatgggtgggctagtaataaaatatttaaaaaaaaacattcaaaaacatggccacatccaacatttcctcaggcaattccttttgattcttttttcttccccctccatgtagaagagggagaaggagaggctctgaaagctgcttctgggggatttcaagggactgggggtgccaaccacctctggccctgttgtgggggtgtcacagaggcagtggcagcaacaaaggatttgaaacttggtgtgttcgtggagccacaggcagacgatgtcaaccttgtgtgagtgtgacgggggttggggtggggcgggaggccacgggggaggccgaggcaggggctgggcagaggggagaggaagcacaagaagtgggagtgggagaggaagccacgtgctggagagtagacatccccctccttgccgctgggagagccaaggcctatgccacctgcagcgtctgagcggccgcctgtccttggtggccgggggtgggggcctgctgtgggtcagtgtgccaccctctgcagggcagcctgtgggagaagggacagcgggtaaaaagagaaggcaagctggcaggagggtggcacttcgtggatgacctccttagaaaagactgaccttgatgtcttgagagcgctggcctcttcctccctccctgcagggtagggggcctgagttgaggggcttccctctgctccacagaaaccctgttttattgagttctgaaggttggaactgctgccatgattttggccactttgcagacctgggactttagggctaaccagttctctttgtaaggacttgtgcctcttgggagacgtccacccgtttccaagcctgggccactggcatctctggagtgtgtgggggtctgggaggcaggtcccgagccccctgtccttcccacggccactgcagtcaccccgtctgcgccgctgtgctgttgtctgccgtgagagcccaatcactgcctatacccctcatcacacgtcacaatgtcccgaattcccagcctcaccaccccttctcagtaatgaccctggttggttgcaggaggtacctactccatactgagggtgaaattaagggaaggcaaagtccaggcacaagagtgggaccccagcctctcactctcagttccactcatccaactgggaccctcaccacgaatctcatgatctgattcggttccctgtctcctcctcccgtcacagatgtgagccagggcactgctcagctgtgaccctaggtgtttctgccttgttgacatggagagagccctttcccctgagaaggcctggccccttcctgtgctgagcccacagcagcaggctgggtgtcttggttgtcagtggtggcaccaggatggaagggcaaggcacccagggcaggcccacagtcccgctgtcccccacttgcaccctagcttgtagctgccaacctcccagacagcccagcccgctgctcagctccacatgcatagtatcagccctccacacccgacaaaggggaacacacccccttggaaatggttcttttcccccagtcccagctggaagccatgctgtctgttctgctggagcagctgaacatatacatagatgttgccctgccctccccatctgcaccctgttgagttgtagttggatttgtctgtttatgcttggattcaccagagtgactatgatagtgaaaagaaaaaaaaaaaaaaaaaaggacgcatgtatcttgaaatgcttgtaaagaggtttctaacccaccctcacgaggtgtctctcacccccacactgggactcgtgtggcctgtgtggtgccaccctgctggggcctcccaagttttgaaaggctttcctcagcacctgggacccaacagagaccagcttctagcagctaaggaggccgttcagctgtgacgaaggcctgaagcacaggattaggactgaagcgatgatgtccccttccctacttccccttggggctccctgtgtcagggcacagactaggtcttgtggctggtctggcttgcggcgcgaggatggttctctctggtcatagcccgaagtctcatggcagtcccaaaggaggcttacaactcctgcatcacaagaaaaaggaagccactgccagctggggggatctgcagctcccagaagctccgtgagcctcagccacccctcagactgggttcctctccaagctcgccctctggaggggcagcgcagcctcccaccaagggccctgcgaccacagcagggattgggatgaattgcctgtcctggatctgctctagaggcccaagctgcctgcctgaggaaggatgacttgacaagtcaggagacactgttcccaaagccttgaccagagcacctcagcccgctgaccttgcacaaactccatctgctgccatgagaaaagggaagccgcctttgcaaaacattgctgcctaaagaaactcagcagcctcaggcccaattctgccacttctggtttgggtacagttaaaggcaaccctgagggacttggcagtagaaatccagggcctcccctggggctggcagcttcgtgtgcagctagagctttacctgaaaggaagtctctgggcccagaactctccaccaagagcctccctgccgttcgctgagtcccagcaattctcctaagttgaagggatctgagaaggagaaggaaatgtggggtagatttggtggtggttagagatatgcccccctcattactgccaacagtttcggctgcatttcttcacgcacctcggttcctcttcctgaagttcttgtgccctgctcttcagcaccatgggccttcttatacggaaggctctgggatctcccccttgtggggcaggctcttggggccagcctaagatcatggtttagggtgatcagtgctggcagataaattgaaaaggcacgctggcttgtgatcttaaatgaggacaatccccccagggctgggcactcctcccctcccctcacttctcccacctgcagagccagtgtccttgggtgggctagataggatatactgtatgccggctccttcaagctgctgactcactttatcaatagttccatttaaattgacttcagtggtgagactgtatcctgtttgctattgcttgttgtgctatggggggaggggggaggaatgtgtaagatagttaacatgggcaaagggagatcttggggtgcagcacttaaactgcctcgtaacccttttcatgatttcaaccacatttgctagagggagggagcagccacggagttagaggcccttggggtttctcttttccactgacaggctttcccaggcagctggctagttcattccctccccagccaggtgcaggcgtaggaatatggacatctggttgctttggcctgctgccctctttcaggggtcctaagcccacaatcatgcctccctaagaccttggcatccttccctctaagccgttggcacctctgtgccacctctcacactggctccagacacacagcctgtgcttttggagctgagatcactcgcttcaccctcctcatctttgttctccaagtaaagccacgaggtcggggcgagggcagaggtgatcacctgcgtgtcccatctacagacctgcagcttcataaaacttctgatttctcttcagctttgaaaagggttaccctgggcactggcctagagcctcacctcctaatagacttagccccatgagtttgccatgttgagcaggactatttctggcacttgcaagtcccatgatttcttcggtaattctgagggtggggggagggacatgaaatcatcttagcttagctttctgtctgtgaatgtctatatagtgtattgtgtgttttaacaaatgatttacactgactgttgctgtaaaagtgaatttggaaataaagttattactctgattaaa

SEQ ID NO: 153990 - DNA, 2277 bp, Homo sapiens
  Payload ID: 10267
  Gene Symbol: MAPT
  Gene Name: microtubule-associated protein tau
  Uniprot ID: P10636
  ENST ID: ENST00000571987
  CDS Start-End: 1-2277
atggctgagccccgccaggagttcgaagtgatggaagatcacgctgggacgtacgggttgggggacaggaaagatcaggggggctacaccatgcaccaagaccaagagggtgacacggacgctggcctgaaagaatctcccctgcagacccccactgaggacggatctgaggaaccgggctctgaaacctctgatgctaagagcactccaacagcggaagatgtgacagcacccttagtggatgagggagctcccggcaagcaggctgccgcgcagccccacacggagatcccagaaggaaccacagctgaagaagcaggcattggagacacccccagcctggaagacgaagctgctggtcacgtgacccaagagcctgaaagtggtaaggtggtccaggaaggcttcctccgagagccaggccccccaggtctgagccaccagctcatgtccggcatgcctggggctcccctcctgcctgagggccccagagaggccacacgccaaccttcggggacaggacctgaggacacagagggcggccgccacgcccctgagctgctcaagcaccagcttctaggagacctgcaccaggaggggccgccgctgaagggggcagggggcaaagagaggccggggagcaaggaggaggtggatgaagaccgcgacgtcgatgagtcctccccccaagactcccctccctccaaggcctccccagcccaagatgggcggcctccccagacagccgccagagaagccaccagcatcccaggcttcccagcggagggtgccatccccctccctgtggatttcctctccaaagtttccacagagatcccagcctcagagcccgacgggcccagtgtagggcgggccaaagggcaggatgcccccctggagttcacgtttcacgtggaaatcacacccaacgtgcagaaggagcaggcgcactcggaggagcatttgggaagggctgcatttccaggggcccctggagaggggccagaggcccggggcccctctttgggagaggacacaaaagaggctgaccttccagagccctctgaaaagcagcctgctgctgctccgcgggggaagcccgtcagccgggtccctcaactcaaagctcgcatggtcagtaaaagcaaagacgggactggaagcgatgacaaaaaagccaagacatccacacgttcctctgctaaaaccttgaaaaataggccttgccttagccccaaacaccccactcctggtagctcagaccctctgatccaaccctccagccctgctgtgtgcccagagccaccttcctctcctaaatacgtctcttctgtcacttcccgaactggcagttctggagcaaaggagatgaaactcaagggggctgatggtaaaacgaagatcgccacaccgcggggagcagcccctccaggccagaagggccaggccaacgccaccaggattccagcaaaaaccccgcccgctccaaagacaccacccagctctggtgaacctccaaaatcaggggatcgcagcggctacagcagccccggctccccaggcactcccggcagccgctcccgcaccccgtcccttccaaccccacccacccgggagcccaagaaggtggcagtggtccgtactccacccaagtcgccgtcttccgccaagagccgcctgcagacagcccccgtgcccatgccagacctgaagaatgtcaagtccaagatcggctccactgagaacctgaagcaccagccgggaggcgggaaggtgcagataattaataagaagctggatcttagcaacgtccagtccaagtgtggctcaaaggataatatcaaacacgtcccgggaggcggcagtgtgcaaatagtctacaaaccagttgacctgagcaaggtgacctccaagtgtggctcattaggcaacatccatcataaaccaggaggtggccaggtggaagtaaaatctgagaagcttgacttcaaggacagagtccagtcgaagattgggtccctggacaatatcacccacgtccctggcggaggaaataaaaagattgaaacccacaagctgaccttccgcgagaacgccaaagccaagacagaccacggggcggagatcgtgtacaagtcgccagtggtgtctggggacacgtctccacggcatctcagcaatgtctcctccaccggcagcatcgacatggtagactcgccccagctcgccacgctagctgacgaggtgtctgcctccctggccaagcagggtttgtga

SEQ ID NO: 153991 - DNA, 544 bp, Homo sapiens
  Payload ID: 10267
  Gene Symbol: MAPT
  Gene Name: microtubule-associated protein tau
  ENST ID: ENST00000571311
  CDS Start-End: 139-318
acccaccagctccggcaccaacagcagcgccgctgccaccgcccaccttctgccgccgccaccacagccaccttctcctcctccgctgtcctctcccgtcctcgcctctgtcgactatcaggtgaactttgaaccaggatggctgagccccgccaggagttcgaagtgatggaagatcacgctgggacgtacgggttgggggacaggaaagatcaggggggctacaccatgcaccaagaccaagagggtgacacggacgctggcctgaaagaggggagtgaattcactgagctgagagctgaggaaccattgatctgatggctgagacaccactgggaagactggagaggcttttctgggcatgcagtgccaggcacaggaggagctgagggaagatgactaagagaatctcccctgcagacccccactgaggacggatctgaggaaccgggctctgaaacctctgatgctaagagcactccaacagcggaagctgaagaagcaggcattggagacacccccagcctggaagacgaagctgctg

SEQ ID NO: 153992 - DNA, 1326 bp, Homo sapiens
  Payload ID: 10267
  Gene Symbol: MAPT
  Gene Name: microtubule-associated protein tau
  Uniprot ID: P10636
  ENST ID: ENST00000574436
  CDS Start-End: 1-1326
atggctgagccccgccaggagttcgaagtgatggaagatcacgctgggacgtacgggttgggggacaggaaagatcaggggggctacaccatgcaccaagaccaagagggtgacacggacgctggcctgaaagaatctcccctgcagacccccactgaggacggatctgaggaaccgggctctgaaacctctgatgctaagagcactccaacagcggaagatgtgacagcacccttagtggatgagggagctcccggcaagcaggctgccgcgcagccccacacggagatcccagaaggaaccacagctgaagaagcaggcattggagacacccccagcctggaagacgaagctgctggtcacgtgacccaagctcgcatggtcagtaaaagcaaagacgggactggaagcgatgacaaaaaagccaagggggctgatggtaaaacgaagatcgccacaccgcggggagcagcccctccaggccagaagggccaggccaacgccaccaggattccagcaaaaaccccgcccgctccaaagacaccacccagctctggtgaacctccaaaatcaggggatcgcagcggctacagcagccccggctccccaggcactcccggcagccgctcccgcaccccgtcccttccaaccccacccacccgggagcccaagaaggtggcagtggtccgtactccacccaagtcgccgtcttccgccaagagccgcctgcagacagcccccgtgcccatgccagacctgaagaatgtcaagtccaagatcggctccactgagaacctgaagcaccagccgggaggcgggaaggtgcagataattaataagaagctggatcttagcaacgtccagtccaagtgtggctcaaaggataatatcaaacacgtcccgggaggcggcagtgtgcaaatagtctacaaaccagttgacctgagcaaggtgacctccaagtgtggctcattaggcaacatccatcataaaccaggaggtggccaggtggaagtaaaatctgagaagcttgacttcaaggacagagtccagtcgaagattgggtccctggacaatatcacccacgtccctggcggaggaaataaaaagattgaaacccacaagctgaccttccgcgagaacgccaaagccaagacagaccacggggcggagatcgtgtacaagtcgccagtggtgtctggggacacgtctccacggcatctcagcaatgtctcctccaccggcagcatcgacatggtagactcgccccagctcgccacgctagctgacgaggtgtctgcctccctggccaagcagggtttgtga

SEQ ID NO: 153993 - DNA, 1326 bp, Homo sapiens
  Payload ID: 10267
  Gene Symbol: MAPT
  Gene Name: microtubule-associated protein tau
  Uniprot ID: P10636
  ENST ID: ENST00000621329
  CDS Start-End: 1-1326
atggctgagccccgccaggagttcgaagtgatggaagatcacgctgggacgtacgggttgggggacaggaaagatcaggggggctacaccatgcaccaagaccaagagggtgacacggacgctggcctgaaagaatctcccctgcagacccccactgaggacggatctgaggaaccgggctctgaaacctctgatgctaagagcactccaacagcggaagatgtgacagcacccttagtggatgagggagctcccggcaagcaggctgccgcgcagccccacacggagatcccagaaggaaccacagctgaagaagcaggcattggagacacccccagcctggaagacgaagctgctggtcacgtgacccaagctcgcatggtcagtaaaagcaaagacgggactggaagcgatgacaaaaaagccaagggggctgatggtaaaacgaagatcgccacaccgcggggagcagcccctccaggccagaagggccaggccaacgccaccaggattccagcaaaaaccccacccgctccaaagacaccacccagctctggtgaacctccaaaatcaggggatcgcagcggctacagcagccccggctccccaggcactcccggcagccgctcccgcaccccgtcccttccaaccccacccacccgggagcccaagaaggtggcggtggtccgtactccacccaagtcgccgtcttccgccaagagccgcctgcagacagcccccgtgcccatgccagacctgaagaacgtcaagtccaagatcggctccactgagaacctgaagcaccagccgggaggcgggaaggtgcagataattaataagaagctggatcttagcaacgtccagtccaagtgtggctcaaaggataatatcaaacacgtcccgggaggcggcagtgtgcaaatagtctacaaaccagttgacctgagcaaggtgacctccaagtgtggctcattaggcaacatccatcataaaccaggaggtggccaggtggaagtaaaatctgagaagcttgacttcaaggacagagtccagtcgaagattgggtccctggacaatatcacccacgtccctggcggaggaaataaaaagattgaaacccacaagctgaccttccgcgagaacgccaaagccaagacagaccacggggcggagatcgtgtacaagtcgccagtggtgtctggggacacgtctccacggcatctcagcaatgtctcctccaccggcagcatcgacatggtagactcgccccagctcgccacgctagctgacgaggtgtctgcctccctggccaagcagggtttgtga

SEQ ID NO: 153994 - DNA, 5724 bp, Homo sapiens; identical to SEQ ID NO: 153983
  Payload ID: 10267
  Gene Symbol: MAPT
  Gene Name: microtubule-associated protein tau
  Uniprot ID: P10636
  ENST ID: ENST00000612872
  CDS Start-End: 323-1561

SEQ ID NO: 153995 - DNA, 2351 bp, Homo sapiens
  Payload ID: 10267
  Gene Symbol: MAPT
  Gene Name: microtubule-associated protein tau
  Uniprot ID: P10636
  ENST ID: ENST00000622728
  CDS Start-End: 21-1172
caggtgagctttgaaccaggatggctgagccccgccaggagttcgaagtgatggaagatcacgctgggacgtacgggttgggggacaggaaagatcaggggggctacaccatgcaccaagaccaagagggtgacacggacgctggcctgaaagctgaagaagcaggcattggagacacccccagcctggaagacgaagctgctggtcacgtgacccaagctcgcatggtcagtaaaagcaaagacgggactggaagcgatgacaaaaaagccaagggggctgatggtaaaacgaagatcgccacaccgcggggagcagcccctccaggccagaagggccaggccaacgccaccaggattccagcaaaaaccccacccgctccaaagacaccacccagctctggtgaacctccaaaatcaggggatcgcagcggctacagcagccccggctccccaggcactcccggcagccgctcccgcaccccgtcccttccaaccccacccacccgggagcccaagaaggtggcggtggtccgtactccacccaagtcgccgtcttccgccaagagccgcctgcagacagcccccgtgcccatgccagacctgaagaacgtcaagtccaagatcggctccactgagaacctgaagcaccagccgggaggcgggaaggtgcagataattaataagaagctggatcttagcaacgtccagtccaagtgtggctcaaaggataatatcaaacacgtcccgggaggcggcagtgtgcaaatagtctacaaaccagttgacctgagcaaggtgacctccaagtgtggctcattaggcaacatccatcataaaccaggaggtggccaggtggaagtaaaatctgagaagcttgacttcaaggacagagtccagtcgaagattgggtccctggacaatatcacccacgtccctggcggaggaaataaaaagattgaaacccacaagctgaccttccgcgagaacgccaaagccaagacagaccacggggcggagatcgtgtacaagtcgccagtggtgtctggggacacgtctccacggcatctcagcaatgtctcctccaccggcagcatcgacatggtagactcgccccagctcgccacgctagctgacgaggtgtctgcctccctggccaagcagggtttgtgatcaggcccctggggcggtcaataatcgtggagaggagagaatgagagagtgtggaaaaaaaaagaataatgacccggcccccgccctctgcccccagctgctcctcgcagttcggttaattggttaatcacttaacctgcttttgtcactcggctttggctcgggacttcaaaatcagtgatgggagtaagagcaaatttcatctttccaaattgatgggtgggctagtaataaaatattttaaaaaaaaacattcaaaaacatggccacatccaacatttcctcaggcaattccttttgattcttttttcttcccccctccatgtagaagagggggaaggagaggctctgaaagctgcttctgggggatttcaagggactgggggtgccaaccacctctggccctgttgtgggggtgtcacagaggcagtggcagcaacaaaggatttgaaacttggtgtgttcgtggagccacaggcagacgatgtcaaccttgtgtgagtgtgacgggggttggggtggggcgggaggccacgggggaggccgaggcaggggctgggcagaggggagaggaagcacaagaagtgggagtgggagaggaagccacgtgctggagagtagacatccccctccttgccgctgggagagccaaggcctatgccacctgcagcgtctgagcggccgcctgtccttggtggccgggggtgggggcctgctgtgggtcagtgtgccaccctctgcagggcagcctgtgggagaagggacagcgggtaaaaagagaaggcaagctggcaggagggtggcacttcgtggatgacctccttagaaaagactgaccttgatgtcttgagagcgctggcctcttcctccctccctgcagggtagggggcctgagttgaggggcttccctctctgctccacagaaaccctgttttattgagttctgaaggttggaactgctgccatgattttggccactttgcagacctgggactttagggctaaccagttctctttgtaaggacttgtgcctcttgggagacgtccacccgtttccaagcctgggccaccggcatctctggagtgtgtgggggtctgggaggcgggtcccgagccccctgtccttcccacggccactgcagtcacccctgtctgccccgctgtgctgttgtctgccgt

SEQ ID NO: 153996 - DNA, 6816 bp, Homo sapiens
  Payload ID: 10267
  Gene Symbol: MAPT
  Gene Name: microtubule-associated protein tau
  ENST ID: ENST00000618029
  CDS Start-End: 323-2653
ggacggccgagcggcagggcgctcgcgcgcgcccactagtggccggaggagaaggctcccgcggaggccgcgctgcccgccccctcccctggggaggctcgcgttcccgctgctcgcgcctgcgccgcccgccggcctcaggaacgcgccctcttcgccggcgcgcgccctcgcagtcaccgccacccaccagctccggcaccaacagcagcgccgctgccaccgcccaccttctgccgccgccaccacagccaccttctcctcctccgctgtcctctcccgtcctcgcctctgtcgactatcaggtgaactttgaaccaggatggctgagccccgccaggagttcgaagtgatggaagatcacgctgggacgtacgggttgggggacaggaaagatcaggggggctacaccatgcaccaagaccaagagggtgacacggacgctggcctgaaagaatctcccctgcagacccccactgaggacggatctgaggaaccgggctctgaaacctctgatgctaagagcactccaacagcggaagatgtgacagcacccttagtggatgagggagctcccggcaagcaggctgccgcgcagccccacacggagatcccagaaggaaccacagctgaagaagcaggcattggagacacccccagcctggaagacgaagctgctggtcacgtgacccaagagcctgaaagtggtaaggtggtccaggaaggcttcctccgagagccaggccccccaggtctgagccaccagctcatgtccggcatgcctggggctcccctcctgcctgagggccccagagaggccacacgccaaccttcggggacaggacctgaggacacagagggcggccgccacgcccctgagctgctcaagcaccagcttctaggagacctgcaccaggaggggccgccgctgaagggggcagggggcaaagagaggccggggagcaaggaggaggtggatgaagaccgcgacgtcgatgagtcctccccccaagactcccctccctccaaggcctccccagcccaagatgggcggcctccccagacagccgccagagaagccaccagcatcccaggcttcccagcggagggtgccatccccctccctgtggatttcctctccaaagtttccacagagatcccagcctcagagcccgatgggcccagtgtagggcgggccaaagggcaggatgcccccctggagttcacgtttcacgtggaaatcacacccaacgtgcagaaggagcaggcgcactcggaggagcatttgggaagggctgcatttccaggggcccctggagaggggccagaggcccggggcccctctttgggagaggacacaaaagaggctgaccttccagagccctctgaaaagcagcctgctgctgctccgcgggggaagcccgtcagccgggtccctcaactcaaagctcgcatggtcagtaaaagcaaagacgggactggaagcgatgacaaaaaagccaagacatccacacgttcctctgctaaaaccttgaaaaataggccttgccttagccccaaacaccccactcctggtagctcagaccctctgatccaaccctccagccctgctgtgtgcccagagccaccttcctctcctaaacacgtctcttctgtcacttcccgaactggcagttctggagcaaaggagatgaaactcaagggggctgatggtaaaacgaagatcgccacaccgcggggagcagcccctccaggccagaagggccaggccaacgccaccaggattccagcaaaaaccccgcccgctccaaagacaccacccagctctgcgactaagcaagtccagagaagaccaccccctgcagggcccagatctgagagaggtgaacctccaaaatcaggggatcgcagcggctacagcagccccggctccccaggcactcccggcagccgctcccgcaccccgtcccttccaaccccacccacccgggagcccaagaaggtggcagtggtccgtactccacccaagtcgccgtcttccgccaagagccgcctgcagacagcccccgtgcccatgccagacctgaagaatgtcaagtccaagatcggctccactgagaacctgaagcaccagccgggaggcgggaaggtgcagataattaataagaagctggatcttagcaacgtccagtccaagtgtggctcaaaggataatatcaaacacgtcccgggaggcggcagtgtgcaaatagtctacaaaccagttgacctgagcaaggtgacctccaagtgtggctcattaggcaacatccatcataaaccaggaggtggccaggtggaagtaaaatctgagaagcttgacttcaaggacagagtccagtcgaagattgggtccctggacaatatcacccacgtccctggcggaggaaataaaaagattgaaacccacaagctgaccttccgcgagaacgccaaagccaagacagaccacggggcggagatcgtgtacaagtcgccagtggtgtctggggacacgtctccacggcatctcagcaatgtctcctccaccggcagcatcgacatggtagactcgccccagctcgccacgctagctgacgaggtgtctgcctccctggccaagcagggtttgtgatcaggcccctggggcggtcaataattgtggagaggagagaatgagagagtgtggaaaaaaaaagaataatgacccggcccccgccctctgcccccagctgctcctcgcagttcggttaattggttaatcacttaacctgcttttgtcactcggctttggctcgggacttcaaaatcagtgatgggagtaagagcaaatttcatctttccaaattgatgggtgggctagtaataaaatatttaaaaaaaaacattcaaaaacatggccacatccaacatttcctcaggcaattccttttgattcttttttcttccccctccatgtagaagagggagaaggagaggctctgaaagctgcttctgggggatttcaagggactgggggtgccaaccacctctggccctgttgtgggggtgtcacagaggcagtggcagcaacaaaggatttgaaacttggtgtgttcgtggagccacaggcagacgatgtcaaccttgtgtgagtgtgacgggggttggggtggggcgggaggccacgggggaggccgaggcaggggctgggcagaggggagaggaagcacaagaagtgggagtgggagaggaagccacgtgctggagagtagacatccccctccttgccgctgggagagccaaggcctatgccacctgcagcgtctgagcggccgcctgtccttggtggccgggggtgggggcctgctgtgggtcagtgtgccaccctctgcagggcagcctgtgggagaagggacagcgggtaaaaagagaaggcaagctggcaggagggtggcacttcgtggatgacctccttagaaaagactgaccttgatgtcttgagagcgctggcctcttcctccctccctgcagggtagggggcctgagttgaggggcttccctctgctccacagaaaccctgttttattgagttctgaaggttggaactgctgccatgattttggccactttgcagacctgggactttagggctaaccagttctctttgtaaggacttgtgcctcttgggagacgtccacccgtttccaagcctgggccactggcatctctggagtgtgtgggggtctgggaggcaggtcccgagccccctgtccttcccacggccactgcagtcaccccgtctgcgccgctgtgctgttgtctgccgtgagagcccaatcactgcctatacccctcatcacacgtcacaatgtcccgaattcccagcctcaccaccccttctcagtaatgaccctggttggttgcaggaggtacctactccatactgagggtgaaattaagggaaggcaaagtccaggcacaagagtgggaccccagcctctcactctcagttccactcatccaactgggaccctcaccacgaatctcatgatctgattcggttccctgtctcctcctcccgtcacagatgtgagccagggcactgctcagctgtgaccctaggtgtttctgccttgttgacatggagagagccctttcccctgagaaggcctggccccttcctgtgctgagcccacagcagcaggctgggtgtcttggttgtcagtggtggcaccaggatggaagggcaaggcacccagggcaggcccacagtcccgctgtcccccacttgcaccctagcttgtagctgccaacctcccagacagcccagcccgctgctcagctccacatgcatagtatcagccctccacacccgacaaaggggaacacacccccttggaaatggttcttttcccccagtcccagctggaagccatgctgtctgttctgctggagcagctgaacatatacatagatgttgccctgccctccccatctgcaccctgttgagttgtagttggatttgtctgtttatgcttggattcaccagagtgactatgatagtgaaaagaaaaaaaaaaaaaaaaaaggacgcatgtatcttgaaatgcttgtaaagaggtttctaacccaccctcacgaggtgtctctcacccccacactgggactcgtgtggcctgtgtggtgccaccctgctggggcctcccaagttttgaaaggctttcctcagcacctgggacccaacagagaccagcttctagcagctaaggaggccgttcagctgtgacgaaggcctgaagcacaggattaggactgaagcgatgatgtccccttccctacttccccttggggctccctgtgtcagggcacagactaggtcttgtggctggtctggcttgcggcgcgaggatggttctctctggtcatagcccgaagtctcatggcagtcccaaaggaggcttacaactcctgcatcacaagaaaaaggaagccactgccagctggggggatctgcagctcccagaagctccgtgagcctcagccacccctcagactgggttcctctccaagctcgccctctggaggggcagcgcagcctcccaccaagggccctgcgaccacagcagggattgggatgaattgcctgtcctggatctgctctagaggcccaagctgcctgcctgaggaaggatgacttgacaagtcaggagacactgttcccaaagccttgaccagagcacctcagcccgctgaccttgcacaaactccatctgctgccatgagaaaagggaagccgcctttgcaaaacattgctgcctaaagaaactcagcagcctcaggcccaattctgccacttctggtttgggtacagttaaaggcaaccctgagggacttggcagtagaaatccagggcctcccctggggctggcagcttcgtgtgcagctagagctttacctgaaaggaagtctctgggcccagaactctccaccaagagcctccctgccgttcgctgagtcccagcaattctcctaagttgaagggatctgagaaggagaaggaaatgtggggtagatttggtggtggttagagatatgcccccctcattactgccaacagtttcggctgcatttcttcacgcacctcggttcctcttcctgaagttcttgtgccctgctcttcagcaccatgggccttcttatacggaaggctctgggatctcccccttgtggggcaggctcttggggccagcctaagatcatggtttagggtgatcagtgctggcagataaattgaaaaggcacgctggcttgtgatcttaaatgaggacaatccccccagggctgggcactcctcccctcccctcacttctcccacctgcagagccagtgtccttgggtgggctagataggatatactgtatgccggctccttcaagctgctgactcactttatcaatagttccatttaaattgacttcagtggtgagactgtatcctgtttgctattgcttgttgtgctatggggggaggggggaggaatgtgtaagatagttaacatgggcaaagggagatcttggggtgcagcacttaaactgcctcgtaacccttttcatgatttcaaccacatttgctagagggagggagcagccacggagttagaggcccttggggtttctcttttccactgacaggctttcccaggcagctggctagttcattccctccccagccaggtgcaggcgtaggaatatggacatctggttgctttggcctgctgccctctttcaggggtcctaagcccacaatcatgcctccctaagaccttggcatccttccctctaagccgttggcacctctgtgccacctctcacactggctccagacacacagcctgtgcttttggagctgagatcactcgcttcaccctcctcatctttgttctccaagtaaagccacgaggtcggggcgagggcagaggtgatcacctgcgtgtcccatctacagacctgcagcttcataaaacttctgatttctcttcagctttgaaaagggttaccctgggcactggcctagagcctcacctcctaatagacttagccccatgagtttgccatgttgagcaggactatttctggcacttgcaagtcccatgatttcttcggtaattctgagggtggggggagggacatgaaatcatcttagcttagctttctgtctgtgaatgtctatatagtgtattgtgtgttttaacaaatgatttacactgactgttgctgtaaaagtgaatttggaaataaagttattactctgattaaa

SEQ ID NO: 153997 - DNA, 1233 bp, Homo sapiens
  Payload ID: 10267
  Gene Symbol: MAPT
  Gene Name: microtubule-associated protein tau
  Uniprot ID: P10636
  ENST ID: ENST00000620981
  CDS Start-End: 1-1233
atggctgagccccgccaggagttcgaagtgatggaagatcacgctgggacgtacgggttgggggacaggaaagatcaggggggctacaccatgcaccaagaccaagagggtgacacggacgctggcctgaaagaatctcccctgcagacccccactgaggacggatctgaggaaccgggctctgaaacctctgatgctaagagcactccaacagcggaagatgtgacagcacccttagtggatgagggagctcccggcaagcaggctgccgcgcagccccacacggagatcccagaaggaaccacagctgaagaagcaggcattggagacacccccagcctggaagacgaagctgctggtcacgtgacccaagctcgcatggtcagtaaaagcaaagacgggactggaagcgatgacaaaaaagccaagggggctgatggtaaaacgaagatcgccacaccgcggggagcagcccctccaggccagaagggccaggccaacgccaccaggattccagcaaaaaccccacccgctccaaagacaccacccagctctggtgaacctccaaaatcaggggatcgcagcggctacagcagccccggctccccaggcactcccggcagccgctcccgcaccccgtcccttccaaccccacccacccgggagcccaagaaggtggcggtggtccgtactccacccaagtcgccgtcttccgccaagagccgcctgcagacagcccccgtgcccatgccagacctgaagaacgtcaagtccaagatcggctccactgagaacctgaagcaccagccgggaggcgggaaggtgcaaatagtctacaaaccagttgacctgagcaaggtgacctccaagtgtggctcattaggcaacatccatcataaaccaggaggtggccaggtggaagtaaaatctgagaagcttgacttcaaggacagagtccagtcgaagattgggtccctggacaatatcacccacgtccctggcggaggaaataaaaagattgaaacccacaagctgaccttccgcgagaacgccaaagccaagacagaccacggggcggagatcgtgtacaagtcgccagtggtgtctggggacacgtctccacggcatctcagcaatgtctcctccaccggcagcatcgacatggtagactcgccccagctcgccacgctagctgacgaggtgtctgcctccctggccaagcagggtttgtga

SEQ ID NO: 153998 - DNA, 5345 bp, Homo sapiens; identical to SEQ ID NO: 153986
  Payload ID: 10267
  Gene Symbol: MAPT
  Gene Name: microtubule-associated protein tau
  Uniprot ID: P10636
  ENST ID: ENST00000622106
  CDS Start-End: 31-1182

SEQ ID NO: 153999 - DNA, 6762 bp, Homo sapiens
  Payload ID: 10267
  Gene Symbol: MAPT
  Gene Name: microtubule-associated protein tau
  ENST ID: ENST00000618825
  CDS Start-End: 323-2599
ggacggccgagcggcagggcgctcgcgcgcgcccactagtggccggaggagaaggctcccgcggaggccgcgctgcccgccccctcccctggggaggctcgcgttcccgctgctcgcgcctgcgccgcccgccggcctcaggaacgcgccctcttcgccggcgcgcgccctcgcagtcaccgccacccaccagctccggcaccaacagcagcgccgctgccaccgcccaccttctgccgccgccaccacagccaccttctcctcctccgctgtcctctcccgtcctcgcctctgtcgactatcaggtgaactttgaaccaggatggctgagccccgccaggagttcgaagtgatggaagatcacgctgggacgtacgggttgggggacaggaaagatcaggggggctacaccatgcaccaagaccaagagggtgacacggacgctggcctgaaagaatctcccctgcagacccccactgaggacggatctgaggaaccgggctctgaaacctctgatgctaagagcactccaacagcggaagatgtgacagcacccttagtggatgagggagctcccggcaagcaggctgccgcgcagccccacacggagatcccagaaggaaccacagctgaagaagcaggcattggagacacccccagcctggaagacgaagctgctggtcacgtgacccaagagcctgaaagtggtaaggtggtccaggaaggcttcctccgagagccaggccccccaggtctgagccaccagctcatgtccggcatgcctggggctcccctcctgcctgagggccccagagaggccacacgccaaccttcggggacaggacctgaggacacagagggcggccgccacgcccctgagctgctcaagcaccagcttctaggagacctgcaccaggaggggccgccgctgaagggggcagggggcaaagagaggccggggagcaaggaggaggtggatgaagaccgcgacgtcgatgagtcctccccccaagactcccctccctccaaggcctccccagcccaagatgggcggcctccccagacagccgccagagaagccaccagcatcccaggcttcccagcggagggtgccatccccctccctgtggatttcctctccaaagtttccacagagatcccagcctcagagcccgatgggcccagtgtagggcgggccaaagggcaggatgcccccctggagttcacgtttcacgtggaaatcacacccaacgtgcagaaggagcaggcgcactcggaggagcatttgggaagggctgcatttccaggggcccctggagaggggccagaggcccggggcccctctttgggagaggacacaaaagaggctgaccttccagagccctctgaaaagcagcctgctgctgctccgcgggggaagcccgtcagccgggtccctcaactcaaagctcgcatggtcagtaaaagcaaagacgggactggaagcgatgacaaaaaagccaagacatccacacgttcctctgctaaaaccttgaaaaataggccttgccttagccccaaacaccccactcctggtagctcagaccctctgatccaaccctccagccctgctgtgtgcccagagccaccttcctctcctaaacacgtctcttctgtcacttcccgaactggcagttctggagcaaaggagatgaaactcaagggggctgatggtaaaacgaagatcgccacaccgcggggagcagcccctccaggccagaagggccaggccaacgccaccaggattccagcaaaaaccccgcccgctccaaagacaccacccagctctggtgaacctccaaaatcaggggatcgcagcggctacagcagccccggctccccaggcactcccggcagccgctcccgcaccccgtcccttccaaccccacccacccgggagcccaagaaggtggcagtggtccgtactccacccaagtcgccgtcttccgccaagagccgcctgcagacagcccccgtgcccatgccagacctgaagaatgtcaagtccaagatcggctccactgagaacctgaagcaccagccgggaggcgggaaggtgcagataattaataagaagctggatcttagcaacgtccagtccaagtgtggctcaaaggataatatcaaacacgtcccgggaggcggcagtgtgcaaatagtctacaaaccagttgacctgagcaaggtgacctccaagtgtggctcattaggcaacatccatcataaaccaggaggtggccaggtggaagtaaaatctgagaagcttgacttcaaggacagagtccagtcgaagattgggtccctggacaatatcacccacgtccctggcggaggaaataaaaagattgaaacccacaagctgaccttccgcgagaacgccaaagccaagacagaccacggggcggagatcgtgtacaagtcgccagtggtgtctggggacacgtctccacggcatctcagcaatgtctcctccaccggcagcatcgacatggtagactcgccccagctcgccacgctagctgacgaggtgtctgcctccctggccaagcagggtttgtgatcaggcccctggggcggtcaataattgtggagaggagagaatgagagagtgtggaaaaaaaaagaataatgacccggcccccgccctctgcccccagctgctcctcgcagttcggttaattggttaatcacttaacctgcttttgtcactcggctttggctcgggacttcaaaatcagtgatgggagtaagagcaaatttcatctttccaaattgatgggtgggctagtaataaaatatttaaaaaaaaacattcaaaaacatggccacatccaacatttcctcaggcaattccttttgattcttttttcttccccctccatgtagaagagggagaaggagaggctctgaaagctgcttctgggggatttcaagggactgggggtgccaaccacctctggccctgttgtgggggtgtcacagaggcagtggcagcaacaaaggatttgaaacttggtgtgttcgtggagccacaggcagacgatgtcaaccttgtgtgagtgtgacgggggttggggtggggcgggaggccacgggggaggccgaggcaggggctgggcagaggggagaggaagcacaagaagtgggagtgggagaggaagccacgtgctggagagtagacatccccctccttgccgctgggagagccaaggcctatgccacctgcagcgtctgagcggccgcctgtccttggtggccgggggtgggggcctgctgtgggtcagtgtgccaccctctgcagggcagcctgtgggagaagggacagcgggtaaaaagagaaggcaagctggcaggagggtggcacttcgtggatgacctccttagaaaagactgaccttgatgtcttgagagcgctggcctcttcctccctccctgcagggtagggggcctgagttgaggggcttccctctgctccacagaaaccctgttttattgagttctgaaggttggaactgctgccatgattttggccactttgcagacctgggactttagggctaaccagttctctttgtaaggacttgtgcctcttgggagacgtccacccgtttccaagcctgggccactggcatctctggagtgtgtgggggtctgggaggcaggtcccgagccccctgtccttcccacggccactgcagtcaccccgtctgcgccgctgtgctgttgtctgccgtgagagcccaatcactgcctatacccctcatcacacgtcacaatgtcccgaattcccagcctcaccaccccttctcagtaatgaccctggttggttgcaggaggtacctactccatactgagggtgaaattaagggaaggcaaagtccaggcacaagagtgggaccccagcctctcactctcagttccactcatccaactgggaccctcaccacgaatctcatgatctgattcggttccctgtctcctcctcccgtcacagatgtgagccagggcactgctcagctgtgaccctaggtgtttctgccttgttgacatggagagagccctttcccctgagaaggcctggccccttcctgtgctgagcccacagcagcaggctgggtgtcttggttgtcagtggtggcaccaggatggaagggcaaggcacccagggcaggcccacagtcccgctgtcccccacttgcaccctagcttgtagctgccaacctcccagacagcccagcccgctgctcagctccacatgcatagtatcagccctccacacccgacaaaggggaacacacccccttggaaatggttcttttcccccagtcccagctggaagccatgctgtctgttctgctggagcagctgaacatatacatagatgttgccctgccctccccatctgcaccctgttgagttgtagttggatttgtctgtttatgcttggattcaccagagtgactatgatagtgaaaagaaaaaaaaaaaaaaaaaaggacgcatgtatcttgaaatgcttgtaaagaggtttctaacccaccctcacgaggtgtctctcacccccacactgggactcgtgtggcctgtgtggtgccaccctgctggggcctcccaagttttgaaaggctttcctcagcacctgggacccaacagagaccagcttctagcagctaaggaggccgttcagctgtgacgaaggcctgaagcacaggattaggactgaagcgatgatgtccccttccctacttccccttggggctccctgtgtcagggcacagactaggtcttgtggctggtctggcttgcggcgcgaggatggttctctctggtcatagcccgaagtctcatggcagtcccaaaggaggcttacaactcctgcatcacaagaaaaaggaagccactgccagctggggggatctgcagctcccagaagctccgtgagcctcagccacccctcagactgggttcctctccaagctcgccctctggaggggcagcgcagcctcccaccaagggccctgcgaccacagcagggattgggatgaattgcctgtcctggatctgctctagaggcccaagctgcctgcctgaggaaggatgacttgacaagtcaggagacactgttcccaaagccttgaccagagcacctcagcccgctgaccttgcacaaactccatctgctgccatgagaaaagggaagccgcctttgcaaaacattgctgcctaaagaaactcagcagcctcaggcccaattctgccacttctggtttgggtacagttaaaggcaaccctgagggacttggcagtagaaatccagggcctcccctggggctggcagcttcgtgtgcagctagagctttacctgaaaggaagtctctgggcccagaactctccaccaagagcctccctgccgttcgctgagtcccagcaattctcctaagttgaagggatctgagaaggagaaggaaatgtggggtagatttggtggtggttagagatatgcccccctcattactgccaacagtttcggctgcatttcttcacgcacctcggttcctcttcctgaagttcttgtgccctgctcttcagcaccatgggccttcttatacggaaggctctgggatctcccccttgtggggcaggctcttggggccagcctaagatcatggtttagggtgatcagtgctggcagataaattgaaaaggcacgctggcttgtgatcttaaatgaggacaatccccccagggctgggcactcctcccctcccctcacttctcccacctgcagagccagtgtccttgggtgggctagataggatatactgtatgccggctccttcaagctgctgactcactttatcaatagttccatttaaattgacttcagtggtgagactgtatcctgtttgctattgcttgttgtgctatggggggaggggggaggaatgtgtaagatagttaacatgggcaaagggagatcttggggtgcagcacttaaactgcctcgtaacccttttcatgatttcaaccacatttgctagagggagggagcagccacggagttagaggcccttggggtttctcttttccactgacaggctttcccaggcagctggctagttcattccctccccagccaggtgcaggcgtaggaatatggacatctggttgctttggcctgctgccctctttcaggggtcctaagcccacaatcatgcctccctaagaccttggcatccttccctctaagccgttggcacctctgtgccacctctcacactggctccagacacacagcctgtgcttttggagctgagatcactcgcttcaccctcctcatctttgttctccaagtaaagccacgaggtcggggcgagggcagaggtgatcacctgcgtgtcccatctacagacctgcagcttcataaaacttctgatttctcttcagctttgaaaagggttaccctgggcactggcctagagcctcacctcctaatagacttagccccatgagtttgccatgttgagcaggactatttctggcacttgcaagtcccatgatttcttcggtaattctgagggtggggggagggacatgaaatcatcttagcttagctttctgtctgtgaatgtctatatagtgtattgtgtgttttaacaaatgatttacactgactgttgctgtaaaagtgaatttggaaataaagttattactctgattaaa

SEQ ID NO: 154000 - DNA, 1239 bp, Homo sapiens
  Payload ID: 10267
  Gene Symbol: MAPT
  Gene Name: microtubule-associated protein tau
  Uniprot ID: P10636
  ENST ID: ENST00000613360
  CDS Start-End: 1-1239
atggctgagccccgccaggagttcgaagtgatggaagatcacgctgggacgtacgggttgggggacaggaaagatcaggggggctacaccatgcaccaagaccaagagggtgacacggacgctggcctgaaagaatctcccctgcagacccccactgaggacggatctgaggaaccgggctctgaaacctctgatgctaagagcactccaacagcggaagctgaagaagcaggcattggagacacccccagcctggaagacgaagctgctggtcacgtgacccaagctcgcatggtcagtaaaagcaaagacgggactggaagcgatgacaaaaaagccaagggggctgatggtaaaacgaagatcgccacaccgcggggagcagcccctccaggccagaagggccaggccaacgccaccaggattccagcaaaaaccccacccgctccaaagacaccacccagctctggtgaacctccaaaatcaggggatcgcagcggctacagcagccccggctccccaggcactcccggcagccgctcccgcaccccgtcccttccaaccccacccacccgggagcccaagaaggtggcggtggtccgtactccacccaagtcgccgtcttccgccaagagccgcctgcagacagcccccgtgcccatgccagacctgaagaacgtcaagtccaagatcggctccactgagaacctgaagcaccagccgggaggcgggaaggtgcagataattaataagaagctggatcttagcaacgtccagtccaagtgtggctcaaaggataatatcaaacacgtcccgggaggcggcagtgtgcaaatagtctacaaaccagttgacctgagcaaggtgacctccaagtgtggctcattaggcaacatccatcataaaccaggaggtggccaggtggaagtaaaatctgagaagcttgacttcaaggacagagtccagtcgaagattgggtccctggacaatatcacccacgtccctggcggaggaaataaaaagattgaaacccacaagctgaccttccgcgagaacgccaaagccaagacagaccacggggcggagatcgtgtacaagtcgccagtggtgtctggggacacgtctccacggcatctcagcaatgtctcctccaccggcagcatcgacatggtagactcgccccagctcgccacgctagctgacgaggtgtctgcctccctggccaagcagggtttgtga

SEQ ID NO: 154001 - DNA, 5718 bp, Homo sapiens; identical to SEQ ID NO: 153989
  Payload ID: 10267
  Gene Symbol: MAPT
  Gene Name: microtubule-associated protein tau
  Uniprot ID: P10636
  ENST ID: ENST00000620818
  CDS Start-End: 323-1555

SEQ ID NO: 154002 - DNA, 5811 bp, Homo sapiens; identical to SEQ ID NO: 153981
  Payload ID: 10267
  Gene Symbol: MAPT
  Gene Name: microtubule-associated protein tau
  Uniprot ID: P10636
  ENST ID: ENST00000620070
  CDS Start-End: 323-1648

SEQ ID NO: 154003 - DNA, 543 bp, Homo sapiens
  Payload ID: 10267
  Gene Symbol: MAPT
  Gene Name: microtubule-associated protein tau
  ENST ID: ENST00000625688
  CDS Start-End: 138-317
acccaacagctccggcaccaacagcagcgccgctgccaccgcccaccttctgccgccgccaccacagccaccttctcctcctccgctgtcctctccgtcctcgcctctgtcgactatcaggtgagctttgaaccaggatggctgagccccgccaggagttcgaagtgatggaagatcacgctgggacgtacgggttgggggacaggaaagatcaggggggctacaccatgcaccaagaccaagagggtgacacggacgctggcctgaaagaggggagtgaattcactgagctgagagctgaggaaccattgatctgatggctgagacaccactgggaagactggagaggcttttctgggcatgcagtgccaggcacaggaggagctgagggaagatgactaagagaatctcccctgcagacccccactgaggacggatctgaggaaccgggctctgaaacctctgatgctaagagcactccaacagcggaagctgaagaagcaggcattggagacacccccagcctggaagacgaagctgctg

SEQ ID NO: 154004 - DNA, 2277 bp, Homo sapiens
  Payload ID: 10267
  Gene Symbol: MAPT
  Gene Name: microtubule-associated protein tau
  ENST ID: ENST00000627711
  CDS Start-End: 1-2277
atggctgagccccgccaggagttcgaagtgatggaagatcacgctgggacgtacgggttgggggacaggaaagatcaggggggctacaccatgcaccaagaccaagagggtgacacggacgctggcctgaaagaatctcccctgcagacccccactgaggacggatctgaggaaccgggctctgaaacctctgatgctaagagcactccaacagcggaagatgtgacagcacccttagtggatgagggagctcccggcaagcaggctgccgcgcagccccacacggagatcccagaaggaaccacagctgaagaagcaggcattggagacacccccagcctggaagacgaagctgctggtcacgtgacccaagagcctgaaagtggtaaggtggtccaggaaggcttcctccgagagccaggccccccaggtctgagccaccagctcatgtccggcatgcctggggctcccctcctgcctgagggccccagagaggccacacgccaaccttcggggacaggacctgaggacacagagggcggccgccacgcccctgagctgctcaagcaccagcttctaggagacctgcaccaggaggggccgctgctgaagggggcagggggcaaagagaggccggggagcaaggaggaggtggatgaagaccgcgacgtcgatgagtcctccccccaagactcccctccctccaaggcctccccagcccaagatgggcggcctccccagacagccgccagagaagccaccagcatcccaggcttcccagcggagggtgccatccccctccctgtggatttcctctccaaagtttccacagagatcccagcctcagagcccaacgggcccagtgcagggcgggccaaagggcaggatgcccccctggagttcacgtttcacgtggaaatcacacccaacgtgcagaaggagcaggcgcactcggaggagcatttgggaagggctgcatttccaggggcccctggagaggggccagaggcccggggcccctctttgggagaggacacaaaagaggctgaccttccagagccctctgaaaagcagcctgctgctgctccgcgggggaagcccgtcagctgggtccctcaactcaaagctcgcatggtcagtaaaagcaaagacgggactggaagcgatgacaaaaaagccaagacatccacacgttcctctgctaaaaccttgaaaaataggccttgccttagccccaaacaccccactcctggtagctcagaccctctgatccaaccctccagccctgctgtgtgcccagagccaccttcctctcctaaatacgtctcttctgtcactccccgaactggcagttctggagcaaaggagatgaaactcaagggggctgatggtaaaacgaagatcgccacaccgcggggagcagcccctccaggccagaagggccaggccaacgccaccaggattccagcaaaaaccccacccgctccaaagacaccacccagctctggtgaacctccaaaatcaggggatcgcagcggctacagcagccccggctccccaggcactcccggcagccgctcccgcaccccgtcccttccaaccccacccacccgggagcccaagaaggtggcggtggtccgtactccacccaagtcgccgtcttccgccaagagccgcctgcagacagcccccgtgcccatgccagacctgaagaacgtcaagtccaagatcggctccactgagaacctgaagcaccagccgggaggcgggaaggtgcagataattaataagaagctggatcttagcaacgtccagtccaagtgtggctcaaaggataatatcaaacacgtcccgggaggcggcagtgtgcaaatagtctacaaaccagttgacctgagcaaggtgacctccaagtgtggctcattaggcaacatccatcataaaccaggaggtggccaggtggaagtaaaatctgagaagcttgacttcaaggacagagtccagtcgaagattgggtccctggacaatatcacccacgtccctggcggaggaaataaaaagattgaaacccacaagctgaccttccgcgagaacgccaaagccaagacagaccacggggcggagatcgtgtacaagtcgccagtggtgtctggggacacgtctccacggcatctcagcaatgtctcctccaccggcagcatcgacatggtagactcgccccagctcgccacgctagctgacgaggtgtctgcctccctggccaagcagggtttgtga

SEQ ID NO: 154005 - DNA, 5343 bp, Homo sapiens
  Payload ID: 10267
  Gene Symbol: MAPT
  Gene Name: microtubule-associated protein tau
  Uniprot ID: P10636
  ENST ID: ENST00000626571
  CDS Start-End: 31-1182
tgtcgactatcaggtgagctttgaaccaggatggctgagccccgccaggagttcgaagtgatggaagatcacgctgggacgtacgggttgggggacaggaaagatcaggggggctacaccatgcaccaagaccaagagggtgacacggacgctggcctgaaagctgaagaagcaggcattggagacacccccagcctggaagacgaagctgctggtcacgtgacccaagctcgcatggtcagtaaaagcaaagacgggactggaagcgatgacaaaaaagccaagggggctgatggtaaaacgaagatcgccacaccgcggggagcagcccctccaggccagaagggccaggccaacgccaccaggattccagcaaaaaccccacccgctccaaagacaccacccagctctggtgaacctccaaaatcaggggatcgcagcggctacagcagccccggctccccaggcactcccggcagccgctcccgcaccccgtcccttccaaccccacccacccgggagcccaagaaggtggcggtggtccgtactccacccaagtcgccgtcttccgccaagagccgcctgcagacagcccccgtgcccatgccagacctgaagaacgtcaagtccaagatcggctccactgagaacctgaagcaccagccgggaggcgggaaggtgcagataattaataagaagctggatcttagcaacgtccagtccaagtgtggctcaaaggataatatcaaacacgtcccgggaggcggcagtgtgcaaatagtctacaaaccagttgacctgagcaaggtgacctccaagtgtggctcattaggcaacatccatcataaaccaggaggtggccaggtggaagtaaaatctgagaagcttgacttcaaggacagagtccagtcgaagattgggtccctggacaatatcacccacgtccctggcggaggaaataaaaagattgaaacccacaagctgaccttccgcgagaacgccaaagccaagacagaccacggggcggagatcgtgtacaagtcgccagtggtgtctggggacacgtctccacggcatctcagcaatgtctcctccaccggcagcatcgacatggtagactcgccccagctcgccacgctagctgacgaggtgtctgcctccctggccaagcagggtttgtgatcaggcccctggggcggtcaataatcgtggagaggagagaatgagagagtgtggaaaaaaaaagaataatgacccggcccccgccctctgcccccagctgctcctcgcagttcggttaattggttaatcacttaacctgcttttgtcactcggctttggctcgggacttcaaaatcagtgatgggagtaagagcaaatttcatctttccaaattgatgggtgggctagtaataaaatattttaaaaaaaaacattcaaaaacatggccacatccaacatttcctcaggcaattccttttgattcttttttcttcccccctccatgtagaagagggggaaggagaggctctgaaagctgcttctgggggatttcaagggactgggggtgccaaccacctctggccctgttgtgggggtgtcacagaggcagtggcagcaacaaaggatttgaaacttggtgtgttcgtggagccacaggcagacgatgtcaaccttgtgtgagtgtgacgggggttggggtggggcgggaggccacgggggaggccgaggcaggggctgggcagaggggagaggaagcacaagaagtgggagtgggagaggaagccacgtgctggagagtagacatccccctccttgccgctgggagagccaaggcctatgccacctgcagcgtctgagcggccgcctgtccttggtggccgggggtgggggcctgctgtgggtcagtgtgccaccctctgcagggcagcctgtgggagaagggacagcgggtaaaaagagaaggcaagctggcaggagggtggcacttcgtggatgacctccttagaaaagactgaccttgatgtcttgagagcgctggcctcttcctccctccctgcagggtagggggcctgagttgaggggcttccctctctgctccacagaaaccctgttttattgagttctgaaggttggaactgctgccatgattttggccactttgcagacctgggactttagggctaaccagttctctttgtaaggacttgtgcctcttgggagacgtccacccgtttccaagcctgggccaccggcatctctggagtgtgtgggggtctgggaggcgggtcccgagccccctgtccttcccacggccactgcagtcacccctgtctgccccgctgtgctgttgtctgccgtgagagcccaatcactgcctatacccctcatcacgtcacaatgtcccgaattcccagcctcaccaccccttctcagtaatgaccctggttggttgcaggaggtacctactccatactgagggtgaaattaagggaaggcaaagtccaggcaccagagtgggaccccagcctctcactctcagttccactcatccaactgggaccctcaccacgaatctcacgatctgattcggttccctgtctcctcctcccgtcacagatgtgagccagggcactgctcagctgtgaccctaggtgtttctgccttgttgacatggagagagccctttcccctgagaaggcctggccccttcctgtgctgagcccacagcagcaggctgggtgtcttggttgtcagtggtggcaccaggatggaagggcaaggcacccagggcaggcccacagtcccgctgtcccccacttgcaccctagcttgtagctgccaacctcccagacagcccagcccgctgctcagctccacatgcatagtatcagccctccacacccgacaaaggggaacacacccccttggaaatggttctttccccccagtcccagctggaagccatgctgtctgttctgctggagcagctgaacatatacatagatgttgccctgccctccccatctgcaccctgttgagttgtagttggatttgtctgtttatgcttggattcaccagagtgactatgatagtgaaaagaaaaaaaaaaaaaaaaaaaggacgcatgtatcttgaaatgcttgtaaagaggtttctaacccaccctcacgaggtgtctctcacccccacactgggactcgtgtggcctgtgtggtgccaccctgctggggcctcccaagttttgaaaggctttcctcagcatctgggacccaacagagaccagcttctagcagctaaggaggccgttcagctgtgacgaaggcctgaagcacaggattaggactgaagcgatgatgtccccttccctacttccccttggggctccctgtgtcagggcacagactaggtcttgtggctggtctggcttgcggcgcgaggatggttctctctggtcatagcccgaagtctcacagcagtcccaaaggaggcttacaactcctgcatcacaagaaaaaggaagccactgccagctggggggatctgcagctcccagaagctccgtgagcctcagcctacccctcagactgggttcctctccaagctcgccctctggaggggcagcgcagcctcccaccaagggccctgcgaccacagcagggattgggatgaattgcctgtcctggatctgctctagaggcccaagctgcctgcctgaggaaggatgacttgacaagtcaggagacactgttcccaaagccttgaccagagcacctcagcccgctgaccttgcacaaactccatctgctgccatgagaaaagggaagccgcctttgcaaaacattgctgcctaaagaaactcagcagcctcaggcccaattctgccacttctggtttgggtacagttaaaggcaaccctgagggacttgcagtagaaatccagggcctcccctggggctggcagcttcgtgtgcagctagagctttacctgcaaggaagtctctgggcccagaactctccaccaagagcctccctgccgttcgctgagtcccagcaattctaagttgaagggatctgagaaggagaaggaaatgtggggtagatttggtggtggttagagatatgcccccctcattactgccaacagtttcggccgcatttcttcacgcacctcggttcctcttcctgaagttcttgtgccctgctcttcagcaccatgggccttatacggaaggctctgggatctcccccttgtggggcaggctcttggggccagcctaagatcatggtttagggtgatcagtgctggcagataaattgaaaaggcacgctggcttgtgatcttaaatgaggacaatccccccagggctgggcactcctcccctcccctcacttctcccacctgcagagccagtgtccttgggtgggctagataggatatactgtatgccggctccttcaagctgctgactcactttatcaatagttccatttaaattgacttcagtggtgagactgtatcctgtttgctattgcttgttgtgctatggggggaggggggaggaatgtgtaagatagttaacatgggcaaagggagatcttggggtgcagcacttaaactgcctcgtaacccttttcatgatttcaaccacatttgctagagggagggagcagccacggagttagaggcccttggggtttctcttttccactgacaggctttcccaggcagctggctagttcattccctccccagccaggtgcaggcgtaggaatatggacatctggttgctttggcctgctgccctctttcaggggtcctaagcccacaatcatgcctccctaagaccttggcatccttccctctaagccgttggcacctctgtgccacctctcacactggctccagacacacagcctgtgcttttggagctgagatcactcgcttcaccctcctcatctttgttctccaagtaaagccacgaggtcggggcgagggcagaggtgatcacctgcgtgtcccatctacagacctgcggcttcataaaacttctgatttctcttcagctttgaaaagggttaccctgggcactggcctagagcctcacctcctaatagacttagccccatgagtttgccatgttgagcaggactatttctggcacttgcaagtcccatgatttcttcggtaattctgagggtggggggagggacatgaaatcatcttagcttagctttctgtctgtgaatgtctatatagtgtattgtgtgttttaacaaatgatttacactgactgttgctgtaaaagtgaatttggaaataaagttattactctgattaaa

SEQ ID NO: 154006 - DNA, 2331 bp, Homo sapiens
  Payload ID: 10267
  Gene Symbol: MAPT
  Gene Name: microtubule-associated protein tau
  ENST ID: ENST00000629368
  CDS Start-End: 1-2331
atggctgagccccgccaggagttcgaagtgatggaagatcacgctgggacgtacgggttgggggacaggaaagatcaggggggctacaccatgcaccaagaccaagagggtgacacggacgctggcctgaaagaatctcccctgcagacccccactgaggacggatctgaggaaccgggctctgaaacctctgatgctaagagcactccaacagcggaagatgtgacagcacccttagtggatgagggagctcccggcaagcaggctgccgcgcagccccacacggagatcccagaaggaaccacagctgaagaagcaggcattggagacacccccagcctggaagacgaagctgctggtcacgtgacccaagagcctgaaagtggtaaggtggtccaggaaggcttcctccgagagccaggccccccaggtctgagccaccagctcatgtccggcatgcctggggctcccctcctgcctgagggccccagagaggccacacgccaaccttcggggacaggacctgaggacacagagggcggccgccacgcccctgagctgctcaagcaccagcttctaggagacctgcaccaggaggggccgctgctgaagggggcagggggcaaagagaggccggggagcaaggaggaggtggatgaagaccgcgacgtcgatgagtcctccccccaagactcccctccctccaaggcctccccagcccaagatgggcggcctccccagacagccgccagagaagccaccagcatcccaggcttcccagcggagggtgccatccccctccctgtggatttcctctccaaagtttccacagagatcccagcctcagagcccaacgggcccagtgcagggcgggccaaagggcaggatgcccccctggagttcacgtttcacgtggaaatcacacccaacgtgcagaaggagcaggcgcactcggaggagcatttgggaagggctgcatttccaggggcccctggagaggggccagaggcccggggcccctctttgggagaggacacaaaagaggctgaccttccagagccctctgaaaagcagcctgctgctgctccgcgggggaagcccgtcagctgggtccctcaactcaaagctcgcatggtcagtaaaagcaaagacgggactggaagcgatgacaaaaaagccaagacatccacacgttcctctgctaaaaccttgaaaaataggccttgccttagccccaaacaccccactcctggtagctcagaccctctgatccaaccctccagccctgctgtgtgcccagagccaccttcctctcctaaatacgtctcttctgtcactccccgaactggcagttctggagcaaaggagatgaaactcaagggggctgatggtaaaacgaagatcgccacaccgcggggagcagcccctccaggccagaagggccaggccaacgccaccaggattccagcaaaaaccccacccgctccaaagacaccacccagctctgcgaccaagcaagtccagagaagaccaccccctgcagggcccagatctgagagaggtgaacctccaaaatcaggggatcgcagcggctacagcagccccggctccccaggcactcccggcagccgctcccgcaccccgtcccttccaaccccacccacccgggagcccaagaaggtggcggtggtccgtactccacccaagtcgccgtcttccgccaagagccgcctgcagacagcccccgtgcccatgccagacctgaagaacgtcaagtccaagatcggctccactgagaacctgaagcaccagccgggaggcgggaaggtgcagataattaataagaagctggatcttagcaacgtccagtccaagtgtggctcaaaggataatatcaaacacgtcccgggaggcggcagtgtgcaaatagtctacaaaccagttgacctgagcaaggtgacctccaagtgtggctcattaggcaacatccatcataaaccaggaggtggccaggtggaagtaaaatctgagaagcttgacttcaaggacagagtccagtcgaagattgggtccctggacaatatcacccacgtccctggcggaggaaataaaaagattgaaacccacaagctgaccttccgcgagaacgccaaagccaagacagaccacggggcggagatcgtgtacaagtcgccagtggtgtctggggacacgtctccacggcatctcagcaatgtctcctccaccggcagcatcgacatggtagactcgccccagctcgccacgctagctgacgaggtgtctgcctccctggccaagcagggtttgtga

SEQ ID NO: 154007 - DNA, 1107 bp, Homo sapiens
  Payload ID: 10267
  Gene Symbol: MAPT
  Gene Name: microtubule-associated protein tau
  Uniprot ID: P10636
  ENST ID: ENST00000628393
  CDS Start-End: 37-1095
cgcctctgtcgactatcaggtgagctttgaaccaggatggctgagccccgccaggagttcgaagtgatggaagatcacgctgggacgtacgggttgggggacaggaaagatcaggggggctacaccatgcaccaagaccaagagggtgacacggacgctggcctgaaagctgaagaagcaggcattggagacacccccagcctggaagacgaagctgctggtcacgtgacccaagctcgcatggtcagtaaaagcaaagacgggactggaagcgatgacaaaaaagccaagggggctgatggtaaaacgaagatcgccacaccgcggggagcagcccctccaggccagaagggccaggccaacgccaccaggattccagcaaaaaccccacccgctccaaagacaccacccagctctggtgaacctccaaaatcaggggatcgcagcggctacagcagccccggctccccaggcactcccggcagccgctcccgcaccccgtcccttccaaccccacccacccgggagcccaagaaggtggcggtggtccgtactccacccaagtcgccgtcttccgccaagagccgcctgcagacagcccccgtgcccatgccagacctgaagaacgtcaagtccaagatcggctccactgagaacctgaagcaccagccgggaggcgggaaggtgcaaatagtctacaaaccagttgacctgagcaaggtgacctccaagtgtggctcattaggcaacatccatcataaaccaggaggtggccaggtggaagtaaaatctgagaagcttgacttcaaggacagagtccagtcgaagattgggtccctggacaatatcacccacgtccctggcggaggaaataaaaagattgaaacccacaagctgaccttccgcgagaacgccaaagccaagacagaccacggggcggagatcgtgtacaagtcgccagtggtgtctggggacacgtctccacggcatctcagcaatgtctcctccaccggcagcatcgacatggtagactcgccccagctcgccacgctagctgacgaggtgtctgcctccctggccaagcagggtttgtgatcaggcccctgg

SEQ ID NO: 154008 - DNA, 544 bp, Homo sapiens; identical to SEQ ID NO: 153991
  Payload ID: 10267
  Gene Symbol: MAPT
  Gene Name: microtubule-associated protein tau
  ENST ID: ENST00000633415
  CDS Start-End: 139-318

SEQ ID NO: 154009 - DNA, 1326 bp, Homo sapiens; identical to SEQ ID NO: 153992
  Payload ID: 10267
  Gene Symbol: MAPT
  Gene Name: microtubule-associated protein tau
  Uniprot ID: P10636
  ENST ID: ENST00000634049
  CDS Start-End: 1-1326

SEQ ID NO: 154010 - DNA, 1239 bp, Homo sapiens; identical to SEQ ID NO: 153988
  Payload ID: 10267
  Gene Symbol: MAPT
  Gene Name: microtubule-associated protein tau
  Uniprot ID: P10636
  ENST ID: ENST00000632500
  CDS Start-End: 1-1239

SEQ ID NO: 154011 - DNA, 2331 bp, Homo sapiens
  Payload ID: 10267
  Gene Symbol: MAPT
  Gene Name: microtubule-associated protein tau
  ENST ID: ENST00000633801
  CDS Start-End: 1-2331
atggctgagccccgccaggagttcgaagtgatggaagatcacgctgggacgtacgggttgggggacaggaaagatcaggggggctacaccatgcaccaagaccaagagggtgacacggacgctggcctgaaagaatctcccctgcagacccccactgaggacggatctgaggaaccgggctctgaaacctctgatgctaagagcactccaacagcggaagatgtgacagcacccttagtggatgagggagctcccggcaagcaggctgccgcgcagccccacacggagatcccagaaggaaccacagctgaagaagcaggcattggagacacccccagcctggaagacgaagctgctggtcacgtgacccaagagcctgaaagtggtaaggtggtccaggaaggcttcctccgagagccaggccccccaggtctgagccaccagctcatgtccggcatgcctggggctcccctcctgcctgagggccccagagaggccacacgccaaccttcggggacaggacctgaggacacagagggcggccgccacgcccctgagctgctcaagcaccagcttctaggagacctgcaccaggaggggccgccgctgaagggggcagggggcaaagagaggccggggagcaaggaggaggtggatgaagaccgcgacgtcgatgagtcctccccccaagactcccctccctccaaggcctccccagcccaagatgggcggcctccccagacagccgccagagaagccaccagcatcccaggcttcccagcggagggtgccatccccctccctgtggatttcctctccaaagtttccacagagatcccagcctcagagcccgatgggcccagtgtagggcgggccaaagggcaggatgcccccctggagttcacgtttcacgtggaaatcacacccaacgtgcagaaggagcaggcgcactcggaggagcatttgggaagggctgcatttccaggggcccctggagaggggccagaggcccggggcccctctttgggagaggacacaaaagaggctgaccttccagagccctctgaaaagcagcctgctgctgctccgcgggggaagcccgtcagccgggtccctcaactcaaagctcgcatggtcagtaaaagcaaagacgggactggaagcgatgacaaaaaagccaagacatccacacgttcctctgctaaaaccttgaaaaataggccttgccttagccccaaacaccccactcctggtagctcagaccctctgatccaaccctccagccctgctgtgtgcccagagccaccttcctctcctaaacacgtctcttctgtcacttcccgaactggcagttctggagcaaaggagatgaaactcaagggggctgatggtaaaacgaagatcgccacaccgcggggagcagcccctccaggccagaagggccaggccaacgccaccaggattccagcaaaaaccccgcccgctccaaagacaccacccagctctgcgactaagcaagtccagagaagaccaccccctgcagggcccagatctgagagaggtgaacctccaaaatcaggggatcgcagcggctacagcagccccggctccccaggcactcccggcagccgctcccgcaccccgtcccttccaaccccacccacccgggagcccaagaaggtggcagtggtccgtactccacccaagtcgccgtcttccgccaagagccgcctgcagacagcccccgtgcccatgccagacctgaagaatgtcaagtccaagatcggctccactgagaacctgaagcaccagccgggaggcgggaaggtgcagataattaataagaagctggatcttagcaacgtccagtccaagtgtggctcaaaggataatatcaaacacgtcccgggaggcggcagtgtgcaaatagtctacaaaccagttgacctgagcaaggtgacctccaagtgtggctcattaggcaacatccatcataaaccaggaggtggccaggtggaagtaaaatctgagaagcttgacttcaaggacagagtccagtcgaagattgggtccctggacaatatcacccacgtccctggcggaggaaataaaaagattgaaacccacaagctgaccttccgcgagaacgccaaagccaagacagaccacggggcggagatcgtgtacaagtcgccagtggtgtctggggacacgtctccacggcatctcagcaatgtctcctccaccggcagcatcgacatggtagactcgccccagctcgccacgctagctgacgaggtgtctgcctccctggccaagcagggtttgtga

SEQ ID NO: 154012 - DNA, 2277 bp, Homo sapiens
  Payload ID: 10267
  Gene Symbol: MAPT
  Gene Name: microtubule-associated protein tau
  ENST ID: ENST00000633054
  CDS Start-End: 1-2277
atggctgagccccgccaggagttcgaagtgatggaagatcacgctgggacgtacgggttgggggacaggaaagatcaggggggctacaccatgcaccaagaccaagagggtgacacggacgctggcctgaaagaatctcccctgcagacccccactgaggacggatctgaggaaccgggctctgaaacctctgatgctaagagcactccaacagcggaagatgtgacagcacccttagtggatgagggagctcccggcaagcaggctgccgcgcagccccacacggagatcccagaaggaaccacagctgaagaagcaggcattggagacacccccagcctggaagacgaagctgctggtcacgtgacccaagagcctgaaagtggtaaggtggtccaggaaggcttcctccgagagccaggccccccaggtctgagccaccagctcatgtccggcatgcctggggctcccctcctgcctgagggccccagagaggccacacgccaaccttcggggacaggacctgaggacacagagggcggccgccacgcccctgagctgctcaagcaccagcttctaggagacctgcaccaggaggggccgccgctgaagggggcagggggcaaagagaggccggggagcaaggaggaggtggatgaagaccgcgacgtcgatgagtcctccccccaagactcccctccctccaaggcctccccagcccaagatgggcggcctccccagacagccgccagagaagccaccagcatcccaggcttcccagcggagggtgccatccccctccctgtggatttcctctccaaagtttccacagagatcccagcctcagagcccgatgggcccagtgtagggcgggccaaagggcaggatgcccccctggagttcacgtttcacgtggaaatcacacccaacgtgcagaaggagcaggcgcactcggaggagcatttgggaagggctgcatttccaggggcccctggagaggggccagaggcccggggcccctctttgggagaggacacaaaagaggctgaccttccagagccctctgaaaagcagcctgctgctgctccgcgggggaagcccgtcagccgggtccctcaactcaaagctcgcatggtcagtaaaagcaaagacgggactggaagcgatgacaaaaaagccaagacatccacacgttcctctgctaaaaccttgaaaaataggccttgccttagccccaaacaccccactcctggtagctcagaccctctgatccaaccctccagccctgctgtgtgcccagagccaccttcctctcctaaacacgtctcttctgtcacttcccgaactggcagttctggagcaaaggagatgaaactcaagggggctgatggtaaaacgaagatcgccacaccgcggggagcagcccctccaggccagaagggccaggccaacgccaccaggattccagcaaaaaccccgcccgctccaaagacaccacccagctctggtgaacctccaaaatcaggggatcgcagcggctacagcagccccggctccccaggcactcccggcagccgctcccgcaccccgtcccttccaaccccacccacccgggagcccaagaaggtggcagtggtccgtactccacccaagtcgccgtcttccgccaagagccgcctgcagacagcccccgtgcccatgccagacctgaagaatgtcaagtccaagatcggctccactgagaacctgaagcaccagccgggaggcgggaaggtgcagataattaataagaagctggatcttagcaacgtccagtccaagtgtggctcaaaggataatatcaaacacgtcccgggaggcggcagtgtgcaaatagtctacaaaccagttgacctgagcaaggtgacctccaagtgtggctcattaggcaacatccatcataaaccaggaggtggccaggtggaagtaaaatctgagaagcttgacttcaaggacagagtccagtcgaagattgggtccctggacaatatcacccacgtccctggcggaggaaataaaaagattgaaacccacaagctgaccttccgcgagaacgccaaagccaagacagaccacggggcggagatcgtgtacaagtcgccagtggtgtctggggacacgtctccacggcatctcagcaatgtctcctccaccggcagcatcgacatggtagactcgccccagctcgccacgctagctgacgaggtgtctgcctccctggccaagcagggtttgtga

SEQ ID NO: 154013 - DNA, 6778 bp, Homo sapiens
  Payload ID: 10267
  Gene Symbol: MAPT
  Gene Name: microtubule-associated protein tau
  ENST ID: ENST00000632122
  CDS Start-End: 5493-6518
aagggccctgaaactaaatgtgtccccttaggaaagcaggagttttcttgcaagtggcaatcttctgcttatgtctcattggccagagctgggtcttacggccaccccttgctgcgagcaaggctgggacattgagcattttgccgtccaacctctttagcagaataaaccaagggggaagaacgttaatagtggcttttgagtcactagttggcagtatctgcccctctatctttccatcctccccatggagtttcaaggttcctttctcagtacttcttcaggctctgcacgttcatttggatcttgtgtcttggggtgaaaaactggcccaagtgtctccccaagcatccacctttggattaatttggaaaatggctgtcaagtgcccgcctcttgcttggtataatgctacagctttagaggacgcagcaggcatgggccttgccgctgaggttcttagcctcatgagaatatccagatcagattctcttggctccttcttagagccagtgatgcaagacacttcctgctcatcttgtcgggacggttttacaagttgcctgccatcctgagaaagtctacaaaacgatgccagacctcatgccagcttcccaagccttgactctcagtgctccctcaacaggattctggaagaatctcccaaacaagtcgcaatcccctctggaccctgtgcaggcatgagactcaagagcattggctcccacccctggtggagggaacactgctggggctgggatcttgcctggttgctccgcctgcacccaagacaaccataattaaaatgtccttcattgaacttggaaagccttcaaagctgacaactccttatgtgtacccggaaaggcctgggagtgtgccagggcattgctcgggagggacgctgatttggaagcatttacctgatgagagactgacagcagctcctggtagccgagctttccctcctgcctctgctgtgaaggtggacccatccaacagtcaaatgcctgactctggacaggagcggacctatttattgccatgcaagggactctgcacttttgaattgtgggtcatgggcttggatttaggggttagagctgggagaagtcttggaagtcacctagagatgacactgccattttgcagatgaggaaaccgtccaatcaaaatggaccaaggacttgcccaaagcctcacagcaaaaccataggcccccgcactaaccccagagtccctgtgctgtcttaagaatcaaatagttgtaagcaatcatctggttttcagtatttcttcttttaaaatgcctggggccatgcccagcagtctgtttcactgcagcgtttacacagggctgccgggctttcctggtggatgagctgggcggttcatgagccagaaccactcagcagcatgtcagtgtgcttcctggggagctggtagcaggggctccgggccctacttcagggctgctttctggcatatggctgatcccctcctcactcctcctccctgcattgctcctgcgcaagaagcaaaggtgaggggctgggtatggctcgtcctggcccctctaaggtggatctcggtggtttctagatgtgacagcacccttagtggatgagggagctcccggcaagcaggctgccgcgcagccccacacggagatcccagaaggaaccacaggtgagggtaagccccagagacccccaggcagtcaaggccctgctgggtgccccagctgacctgtgacagaagtgagggagctttgcgtgtttatcctcctgtggggcaggaacatgggtggattctggctcctgggaatcttgggttgtgagtagctcgatgccttggtgctcagttacctccctggctgcctgccagcctctcagagcatttagggccttctggacttctagatgctcctcatcttgcctcagtcagcgcgtcagttccagagacttctctgcagggttttctggggcaggtggtggcagacccgtgccttcttgacacctgaggtcagtccaccctcctgctcagactgcccagcacagggtcacctcccaaggggtggaccccaagatcacctgagcgcacagagggtgcagatgactggaccacaccttttggtgatcttaatgaggtggtcccagaggagctcagacatgcaatctagcatccagttctgggactctgtctccttttcaaacgtattcatgtagaacaggcatgacgagaatgccttgtcaacatgggtgatggggaatcaatcagacagggcgccgggctcaaggctgcagtcacccaagagtggctcagcccaccaggccctaggaaacgcctgcacagcctggagctcctggagtcatttccttcatgtcttcttcactgcacttacgtaaagatgccagccattggtttggtgatttggagggtgcccagttgcccaacaagaaatgcagaagaggcctagccaggatttcaccagcagtggagagtagagaagatgtggccagaaaagagtttcctttccctcctaaagatggtactccctgcagctactggggaagcctgcagcattctctagggctctgtgtgttgagagcagccccaccctggccccttctgagtgcatttctgctttgtgacttgatccgtgaagtcccctgagatgggcagaggggatgtcctcgaagctggggcagagcctcatccttgaacgtgaaggacgtttgaagactgtggcatgatcacaggatgagatcacagggaacttgagtttctctcctcctctcccttcacagttatttcactgagggaaatccctcccctgcccagaatgaaaactctagccaactcttgacttttccatcactccaaagtagttgaaagtacattagtctccacagtggcaaaacagtgtgcaaaagctaaataattagaacagccagtcccatgtgacagtcaaagcttctaactccattcaaagttgcagccattcccctcgagggctggcagggaggggaggggtaagagaaacaggaaggttcttactgagttggtcctggtgtgagctgcgtcacactccctgcagaggtttcaaggagactctctctctctctgtctccatggggaccttatttgaattcttctactcttaccccagcctgccatctccagctatcctcccctgaagagcccttctgctgcgctggattctggtggccatgtcatctcctcggccccgtgggagtctgaagatctggctgcagcctcacctctgaggtcctgctagttgccacctcttaaacatgatctgaggctcccatgcactctgacctgtgcccacatggggcccacgggaaacacgccggcaagcaaactgtgggtgtgcagacggttctcagggctgcagcacctgtcctttgctctgcccccaaagcaaggccagcccatcttccatcctctagtgttccttggtggggccctgaccacagtccaccaggtccctaaccagaggggacacacaccaggtgtcctcaatgtattgccttgaaacagttgtgctgggactgtgatggggggtggccatgtagccacccccaccacccccaagccactctctccaaggaaatcctcctaaagatccctttacatcctccatgtggtggggaggttctagagttgggtgcatgtgtcttcagctactgacaatgcagaccttagttggcacctcgctctggcctatcctgtttgctgttcttggcgctccagtgaaactccccatgggccatccagttggggtgcagtgtggccacccccttgcaggttcctgccttgctggagagcacagggccctcctggctcttgtaaaacactccccatggtacagagaggccagcagtgatgtgaggcccaacctccctccatggtgttcccaagcagctccctttctggggtcaaggggtggcaaagacagtgcagcgtccaatttctgactcaagccgggcctggctatcgcagctctgcactgtgtgtgacagcaaggcaactcacccagtgccgtggcagtgaccgtgtccgaggaagcctcctcacaccctctgtctcaaggactctggcatttagctggacttgctgtagctctgagcctttctgccattgccatcaccttgtcagaaactcaggccgaatctgcactcagagttgtgcccaggcagttgagccaacacttgctcagcgatattgtcacatgacaaggcactgtcaccactgggcgtcgtgggtagcgcagtgtcggctggatggacccggagggtgtctgtgtcatgctagtgctagtgatgggagccccgtgagcccattgcccgccctcccatgccctcagcagctgcctggggacagccaatggcctgggtgtttctgaggctaccacatggcttccaggaaactcgagaacctttctctcccttgcctacactcttcacacaggcctgtgctggccagcggtggggatccggcattcctatcttaggtgcagaaagtgactgactcattgcaggcctgggagataagactgatggcccagccagcaagatgtatggatttctcagaggcagtggcctctgtcattgtcctcaggaaatgctggtgattctggtggcctgaggtcaatgcatgtcaacgtggccaacttgccttataaactttttttctggacaattgcgtgcactgtcctgtaacagtgtcctgttgtttatgatgcagaaataggtgtttttaaagcctattgattttggtactattaatgtggtcaggaactttctcagtctttcttgtttggggtgagctgtggcttcctaaacaggaacccaagacacccccaaaagctgctcaccagcactgccagcctccctcttaccaagtagcacccgttcaggacattctgcgaaaggcatttgcccagaagttgggaggaaggaaatgtaacattttggggcacctaccatatgccaggcaccaggctaaacgtgttcacacaaattctcttactaaccctcaccatccttctacaagacaaactagtatcttcatcttggggttcaagatgaggaaatggaggctcagagaggttgaatgaatgccggtgcctggatatgaaccccatctgcctgactccgcaacccaggcaaagtctttccttgaacttcccagcagccactgcttagacacagcctccacaaccatggctcagcagcaaattgcttctctgacctcactcagcctgtgtgtccttgttgagtgaggcattcaggaccctggtcccaaagtggagaaagtctttcctactaggtcatagctacacctgcatgtgggtgctgtgccttttgtttagtgaacttttatcaccagcatcctcagcaatgacatttgcagagaagccagagctgaggcaccttggtattcttgggatgtgactttcctgaatgtttaagggaaaatgcccgaaggtacagagagcttggtttctagtaaacaataactgtcttgcttttaccccccttcatttgctgacacatacaccagctgaagaagcaggcattggagacacccccagcctggaagacgaagctgctggtcacgtgacccaagctcgcatggtcagtaaaagcaaagacgggactggaagcgatgacaaaaaagccaagggggctgatggtaaaacgaagatcgccacaccgcggggagcagcccctccaggccagaagggccaggccaacgccaccaggattccagcaaaaaccccgcccgctccaaagacaccacccagctctggtgaacctccaaaatcaggggatcgcagcggctacagcagccccggctccccaggcactcccggcagccgctcccgcaccccgtcccttccaaccccacccacccgggagcccaagaaggtggcagtggtccgtactccacccaagtcgccgtcttccgccaagagccgcctgcagacagcccccgtgcccatgccagacctgaagaatgtcaagtccaagatcggctccactgagaacctgaagcaccagccgggaggcgggaaggtgcaaatagtctacaaaccagttgacctgagcaaggtgacctccaagtgtggctcattaggcaacatccatcataaaccaggaggtggccaggtggaagtaaaatctgagaagcttgacttcaaggacagagtccagtcgaagattgggtccctggacaatatcacccacgtccctggcggaggaaataaaaagattgaaacccacaagctgaccttccgcgagaacgccaaagccaagacagaccacggggcggagatcgtgtacaagtcgccagtggtgtctggggacacgtctccacggcatctcagcaatgtctcctccaccggcagcatcgacatggtagactcgccccagctcgccacgctagctgacgaggtgtctgcctccctggccaagcagggtttgtgatcaggcccctggggcggtcaataattgtggagaggagagaatgagagagtgtggaaaaaaaaagaataatgacccggcccccgccctctgcccccagctgctcctcgcagttcggttaattggttaatcacttaacctgcttttgtcactcggctttggctcgggacttcaaaatcagtgatgggagtaagagcaaatttcatctttccaaattgatgggtgggctagtaataaaatatttaaaaaaaaacattcaaaaa

SEQ ID NO: 154014 - DNA, 1107 bp, Homo sapiens; identical to SEQ ID NO: 153982
  Payload ID: 10267
  Gene Symbol: MAPT
  Gene Name: microtubule-associated protein tau
  Uniprot ID: P10636
  ENST ID: ENST00000633047
  CDS Start-End: 37-1095

SEQ ID NO: 154015 - DNA, 1233 bp, Homo sapiens; identical to SEQ ID NO: 153985
  Payload ID: 10267
  Gene Symbol: MAPT
  Gene Name: microtubule-associated protein tau
  Uniprot ID: P10636
  ENST ID: ENST00000631447
  CDS Start-End: 1-1233

SEQ ID NO: 154016 - DNA, 2623 bp, Homo sapiens
  Payload ID: 10268
  Gene Symbol: MAPRE1
  Gene Name: microtubule-associated protein, RP/EB family, member 1
  Uniprot ID: Q15691
  ENST ID: ENST00000375571
  CDS Start-End: 140-946
ctttacgtcggcgcgtaacgagggggtgcgtgtgaggtcatcgcgcgggcgggcgggcggggtctggcggtttgaacgagacgaagacggaaccggagccggttgcgggcagtggacgcggttctgccgagagccgaagatggcagtgaacgtatactcaacgtcagtgaccagtgataacctaagtcgacatgacatgctggcctggatcaatgagtctctgcagttgaatctgacaaagatcgaacagttgtgctcaggggctgcgtattgtcagtttatggacatgctgttccctggctccattgccttgaagaaagtgaaattccaagctaagctagaacacgagtacatccagaacttcaaaatactacaagcaggttttaagagaatgggtgttgacaaaataattcctgtggacaaattagtaaaaggaaagtttcaggacaattttgaattcgttcagtggttcaagaagtttttcgatgcaaactatgatggaaaagactatgaccctgtggctgccagacaaggtcaagaaactgcagtggctccttcccttgttgctccagctctgaataaaccgaagaaacctctcacttctagcagtgcagctccccagaggcccatctcaacacagagaaccgctgcggctcctaaggctggccctggtgtggtgcgaaagaaccctggtgtgggcaacggagacgacgaggcagctgagttgatgcagcaggtcaacgtattgaaacttactgttgaagacttggagaaagagagggatttctacttcggaaagctacggaacattgaattgatttgccaggagaacgagggggaaaacgaccctgtattgcagaggattgtagacattctgtatgccacagatgaaggctttgtgatacctgatgaagggggcccacaggaggagcaagaagagtattaacagcctggaccagcagagcaacatcggaattcttcactccaaatcatgtgcttaactgtaaaatactcccttttgttatccttagaggactcactggtttcttttcataagcaaaaagtacctcttcttaaagtgcactttgcagacgtttcactccttttccaataagtttgagttaggagcttttaccttgtagcagagcagtattaacacctagttggttcacctggaaaacagagaggctgaccgtggggctcaccatgcggatgcgggtcacactgaatgctggagagatgttatgtaatatgctgaggtggcgacctcagtggagaaatgtaaagactgaattgaattttaagctaatgtgaaatcagagaatgttgtaataagtaaatgccttaagagtatttaaaatatgcttccacatttcaaaatataaaatgtaacatgacaagagattttgcgtttgacattgtgtctgggaaggaagggccagaccttggaacctttggaacctgctgtcaacaggtcttacagggctgcttgaaccctcataggcctaggctttggtctaaaaggaacatttaaaaagttgccctgtaaagttatttggtgtcattgaccaattgcatcccagctaaaaagcaagaggcatcgttgcctggataatagaggatgtgtttcagccctgagatgttacagttgaagagcttggttttcattgagcatttctctatttttccagttatccccgaaatttctatgtattatattttttggggaagtgaggtgtgcccagttttttaatctaacaactacttttggggacttgcccacatctctgggatttgaatggggattgtatcccattttactgtcttttaggtttacatttaccacgtttctcttctctgctccccttgcccactggggactcctctttggctccttgaagtttgctgcttagagttggaagtgcagcaggcaggtgatcatgctgcaagttctttctggacctctggcaaagggagtggtcagtgaaggccatcgttaccttgggatctgccaggctggggtgttttcggtatctgctgttcacagctctccactgtaatccgaatactttgccagtgcactaatctctttggagataaaattcattagtgtgttactaaatgttaattttcttttgcggaaaatacagtaccgtgtctgaattaattattaatatttaaaatacttcattccttaactctccctcatttgctttgcccacagcctattcagttcctttgtttggcaggattctgcaaaatgtgtctcacccactactgagattgttcagcccctgatgtatttgtattgatttgtttctggtggtagcttgtcctgaaatgtgtgtagaaagcaagtattttatgataaaaatgttgtgtagtgcatgctctgtgtggaattcagaggaaaacccagattcagtgattaacaatgccaaaaaatgcaagtaactagccattgttcaaatgacagtggtgctatttctcttttgtggccttttagacttttgttgccctaaaattccattttattgggaacccattttccacctggtctttcttgacagggtttttttctactttaaacagtttctaaataaaattctgtatttcaagagta

SEQ ID NO: 154017 - DNA, 4265 bp, Homo sapiens
  Payload ID: 10269
  Gene Symbol: MAPRE2
  Gene Name: microtubule-associated protein, RP/EB family, member 2
  Uniprot ID: Q15555
  ENST ID: ENST00000300249
  CDS Start-End: 181-1164
gtcagctgccagagggcggggccgcaggagggcggggcgcgagcgagagctgggagaaggcagtgagcgagcaggcggcaggcacggtccgtgcggagcaggcgagcgagcgggaagacgcagccaccttcctcaccagccagcccacagcggtttgttccccttctcgggagtgcgccaatgcctgggccgacccaaaccctgtccccaaatggcgagaacaacaacgacatcatccaggataataacgggaccatcattcctttccggaagcacacagtgcgcggggagcgttcctacagttggggaatggcggtcaatgtgtattctacctcgataacccaagagactatgagcagacatgacatcattgcatgggttaatgacatagtatctttaaactacacaaaagtggaacagctttgttcaggagcggcctattgccaattcatggacatgctcttccctggctgcattagtttgaagaaagtaaaatttcaagcaaagctggaacatgaatatattcacaattttaaacttctgcaagcatcatttaagcgaatgaacgttgataaggtaattccagtggagaagctagtgaaaggacgtttccaggacaacctggattttattcaatggtttaagaaattctatgatgctaactacgatgggaaggagtatgatcctgtagaggcacgacaagggcaagatgcaattcctcctcctgaccctggtgaacagatcttcaacctgccaaaaaagtctcaccatgcaaactcccccacagcaggtgcagctaaatcaagtccagcagctaaaccaggatccacaccttctcgaccctcatcagccaaaagggcttcttccagtggctcagcatccaaatccgataaagatttagaaacgcaggtcatacagcttaatgaacaggtacattcattaaaacttgcccttgaaggcgtggaaaaggaaagggatttctactttgggaagttgagagagatcgagctactctgccaagaacacgggcaggaaaatgatgacctcgtgcagagactaatggacatcctgtatgcttcagaagaacacgagggccacacagaagagccggaagcagaggagcaagcccacgaacagcagcccccgcagcaggaagagtactgacccaccccggctgctcttgacacttccattgtgtgtgggaacgtttcttctggagaattggaacatgtgtggccccaagctcaacagaaaccagttgttcccaatctgccgttaccatcaacgcactgttgcatatgccagccactgcgcttggttcccattttctttgccaaggtgtattagcggacggccctctggccacctacccgagagatcgtagggtcacatacatccaacttcaccacttggctgcttgagattggttctgctcttttcttcatttctttccagaacaactctttcccaccccaacaccactgccaccacccctctttttatcctggtgtgaaacaatggtaatttgatatatggtatttatattggcatttttcaacccagtgtcactagatgtcacacacatttgtggtgctttgatgtttgcaagtctaacctctgaacataaatttggtcaaataattggaacaaagggaaacagatacttgatatgaaagccataatgacggtgacttgtgtcgtgggggaaaacataaggtcattttctccctctactcacaatactaaagggaaaaaatggattcaaagctaggatttcagggcccagcagtgttcctccatcagcatgttagacaactacacagtatgttgttagttttgaaagacattcactcaaggaaaacaccatctcaactttgcccgctcaccatgtcccttgcccccatgtagcccatttcccaggttatgctcttttctttctcagggtcctctttggtgggcagccactccccgagatgttgccatcagttttctgcagtccaaagagggtatggttaggtacgggtcttcctgcctcattcctcttcctctttgtgtaggtttcagccacaaaactgtcattcactctaggggacccctactaaagggtaacttcaggtgtgcagccctgagctccaaggctctgcaccatgccacacacttgctgtaaggctagaagtgaagaccttattaataggagcataattgcgagggagaatcatggttctgcagtctggtgtagacactggaataacagcacagaaaaatctatgactcccaatatcttctagaataaagaattttccctctttaacacaagggccctccttgtcattgaccttagctaaaccatggcaattcataaatagaggaaacattaatgaattaaaagcattccttattttttaactaatatttgtacattttcttagtctctttccaagtctttgcctcttttttttctttatttttattttttcctttgacagatggtatcccttcctggatcattcatttcaccttggtttctaactttaggtttactttcacttgttatttgacttagcaggtgcaacaaaaacaagaaacaaatgtgcccaccccactttccgcttaactgaaaagcttaaaataaatttctgaattatgtatcctgaagctttgaaatttctttattaatcgatgaaatatgaattctaaattctagcattgaagcttttcaccaaaagaagtctctccaaaataaatcttttgcagcaaagtgatatttattgagttatgtggaaaagatggcttgtatttttcagattattacaacacactgtgcagaattagacagatgttccgtggtgtttggtttccctttcttctctctcctgctcactctgcattatagcagcagcttatttctctaaggctggacagcctggctctcggcagtgacgtcctcccacacctggtcacaagtagtagtggctgtgctatacccagcatcatgcttaacagcgtgttgcccttctgagcctgttgtactcactgatctctttaaaaacaaaaaatagctcttgtaaaaggtcacaataactctatgcacctgatactgcagtggttcctaggccattcttcatctgctctggacatctcagtcatacccaatgctcagtggatcatgaccaaactcctgtcatgtggatgcacgtgagtgggtagcagggagtcaggatcctgccttctccagcaaccccttactgctgtataacttgcataagcctccctggtgactcttgcaggaaccactccattgccctccagctccccagccttctcagttataaacatgctggccagatctcttagcctgcaaagagaactttccccagtcaccatagaccattctccttcctgaaggcttggggcagaccattcgtttatttagagaagagctatacattcttctttctggtcccatcttaaacgtcttctgttgtgctgcaccccagatggtgtctcagatgctttggggaatctttaacagctgaatttgagtcagtcctcttaggctgcacctccagcctctgcagatcccccctcatttcccatggatggtgggaccccattattctctcatctcggcattcagggaacagtttccttagcggcccctggtcacatgtcatcgggctgggcaggaagcgtccctgattgcgtgctccacttctccctctcaggaagcccagtttcatccttagtaccccccctcgtgcccgctgtcggctggttatagcacttccactgctactgtcagataggaagtgatcgaagcagggggcaaagagaaagcccatatttgttctaagcagaaaagcaggaaaaaaaaaaaaaaaaaagaaagaaaaacacctgttgacctgagagaagtaaattccagaagggaaccaagaactcttcccttccctggtgagtatttccattattccgttaaggtttaatatgcattcagattacttttactaaataggacaccataaagcttttgttatatattaaatgtaaactgaaaggaatgtaaacatatgtattgttaattataaatatagataagtaatgacataatagatgaaaaagtcttattcagatgtatcacattcattttacattacccacctattgtcgcatggtagaatagttttttgtctctgaatatgtgaataacttgacttgcattgatctttttacatatttaataaaaaaaaaagtatatgttaaaa

SEQ ID NO: 154018 - DNA, 4173 bp, Homo sapiens
  Payload ID: 10269
  Gene Symbol: MAPRE2
  Gene Name: microtubule-associated protein, RP/EB family, member 2
  Uniprot ID: Q15555
  ENST ID: ENST00000413393
  CDS Start-End: 222-1076
ctctcgggtggactcccggagcggcggcggcggcggcggtggcagactgcgagtcacgtgcgacagaggaggcggagcacggcggccgggtgggtggagaaaacaaagcccccagctgtcagcagaggaaggaggcgacagcgccggagcagtgtcctgtttcccagaggaacagttcatttcaacagccagggagaaagcctggatgctcaagttggggaatggcggtcaatgtgtattctacctcgataacccaagagactatgagcagacatgacatcattgcatgggttaatgacatagtatctttaaactacacaaaagtggaacagctttgttcaggagcggcctattgccaattcatggacatgctcttccctggctgcattagtttgaagaaagtaaaatttcaagcaaagctggaacatgaatatattcacaattttaaacttctgcaagcatcatttaagcgaatgaacgttgataaggtaattccagtggagaagctagtgaaaggacgtttccaggacaacctggattttattcaatggtttaagaaattctatgatgctaactacgatgggaaggagtatgatcctgtagaggcacgacaagggcaagatgcaattcctcctcctgaccctggtgaacagatcttcaacctgccaaaaaagtctcaccatgcaaactcccccacagcaggtgcagctaaatcaagtccagcagctaaaccaggatccacaccttctcgaccctcatcagccaaaagggcttcttccagtggctcagcatccaaatccgataaagatttagaaacgcaggtcatacagcttaatgaacaggtacattcattaaaacttgcccttgaaggcgtggaaaaggaaagggatttctactttgggaagttgagagagatcgagctactctgccaagaacacgggcaggaaaatgatgacctcgtgcagagactaatggacatcctgtatgcttcagaagaacacgagggccacacagaagagccggaagcagaggagcaagcccacgaacagcagcccccgcagcaggaagagtactgacccaccccggctgctcttgacacttccattgtgtgtgggaacgtttcttctggagaattggaacatgtgtggccccaagctcaacagaaaccagttgttcccaatctgccgttaccatcaacgcactgttgcatatgccagccactgcgcttggttcccattttctttgccaaggtgtattagcggacggccctctggccacctacccgagagatcgtagggtcacatacatccaacttcaccacttggctgcttgagattggttctgctcttttcttcatttctttccagaacaactctttcccaccccaacaccactgccaccacccctctttttatcctggtgtgaaacaatggtaatttgatatatggtatttatattggcatttttcaacccagtgtcactagatgtcacacacatttgtggtgctttgatgtttgcaagtctaacctctgaacataaatttggtcaaataattggaacaaagggaaacagatacttgatatgaaagccataatgacggtgacttgtgtcgtgggggaaaacataaggtcattttctccctctactcacaatactaaagggaaaaaatggattcaaagctaggatttcagggcccagcagtgttcctccatcagcatgttagacaactacacagtatgttgttagttttgaaagacattcactcaaggaaaacaccatctcaactttgcccgctcaccatgtcccttgcccccatgtagcccatttcccaggttatgctcttttctttctcagggtcctctttggtgggcagccactccccgagatgttgccatcagttttctgcagtccaaagagggtatggttaggtacgggtcttcctgcctcattcctcttcctctttgtgtaggtttcagccacaaaactgtcattcactctaggggacccctactaaagggtaacttcaggtgtgcagccctgagctccaaggctctgcaccatgccacacacttgctgtaaggctagaagtgaagaccttattaataggagcataattgcgagggagaatcatggttctgcagtctggtgtagacactggaataacagcacagaaaaatctatgactcccaatatcttctagaataaagaattttccctctttaacacaagggccctccttgtcattgaccttagctaaaccatggcaattcataaatagaggaaacattaatgaattaaaagcattccttattttttaactaatatttgtacattttcttagtctctttccaagtctttgcctcttttttttctttatttttattttttcctttgacagatggtatcccttcctggatcattcatttcaccttggtttctaactttaggtttactttcacttgttatttgacttagcaggtgcaacaaaaacaagaaacaaatgtgcccaccccactttccgcttaactgaaaagcttaaaataaatttctgaattatgtatcctgaagctttgaaatttctttattaatcgatgaaatatgaattctaaattctagcattgaagcttttcaccaaaagaagtctctccaaaataaatcttttgcagcaaagtgatatttattgagttatgtggaaaagatggcttgtatttttcagattattacaacacactgtgcagaattagacagatgttccgtggtgtttggtttccctttcttctctctcctgctcactctgcattatagcagcagcttatttctctaaggctggacagcctggctctcggcagtgacgtcctcccacacctggtcacaagtagtagtggctgtgctatacccagcatcatgcttaacagcgtgttgcccttctgagcctgttgtactcactgatctctttaaaaacaaaaaatagctcttgtaaaaggtcacaataactctatgcacctgatactgcagtggttcctaggccattcttcatctgctctggacatctcagtcatacccaatgctcagtggatcatgaccaaactcctgtcatgtggatgcacgtgagtgggtagcagggagtcaggatcctgccttctccagcaaccccttactgctgtataacttgcataagcctccctggtgactcttgcaggaaccactccattgccctccagctccccagccttctcagttataaacatgctggccagatctcttagcctgcaaagagaactttccccagtcaccatagaccattctccttcctgaaggcttggggcagaccattcgtttatttagagaagagctatacattcttctttctggtcccatcttaaacgtcttctgttgtgctgcaccccagatggtgtctcagatgctttggggaatctttaacagctgaatttgagtcagtcctcttaggctgcacctccagcctctgcagatcccccctcatttcccatggatggtgggaccccattattctctcatctcggcattcagggaacagtttccttagcggcccctggtcacatgtcatcgggctgggcaggaagcgtccctgattgcgtgctccacttctccctctcaggaagcccagtttcatccttagtaccccccctcgtgcccgctgtcggctggttatagcacttccactgctactgtcagataggaagtgatcgaagcagggggcaaagagaaagcccatatttgttctaagcagaaaagcaggaaaaaaaaaaaaaaaaaagaaagaaaaacacctgttgacctgagagaagtaaattccagaagggaaccaagaactcttcccttccctggtgagtatttccattattccgttaaggtttaatatgcattcagattacttttactaaataggacaccataaagcttttgttatatattaaatgtaaactgaaaggaatgtaaacatatgtattgttaattataaatatagataagtaatgacataatagatgaaaaagtcttattcagatgtatcacattcattttacattacccacctattgtcgcatggtagaatagttttttgtctctgaatatgtgaataacttgacttgcattgatctttttacatatttaataaaaaaaaaagtatatgtt

SEQ ID NO: 154019 - DNA, 4323 bp, Homo sapiens
  Payload ID: 10269
  Gene Symbol: MAPRE2
  Gene Name: microtubule-associated protein, RP/EB family, member 2
  Uniprot ID: Q15555
  ENST ID: ENST00000436190
  CDS Start-End: 275-1222
gtagacccgctaggcaggaagaggtcactaaaaatactatcgtgctgtcaatgtagaatgaagggttaagcgctcaaacccgcgcccgcgcgcaccgaaacggaagaacttccttgattagcatagtatcgaccctggggccgcgctgcgaggcggaggttcggtcccagctggggtgaagtgtgcagaccggttgcgattgtggtcagacgcagcacctacttctaatctgaggacccgcgatttacacttttgctgaataggacactgtggaatgaaacagaacagagatcaaaagtgtcctgtttcccagaggaacagttcatttcaacagccagggagaaagcctggatgctcaagttggggaatggcggtcaatgtgtattctacctcgataacccaagagactatgagcagacatgacatcattgcatgggttaatgacatagtatctttaaactacacaaaagtggaacagctttgttcaggagcggcctattgccaattcatggacatgctcttccctggctgcattagtttgaagaaagtaaaatttcaagcaaagctggaacatgaatatattcacaattttaaacttctgcaagcatcatttaagcgaatgaacgttgataaggtaattccagtggagaagctagtgaaaggacgtttccaggacaacctggattttattcaatggtttaagaaattctatgatgctaactacgatgggaaggagtatgatcctgtagaggcacgacaagggcaagatgcaattcctcctcctgaccctggtgaacagatcttcaacctgccaaaaaagtctcaccatgcaaactcccccacagcaggtgcagctaaatcaagtccagcagctaaaccaggatccacaccttctcgaccctcatcagccaaaagggcttcttccagtggctcagcatccaaatccgataaagatttagaaacgcaggtcatacagcttaatgaacaggtacattcattaaaacttgcccttgaaggcgtggaaaaggaaagggatttctactttgggaagttgagagagatcgagctactctgccaagaacacgggcaggaaaatgatgacctcgtgcagagactaatggacatcctgtatgcttcagaagaacacgagggccacacagaagagccggaagcagaggagcaagcccacgaacagcagcccccgcagcaggaagagtactgacccaccccggctgctcttgacacttccattgtgtgtgggaacgtttcttctggagaattggaacatgtgtggccccaagctcaacagaaaccagttgttcccaatctgccgttaccatcaacgcactgttgcatatgccagccactgcgcttggttcccattttctttgccaaggtgtattagcggacggccctctggccacctacccgagagatcgtagggtcacatacatccaacttcaccacttggctgcttgagattggttctgctcttttcttcatttctttccagaacaactctttcccaccccaacaccactgccaccacccctctttttatcctggtgtgaaacaatggtaatttgatatatggtatttatattggcatttttcaacccagtgtcactagatgtcacacacatttgtggtgctttgatgtttgcaagtctaacctctgaacataaatttggtcaaataattggaacaaagggaaacagatacttgatatgaaagccataatgacggtgacttgtgtcgtgggggaaaacataaggtcattttctccctctactcacaatactaaagggaaaaaatggattcaaagctaggatttcagggcccagcagtgttcctccatcagcatgttagacaactacacagtatgttgttagttttgaaagacattcactcaaggaaaacaccatctcaactttgcccgctcaccatgtcccttgcccccatgtagcccatttcccaggttatgctcttttctttctcagggtcctctttggtgggcagccactccccgagatgttgccatcagttttctgcagtccaaagagggtatggttaggtacgggtcttcctgcctcattcctcttcctctttgtgtaggtttcagccacaaaactgtcattcactctaggggacccctactaaagggtaacttcaggtgtgcagccctgagctccaaggctctgcaccatgccacacacttgctgtaaggctagaagtgaagaccttattaataggagcataattgcgagggagaatcatggttctgcagtctggtgtagacactggaataacagcacagaaaaatctatgactcccaatatcttctagaataaagaattttccctctttaacacaagggccctccttgtcattgaccttagctaaaccatggcaattcataaatagaggaaacattaatgaattaaaagcattccttattttttaactaatatttgtacattttcttagtctctttccaagtctttgcctcttttttttctttatttttattttttcctttgacagatggtatcccttcctggatcattcatttcaccttggtttctaactttaggtttactttcacttgttatttgacttagcaggtgcaacaaaaacaagaaacaaatgtgcccaccccactttccgcttaactgaaaagcttaaaataaatttctgaattatgtatcctgaagctttgaaatttctttattaatcgatgaaatatgaattctaaattctagcattgaagcttttcaccaaaagaagtctctccaaaataaatcttttgcagcaaagtgatatttattgagttatgtggaaaagatggcttgtatttttcagattattacaacacactgtgcagaattagacagatgttccgtggtgtttggtttccctttcttctctctcctgctcactctgcattatagcagcagcttatttctctaaggctggacagcctggctctcggcagtgacgtcctcccacacctggtcacaagtagtagtggctgtgctatacccagcatcatgcttaacagcgtgttgcccttctgagcctgttgtactcactgatctctttaaaaacaaaaaatagctcttgtaaaaggtcacaataactctatgcacctgatactgcagtggttcctaggccattcttcatctgctctggacatctcagtcatacccaatgctcagtggatcatgaccaaactcctgtcatgtggatgcacgtgagtgggtagcagggagtcaggatcctgccttctccagcaaccccttactgctgtataacttgcataagcctccctggtgactcttgcaggaaccactccattgccctccagctccccagccttctcagttataaacatgctggccagatctcttagcctgcaaagagaactttccccagtcaccatagaccattctccttcctgaaggcttggggcagaccattcgtttatttagagaagagctatacattcttctttctggtcccatcttaaacgtcttctgttgtgctgcaccccagatggtgtctcagatgctttggggaatctttaacagctgaatttgagtcagtcctcttaggctgcacctccagcctctgcagatcccccctcatttcccatggatggtgggaccccattattctctcatctcggcattcagggaacagtttccttagcggcccctggtcacatgtcatcgggctgggcaggaagcgtccctgattgcgtgctccacttctccctctcaggaagcccagtttcatccttagtaccccccctcgtgcccgctgtcggctggttatagcacttccactgctactgtcagataggaagtgatcgaagcagggggcaaagagaaagcccatatttgttctaagcagaaaagcaggaaaaaaaaaaaaaaaaaagaaagaaaaacacctgttgacctgagagaagtaaattccagaagggaaccaagaactcttcccttccctggtgagtatttccattattccgttaaggtttaatatgcattcagattacttttactaaataggacaccataaagcttttgttatatattaaatgtaaactgaaaggaatgtaaacatatgtattgttaattataaatatagataagtaatgacataatagatgaaaaagtcttattcagatgtatcacattcattttacattacccacctattgtcgcatggtagaatagttttttgtctctgaatatgtgaataacttgacttgcattgatctttttacatatttaataaaaaaaaaagtatatgttaaaa

SEQ ID NO: 154020 - DNA, 4093 bp, Homo sapiens
  Payload ID: 10269
  Gene Symbol: MAPRE2
  Gene Name: microtubule-associated protein, RP/EB family, member 2
  Uniprot ID: Q15555
  ENST ID: ENST00000538170
  CDS Start-End: 168-992
gagagctgggagaaggcagtgagcgagcaggcggcaggcacggtccgtgcggagcaggcgagcgagcgggaagacgcagccaccttcctcaccagccagcccacagcggtttgttccccttctcgggagtgcgccaatgcctgggccgacccaaaccctgtccccaaatggcgagaacaacaacgacatcatccaggataataacgggaccatcattcctttccggaagcacacagtgcgcggggagcgttcctacaggagcggcctattgccaattcatggacatgctcttccctggctgcattagtttgaagaaagtaaaatttcaagcaaagctggaacatgaatatattcacaattttaaacttctgcaagcatcatttaagcgaatgaacgttgataaggtaattccagtggagaagctagtgaaaggacgtttccaggacaacctggattttattcaatggtttaagaaattctatgatgctaactacgatgggaaggagtatgatcctgtagaggcacgacaagggcaagatgcaattcctcctcctgaccctggtgaacagatcttcaacctgccaaaaaagtctcaccatgcaaactcccccacagcaggtgcagctaaatcaagtccagcagctaaaccaggatccacaccttctcgaccctcatcagccaaaagggcttcttccagtggctcagcatccaaatccgataaagatttagaaacgcaggtcatacagcttaatgaacaggtacattcattaaaacttgcccttgaaggcgtggaaaaggaaagggatttctactttgggaagttgagagagatcgagctactctgccaagaacacgggcaggaaaatgatgacctcgtgcagagactaatggacatcctgtatgcttcagaagaacacgagggccacacagaagagccggaagcagaggagcaagcccacgaacagcagcccccgcagcaggaagagtactgacccaccccggctgctcttgacacttccattgtgtgtgggaacgtttcttctggagaattggaacatgtgtggccccaagctcaacagaaaccagttgttcccaatctgccgttaccatcaacgcactgttgcatatgccagccactgcgcttggttcccattttctttgccaaggtgtattagcggacggccctctggccacctacccgagagatcgtagggtcacatacatccaacttcaccacttggctgcttgagattggttctgctcttttcttcatttctttccagaacaactctttcccaccccaacaccactgccaccacccctctttttatcctggtgtgaaacaatggtaatttgatatatggtatttatattggcatttttcaacccagtgtcactagatgtcacacacatttgtggtgctttgatgtttgcaagtctaacctctgaacataaatttggtcaaataattggaacaaagggaaacagatacttgatatgaaagccataatgacggtgacttgtgtcgtgggggaaaacataaggtcattttctccctctactcacaatactaaagggaaaaaatggattcaaagctaggatttcagggcccagcagtgttcctccatcagcatgttagacaactacacagtatgttgttagttttgaaagacattcactcaaggaaaacaccatctcaactttgcccgctcaccatgtcccttgcccccatgtagcccatttcccaggttatgctcttttctttctcagggtcctctttggtgggcagccactccccgagatgttgccatcagttttctgcagtccaaagagggtatggttaggtacgggtcttcctgcctcattcctcttcctctttgtgtaggtttcagccacaaaactgtcattcactctaggggacccctactaaagggtaacttcaggtgtgcagccctgagctccaaggctctgcaccatgccacacacttgctgtaaggctagaagtgaagaccttattaataggagcataattgcgagggagaatcatggttctgcagtctggtgtagacactggaataacagcacagaaaaatctatgactcccaatatcttctagaataaagaattttccctctttaacacaagggccctccttgtcattgaccttagctaaaccatggcaattcataaatagaggaaacattaatgaattaaaagcattccttattttttaactaatatttgtacattttcttagtctctttccaagtctttgcctcttttttttctttatttttattttttcctttgacagatggtatcccttcctggatcattcatttcaccttggtttctaactttaggtttactttcacttgttatttgacttagcaggtgcaacaaaaacaagaaacaaatgtgcccaccccactttccgcttaactgaaaagcttaaaataaatttctgaattatgtatcctgaagctttgaaatttctttattaatcgatgaaatatgaattctaaattctagcattgaagcttttcaccaaaagaagtctctccaaaataaatcttttgcagcaaagtgatatttattgagttatgtggaaaagatggcttgtatttttcagattattacaacacactgtgcagaattagacagatgttccgtggtgtttggtttccctttcttctctctcctgctcactctgcattatagcagcagcttatttctctaaggctggacagcctggctctcggcagtgacgtcctcccacacctggtcacaagtagtagtggctgtgctatacccagcatcatgcttaacagcgtgttgcccttctgagcctgttgtactcactgatctctttaaaaacaaaaaatagctcttgtaaaaggtcacaataactctatgcacctgatactgcagtggttcctaggccattcttcatctgctctggacatctcagtcatacccaatgctcagtggatcatgaccaaactcctgtcatgtggatgcacgtgagtgggtagcagggagtcaggatcctgccttctccagcaaccccttactgctgtataacttgcataagcctccctggtgactcttgcaggaaccactccattgccctccagctccccagccttctcagttataaacatgctggccagatctcttagcctgcaaagagaactttccccagtcaccatagaccattctccttcctgaaggcttggggcagaccattcgtttatttagagaagagctatacattcttctttctggtcccatcttaaacgtcttctgttgtgctgcaccccagatggtgtctcagatgctttggggaatctttaacagctgaatttgagtcagtcctcttaggctgcacctccagcctctgcagatcccccctcatttcccatggatggtgggaccccattattctctcatctcggcattcagggaacagtttccttagcggcccctggtcacatgtcatcgggctgggcaggaagcgtccctgattgcgtgctccacttctccctctcaggaagcccagtttcatccttagtaccccccctcgtgcccgctgtcggctggttatagcacttccactgctactgtcagataggaagtgatcgaagcagggggcaaagagaaagcccatatttgttctaagcagaaaagcaggaaaaaaaaaaaaaaaaaagaaagaaaaacacctgttgacctgagagaagtaaattccagaagggaaccaagaactcttcccttccctggtgagtatttccattattccgttaaggtttaatatgcattcagattacttttactaaataggacaccataaagcttttgttatatattaaatgtaaactgaaaggaatgtaaacatatgtattgttaattataaatatagataagtaatgacataatagatgaaaaagtcttattcagatgtatcacattcattttacattacccacctattgtcgcatggtagaatagttttttgtctctgaatatgtgaataacttgacttgcattgatctttttacatatttaataaaaaaaaaagtatatgttaaaa

SEQ ID NO: 154021 - DNA, 4080 bp, Homo sapiens
  Payload ID: 10269
  Gene Symbol: MAPRE2
  Gene Name: microtubule-associated protein, RP/EB family, member 2
  Uniprot ID: Q15555
  ENST ID: ENST00000589699
  CDS Start-End: 125-979
gcgttcctacaggtaatggggctggcacgagagcagcgccggggaccgccgtgagggcgcgcggaaatccagcccgttatataatggagcagacactgcctgcgacccctgctgcagttggggaatggcggtcaatgtgtattctacctcgataacccaagagactatgagcagacatgacatcattgcatgggttaatgacatagtatctttaaactacacaaaagtggaacagctttgttcaggagcggcctattgccaattcatggacatgctcttccctggctgcattagtttgaagaaagtaaaatttcaagcaaagctggaacatgaatatattcacaattttaaacttctgcaagcatcatttaagcgaatgaacgttgataaggtaattccagtggagaagctagtgaaaggacgtttccaggacaacctggattttattcaatggtttaagaaattctatgatgctaactacgatgggaaggagtatgatcctgtagaggcacgacaagggcaagatgcaattcctcctcctgaccctggtgaacagatcttcaacctgccaaaaaagtctcaccatgcaaactcccccacagcaggtgcagctaaatcaagtccagcagctaaaccaggatccacaccttctcgaccctcatcagccaaaagggcttcttccagtggctcagcatccaaatccgataaagatttagaaacgcaggtcatacagcttaatgaacaggtacattcattaaaacttgcccttgaaggcgtggaaaaggaaagggatttctactttgggaagttgagagagatcgagctactctgccaagaacacgggcaggaaaatgatgacctcgtgcagagactaatggacatcctgtatgcttcagaagaacacgagggccacacagaagagccggaagcagaggagcaagcccacgaacagcagcccccgcagcaggaagagtactgacccaccccggctgctcttgacacttccattgtgtgtgggaacgtttcttctggagaattggaacatgtgtggccccaagctcaacagaaaccagttgttcccaatctgccgttaccatcaacgcactgttgcatatgccagccactgcgcttggttcccattttctttgccaaggtgtattagcggacggccctctggccacctacccgagagatcgtagggtcacatacatccaacttcaccacttggctgcttgagattggttctgctcttttcttcatttctttccagaacaactctttcccaccccaacaccactgccaccacccctctttttatcctggtgtgaaacaatggtaatttgatatatggtatttatattggcatttttcaacccagtgtcactagatgtcacacacatttgtggtgctttgatgtttgcaagtctaacctctgaacataaatttggtcaaataattggaacaaagggaaacagatacttgatatgaaagccataatgacggtgacttgtgtcgtgggggaaaacataaggtcattttctccctctactcacaatactaaagggaaaaaatggattcaaagctaggatttcagggcccagcagtgttcctccatcagcatgttagacaactacacagtatgttgttagttttgaaagacattcactcaaggaaaacaccatctcaactttgcccgctcaccatgtcccttgcccccatgtagcccatttcccaggttatgctcttttctttctcagggtcctctttggtgggcagccactccccgagatgttgccatcagttttctgcagtccaaagagggtatggttaggtacgggtcttcctgcctcattcctcttcctctttgtgtaggtttcagccacaaaactgtcattcactctaggggacccctactaaagggtaacttcaggtgtgcagccctgagctccaaggctctgcaccatgccacacacttgctgtaaggctagaagtgaagaccttattaataggagcataattgcgagggagaatcatggttctgcagtctggtgtagacactggaataacagcacagaaaaatctatgactcccaatatcttctagaataaagaattttccctctttaacacaagggccctccttgtcattgaccttagctaaaccatggcaattcataaatagaggaaacattaatgaattaaaagcattccttattttttaactaatatttgtacattttcttagtctctttccaagtctttgcctcttttttttctttatttttattttttcctttgacagatggtatcccttcctggatcattcatttcaccttggtttctaactttaggtttactttcacttgttatttgacttagcaggtgcaacaaaaacaagaaacaaatgtgcccaccccactttccgcttaactgaaaagcttaaaataaatttctgaattatgtatcctgaagctttgaaatttctttattaatcgatgaaatatgaattctaaattctagcattgaagcttttcaccaaaagaagtctctccaaaataaatcttttgcagcaaagtgatatttattgagttatgtggaaaagatggcttgtatttttcagattattacaacacactgtgcagaattagacagatgttccgtggtgtttggtttccctttcttctctctcctgctcactctgcattatagcagcagcttatttctctaaggctggacagcctggctctcggcagtgacgtcctcccacacctggtcacaagtagtagtggctgtgctatacccagcatcatgcttaacagcgtgttgcccttctgagcctgttgtactcactgatctctttaaaaacaaaaaatagctcttgtaaaaggtcacaataactctatgcacctgatactgcagtggttcctaggccattcttcatctgctctggacatctcagtcatacccaatgctcagtggatcatgaccaaactcctgtcatgtggatgcacgtgagtgggtagcagggagtcaggatcctgccttctccagcaaccccttactgctgtataacttgcataagcctccctggtgactcttgcaggaaccactccattgccctccagctccccagccttctcagttataaacatgctggccagatctcttagcctgcaaagagaactttccccagtcaccatagaccattctccttcctgaaggcttggggcagaccattcgtttatttagagaagagctatacattcttctttctggtcccatcttaaacgtcttctgttgtgctgcaccccagatggtgtctcagatgctttggggaatctttaacagctgaatttgagtcagtcctcttaggctgcacctccagcctctgcagatcccccctcatttcccatggatggtgggaccccattattctctcatctcggcattcagggaacagtttccttagcggcccctggtcacatgtcatcgggctgggcaggaagcgtccctgattgcgtgctccacttctccctctcaggaagcccagtttcatccttagtaccccccctcgtgcccgctgtcggctggttatagcacttccactgctactgtcagataggaagtgatcgaagcagggggcaaagagaaagcccatatttgttctaagcagaaaagcaggaaaaaaaaaaaaaaaaaagaaagaaaaacacctgttgacctgagagaagtaaattccagaagggaaccaagaactcttcccttccctggtgagtatttccattattccgttaaggtttaatatgcattcagattacttttactaaataggacaccataaagcttttgttatatattaaatgtaaactgaaaggaatgtaaacatatgtattgttaattataaatatagataagtaatgacataatagatgaaaaagtcttattcagatgtatcacattcattttacattacccacctattgtcgcatggtagaatagttttttgtctctgaatatgtgaataacttgacttgcattgatctttttacatatttaataaaaaaaaaagtatatgttaaaa

SEQ ID NO: 154022 - DNA, 553 bp, Homo sapiens
  Payload ID: 10269
  Gene Symbol: MAPRE2
  Gene Name: microtubule-associated protein, RP/EB family, member 2
  ENST ID: ENST00000589180
  CDS Start-End: 151-553
agaggaaggaggcgacagcgccggagcagtgtcctgtttcccagaggaacagttcatttcaacagccagggagaaagcctggatgctcaagttggggaatggcggtcaatgtgtattctacctcgataacccaagagactatgagcagacatgacatcattgcatggtttgaagaaagtaaaatttcaagcaaagctggaacatgaatatattcacaattttaaacttctgcaagcatcatttaagcgaatgaacgttgataaggtaattccagtggagaagctagtgaaaggacgtttccaggacaacctggattttattcaatggtttaagaaattctatgatgctaactacgatgggaaggagtatgatcctgtagaggcacgacaagggcaagatgcaattcctcctcctgaccctggtgaacagatcttcaacctgccaaaaaagtctcaccatgcaaactcccccacagcaggtgcagctaaatcaagtccagcagctaaaccaggatccacaccttctcgaccctcatcagccaaaagggcttctt

SEQ ID NO: 154023 - DNA, 584 bp, Homo sapiens
  Payload ID: 10269
  Gene Symbol: MAPRE2
  Gene Name: microtubule-associated protein, RP/EB family, member 2
  ENST ID: ENST00000587359
  CDS Start-End: 351-584
gaaggaggcgacagcgccggagcagggctgcagttgactattataggatgtggtttcctgcaacatgcctgattttgaagaagggtgatctacacactgggaatgaagccacagagcatgtatgttacatgtagctgctggctatatatgtccacgtcagccacacactcccttctgctcctcagaaccttaaagttctcctcatggctggggaacagtgatgtgctccagggctccaagcaatggattcctcagcagacattgctctgtgaaatcaaaagtgtcctgtttcccagaggaacagttcatttcaacagccagggagaaagcctggatgctcaagttggggaatggcggtcaatgtgtattctacctcgataacccaagagactatgagcagacatgacatcattgcatgggttaatgacatagtatctttaaactacacaaaagtggaacagctttgttcaggagcggcctattgccaattcatggacatgctcttccctggctgcattagtttgaagaaagtaaaatttcaagcaaagctggaacatgaatatattcacaattttaaacttctg

SEQ ID NO: 154024 - DNA, 803 bp, Homo sapiens
  Payload ID: 10269
  Gene Symbol: MAPRE2
  Gene Name: microtubule-associated protein, RP/EB family, member 2
  ENST ID: ENST00000591734
  CDS Start-End: 222-803
ctctcgggtggactcccggagcggcggcggcggcggcggtggcagactgcgagtcacgtgcgacagaggaggcggagcacggcggccgggtgggtggagaaaacaaagcccccagctgtcagcagaggaaggaggcgacagcgccggagcagtgtcctgtttcccagaggaacagttcatttcaacagccagggagaaagcctggatgctcaagttggggaatggcggtcaatgtgtattctacctcgataacccaagagactatgagcagacatgacatcattgcatgggttaatgacatagtatctttaaactacacaaaagtggaacagctttgttcaggagcggcctattgccaattcatggacatgctcttccctggctgcattagtttgaagaaagtaaaatttcaagcaaagctggaacatgaatatattcacaattttaaacttctgcaagcatcatttaagcgaatgaacgttgataaggtaattccagtggagaagctagtgaaaggacgtttccaggacaacctggattttattcaatggtttaagaaattctatgatgctaactacgatgggaaggagtatgatcctgtagaggcacgacaagggcaagatgcaattcctcctcctgaccctggtgaacagatcttcaacctgccaaaaaagtctcaccatgcaaactcccccacagcaggtgcagctaaatcaagtccagcagctaaaccaggatccacaccttctcgaccctcatcagccaaaagggcttcttccagtggctcagcatccaaatccgat

SEQ ID NO: 154025 - DNA, 1389 bp, Homo sapiens
  Payload ID: 10269
  Gene Symbol: MAPRE2
  Gene Name: microtubule-associated protein, RP/EB family, member 2
  Uniprot ID: Q15555
  ENST ID: ENST00000588910
  CDS Start-End: 110-889
caggcggcaggcacggtccgtgcggagcaggcgagcgagcgggaagacgcagccaccttcctcaccagccagcccacagcggtttgttccccttctcgggagtgcgccaatgcctgggccgacccaaaccctgtccccaaatggcgagaacaacaacgacatcatccaggataataacgggaccatcattcctttccggaagcacacagtgcgcggggagcgttcctacagttggggaatggcggtcaatgtgtattctacctcgataacccaagagactatgagcagacatgacatcattgcatgggttaatgacatagtatctttaaactacacaaaagtggaacagctttgttcaggagcggcctattgccaattcatggacatgctcttccctggctgcattagtttgaagaaagtaaaatttcaagcaaagctggaacatgaatatattcacaattttaaacttctgcaagcatcatttaagcgaatgaacgttgataaggtaattccagtggagaagctagtgaaaggacgtttccaggacaacctggattttattcaatggtttaagaaattctatgatgctaactacgatgggaaggagtatgatcctgtagaggcacgacaagggcaagatgcaattcctcctcctgaccctggtgaacagatcttcaacctgccaaaaaagtctcaccatgcaaactcccccacagcaggtgcagctaaatcaagtccagcagctaaaccaggatccacaccttctcgaccctcatcagccaaaagggcttcttccagtggctcagcatccaaatccgataaagatttagaaacgcaggtcatacagcttaatgaacaggtaatgcatcagctctggccacgcctctaggagcagtgacgtgtgtaagaggtagggggcctaggatcccctaggactggggtaagggagggaagggtaaggaagaatccttggtttcaagtaagtgagaataaaaagaattgttcgaagacaaaatcagtagcccatgatgaataaaaagtgttagtcacaaatctcaaagctgtacattaagatggggcagatggctcagccttgctgcagacttcaggctaccttcccctcccctgctcctcagggccgtcaagagctccaggctagaccgttgcccatcctgcccacttctggccattctagatagtgctgcattagggtgagtctgcctccctctctttttaaaggctgggtcagggttagtctgtctccctcccactctcttcttttttcccttcttcctttctttcttcagctattagtagttgagcttattctatatgaaagatattacgcttaatgctggtaatataaaggtagtaaaatagatacctttc

SEQ ID NO: 154026 - DNA, 543 bp, Homo sapiens
  Payload ID: 10269
  Gene Symbol: MAPRE2
  Gene Name: microtubule-associated protein, RP/EB family, member 2
  ENST ID: ENST00000588349
  CDS Start-End: 163-543
gtgcagaccggttgcgattgtggtcagacgcagcacctacttctaatctgaggacccgcgatttacacttttgctgaataggacactgtggaatgaaacagaacagagatcaaaagttcatttcaacagccagggagaaagcctggatgctcaagttggggaatggcggtcaatgtgtattctacctcgataacccaagagactatgagcagacatgacatcattgcatgggttaatgacatagtatctttaaactacacaaaagtggaacagctttgttcaggagcggcctattgccaattcatggacatgctcttccctggctgcattagtttgaagaaagtaaaatttcaagcaaagctggaacatgaatatattcacaattttaaacttctgcaagcatcatttaagcgaatgaacgttgataaggtaattccagtggagaagctagtgaaaggacgtttccaggacaacctggattttattcaatggtttaagaaattctatgatgctaactacgatgggaaggagtatgatcctgta

SEQ ID NO: 154027 - DNA, 1892 bp, Homo sapiens
  Payload ID: 10270
  Gene Symbol: MAPRE3
  Gene Name: microtubule-associated protein, RP/EB family, member 3
  Uniprot ID: Q9UPY8
  ENST ID: ENST00000233121
  CDS Start-End: 199-1044
agcggcggccgcatcgcgcctgcgcagtgccctcgtcccccgcagtctctgtgcgttgaagccggagaccgcggcggcctcagcgaggaccctccgccccggagccgccggccggagccgcagcctctgccgcagcgcccccgccacctgtcccctccccctccgcctccgccggagccgcctcgtgcactctggggtatggccgtcaatgtgtactccacatctgtgaccagtgaaaatctgagtcgccatgatatgcttgcatgggtcaacgactccctgcacctcaactataccaagatagaacagctttgttcaggggcagcctactgccagttcatggacatgctcttccccggctgtgtgcacttgaggaaagtgaagttccaggccaaactagagcacgaatacatccacaacttcaaggtgctgcaagcagctttcaagaagatgggtgttgacaaaatcattcctgtagagaaattagtgaaaggaaaattccaagataattttgagtttattcagtggtttaagaaattctttgacgcaaactatgatggaaaggattacaaccctctgctggcgcggcagggccaggacgtagcgccacctcctaacccaggtgatcagatcttcaacaaatccaagaaactcattggcacagcagttccacagaggacgtcccccacaggcccaaaaaacatgcagacctctggccggctgagcaatgtggcccccccctgcattctccggaagaatcctccatcagcccgaaatggcggccatgagactgatgcccaaattcttgaactcaaccaacagctggtggacttgaagctgacagtggatgggctggagaaggaacgtgacttctacttcagcaaacttcgtgacatcgagctcatctgccaggagcatgaaagtgaaaacagccctgttatctcaggcatcattggcatcctctatgccacagaggaaggattcgcaccccctgaggacgatgagattgaagagcatcaacaagaagaccaggacgagtactgagggcggccgcagccctggctgactgcacagcttccccgtgcctccctccctgctccactcccacattatagtcctttcctaacacggtcggccgggtgctttgtgtcagtgctgcagcactggggagccaggcgaggggggcttgggggcatggggccggaaagcaggcagaagcccgtcctgggtggtgctggcccagttggtgggacccctgtccacacccaccctatttatttccgttgtctctctgctgtgtcgcccaacacttcccagggtgctgctgccacccgccccagccagccacctgctcctgacagccagcagctgtgtatttgacaaagtcattggtatatttttacttactggattctccttgcactttacctgttcttttccagagctgacagcacgggctccggcgcagtgtgcctggcttggcttcccttccccatggctgggggctggggtaggactcacccattctaatttattttgtcttttggcttctcagtagctaaggggaaggctgatgtcaggagagggagagggggctgaggaggtagtgctgtaggcccagggggtcagggaaagggaggggggcatgtgagggatggaaatgacctcctggcaccaggctcacccacccaaggccccctgccccagcactgaatcccagcgctgccctgaggcccccagccactccctccagcagcctggttcaccacacaaactctgcctggaccccattgtctgtctgcttcccacctgccctccccaccccctgcccctcgggcaccagcctgcatatgtgttcacttttatttaaataaacttgtgtggtaaaagta

SEQ ID NO: 154028 - DNA, 1801 bp, Homo sapiens
  Payload ID: 10270
  Gene Symbol: MAPRE3
  Gene Name: microtubule-associated protein, RP/EB family, member 3
  Uniprot ID: Q9UPY8
  ENST ID: ENST00000405074
  CDS Start-End: 153-953
ctctgtgcgttgaagccggagaccgcggcggcctcagcgaggaccctccgccccggagccgccggccggagccgcagcctctgccgcagcgcccccgccacctgtcccctccccctccgcctccgccggagccgcctcgtgcactctggggtatggccgtcaatgtgtactccacatctgtgaccagtgaaaatctgagtcgccatgatatgcttgcatgggtcaacgactccctgcacctcaactataccaagatagaacagctttgttcaggggcagcctactgccagttcatggacatgctcttccccggctgtgtgcacttgaggaaagtgaagttccaggccaaactagagcacgaatacatccacaacttcaaggtgctgcaagcagctttcaagaagatgggtgttgacaaaatcattcctgtagagaaattagtgaaaggaaaattccaagataattttgagtttattcagtggtttaagaaattctttgacgcaaactatgatggaaaggattacaaccctctgctggcgcggcagggccaggacgtagcgccacctcctaacccagttccacagaggacgtcccccacaggcccaaaaaacatgcagacctctggccggctgagcaatgtggcccccccctgcattctccggaagaatcctccatcagcccgaaatggcggccatgagactgatgcccaaattcttgaactcaaccaacagctggtggacttgaagctgacagtggatgggctggagaaggaacgtgacttctacttcagcaaacttcgtgacatcgagctcatctgccaggagcatgaaagtgaaaacagccctgttatctcaggcatcattggcatcctctatgccacagaggaaggattcgcaccccctgaggacgatgagattgaagagcatcaacaagaagaccaggacgagtactgagggcggccgcagccctggctgactgcacagcttccccgtgcctccctccctgctccactcccacattatagtcctttcctaacacggtcggccgggtgctttgtgtcagtgctgcagcactggggagccaggcgaggggggcttgggggcatggggccggaaagcaggcagaagcccgtcctgggtggtgctggcccagttggtgggacccctgtccacacccaccctatttatttccgttgtctctctgctgtgtcgcccaacacttcccagggtgctgctgccacccgccccagccagccacctgctcctgacagccagcagctgtgtatttgacaaagtcattggtatatttttacttactggattctccttgcactttacctgttcttttccagagctgacagcacgggctccggcgcagtgtgcctggcttggcttcccttccccatggctgggggctggggtaggactcacccattctaatttattttgtcttttggcttctcagtagctaaggggaaggctgatgtcaggagagggagagggggctgaggaggtagtgctgtaggcccagggggtcagggaaagggaggggggcatgtgagggatggaaatgacctcctggcaccaggctcacccacccaaggccccctgccccagcactgaatcccagcgctgccctgaggcccccagccactccctccagcagcctggttcaccacacaaactctgcctggaccccattgtctgtctgcttcccacctgccctccccaccccctgcccctcgggcaccagcctgcatatgtgttcacttttatttaaataaacttgtgtggtaaaagta

SEQ ID NO: 154029 - DNA, 1001 bp, Homo sapiens
  Payload ID: 10270
  Gene Symbol: MAPRE3
  Gene Name: microtubule-associated protein, RP/EB family, member 3
  Uniprot ID: Q9UPY8
  ENST ID: ENST00000402218
  CDS Start-End: 194-994
caggggtaggggtagcaattttgcagattttccaaacaggtgacttcagcccccgggcctgggcaggaaggggtagcccagtgacaatgggcatagtcccacttcaggaacgggaaacgtgttggctggctctgtggagttctctctcttctgatcccacagcatctgttccagttgtcttggccgctggggtatggccgtcaatgtgtactccacatctgtgaccagtgaaaatctgagtcgccatgatatgcttgcatgggtcaacgactccctgcacctcaactataccaagatagaacagctttgttcaggggcagcctactgccagttcatggacatgctcttccccggctgtgtgcacttgaggaaagtgaagttccaggccaaactagagcacgaatacatccacaacttcaaggtgctgcaagcagctttcaagaagatgggtgttgacaaaatcattcctgtagagaaattagtgaaaggaaaattccaagataattttgagtttattcagtggtttaagaaattctttgacgcaaactatgatggaaaggattacaaccctctgctggcgcggcagggccaggacgtagcgccacctcctaacccagttccacagaggacgtcccccacaggcccaaaaaacatgcagacctctggccggctgagcaatgtggcccccccctgcattctccggaagaatcctccatcagcccgaaatggcggccatgagactgatgcccaaattcttgaactcaaccaacagctggtggacttgaagctgacagtggatgggctggagaaggaacgtgacttctacttcagcaaacttcgtgacatcgagctcatctgccaggagcatgaaagtgaaaacagccctgttatctcaggcatcattggcatcctctatgccacagaggaaggattcgcaccccctgaggacgatgagattgaagagcatcaacaagaagaccaggacgagtactgagggcggc

SEQ ID NO: 154030 - DNA, 878 bp, Homo sapiens
  Payload ID: 10270
  Gene Symbol: MAPRE3
  Gene Name: microtubule-associated protein, RP/EB family, member 3
  ENST ID: ENST00000458529
  CDS Start-End: 225-878
caagcccagaataacctggatgtgtgactcacaggggtaggggtagcaattttgcagattttccaaacaggtgacttcagcccccgggcctgggcaggaaggggtagcccagtgacaatgggcatagtcccacttcaggaacgggaaacgtgttggctggctctgtggagttctctctcttctgatcccacagcatctgttccagttgtcttggccgctggggtatggccgtcaatgtgtactccacatctgtgaccagtgaaaatctgagtcgccatgatatgcttgcatgggtcaacgactccctgcacctcaactataccaagatagaacagctttgttcaggggcagcctactgccagttcatggacatgctcttccccggctgtgtgcacttgaggaaagtgaagttccaggccaaactagagcacgaatacatccacaacttcaaggtgctgcaagcagctttcaagaagatgggtgttgacaaaatcattcctgtagagaaattagtgaaaggaaaattccaagataattttgagtttattcagtggtttaagaaattctttgacgcaaactatgatggaaaggattacaaccctctgctggcgcggcagggccaggacgtagcgccacctcctaacccaggtgatcagatcttcaacaaatccaagaaactcattggcacagcagttccacagaggacgtcccccacaggcccaaaaaacatgcagacctctggccggctgagcaatgtggcccccccctgcattctccggaagaatcctccatcagcccgaaatggcggccatgagactgatgcccaaattcttgaactcaaccaacagctggtggacttgaagctgacagtggatggg

SEQ ID NO: 154031 - DNA, 2536 bp, Homo sapiens
  Payload ID: 10271
  Gene Symbol: MID1IP1
  Gene Name: MID1 interacting protein 1
  Uniprot ID: Q9NPA3
  ENST ID: ENST00000336949
  CDS Start-End: 946-1497
ctgctgccggcccctcttccccgacggctaataataaacccgggttcctgtttcccggccgcggccactccagattcggggctgaggggctcactctgcaaccaaggcacgtgcattctggtcatcccacgcggggagcgcgcgcaaggcccgcccagcccccacatgccagccccaccctccagtcggtccggacgccgacgcctttttgaccctcgctgtgcccggccctcctcatctggcctgcccagggcttggtgctggcggggtccagctgctccaatccctcctcctctgctctgccctgccctgccctggcctgccccggcgccctccctcagcccgggtatcaggcgagaggcggagctggcccggcgcgccccgcccccgctgtagaaagggccgggcgagtgttactcgcggtcatcccggcctgggccttttatctcggtgctgccgggggaggcgggaggaggagacaccaggggtggccctgagcgccggcgacacctttcctggactataaattgagcacctgggatgggtagggggccaacgcagtcaccgccgtccgcagtcacagtccagccactgaccgcagcagcgcccttgcgtagcagccgcttgcagcgagaacactgaattgccaacgagcaggagagtctcaaggcgcaagaggaggccagggctcgacccacagagcaccctcagccatcgcgagtttccgggcgccaaagccaggagaagccgcccatcccgcagggccggtctgccagcgagacgagagttggcgagggcggaggagtgccgggaatcccgccacaccggctatagccaggcccccagcgcgggccttggagagcgcgtgaaggcgggcatccccttgacccggccgaccatccccgtgcccctgcgtccctgcgctccaacgtccgcgcggccaccatgatgcaaatctgcgacacctacaaccagaagcactcgctctttaacgccatgaatcgcttcattggcgccgtgaacaacatggaccagacggtgatggtgcccagcttgctgcgcgacgtgcccctggctgaccccgggttagacaacgatgttggcgtggaggtaggcggcagtggcggctgcctggaggagcgcacgcccccagtccccgactcgggaagcgccaatggcagctttttcgcgccctctcgggacatgtacagccactacgtgcttctcaagtccatccgcaacgacatcgagtggggggtcctgcaccagccgcctccaccggctgggagcgaggagggcagtgcctggaagtccaaggacatcctggtggacctgggccacttggagggtgcggacgccggcgaagaagacctggaacagcagttccactaccacctgcgcgggctgcacactgtgctctcgaaactcacgcgcaaagccaacatcctcactaacagatacaagcaggagatcggcttcggcaattggggccactgaggcgtggcgcccgtggctgcccagcaccttcttcgacccatctcaccctctctcattcctcaaagctttttttttttttcctggctggggggcgggaagggcagactgcaaactggggggctgcgtacgtgcaggaggcgcggtggggctgcgtggaggagggggccacgtgtgagagagaagaaaatggtggccggagatgggagggcccaaggaacctcctgggagggggcctgcattctatgttggtgggaatgggactgggctgacgccctgcattcagcctgtgcctttcctggggtttcttttctgttcttttcggaggagagggcccgagaaggggccataccagggcgcggcgctgggttgccacacttgggaaagcagcccggagctgggtgctggggaaggcggggcgcgtagcctcccgccgccctgcggttgggccggtggaggcccaggcgttgctaggattgcatcagttttcctgtttgcactatttctttttgtaacattggccctgtgtgaagtatttcgaatctcctccttgctctgaaacttcagcgattccattgtgataagcgcacaaacagcactgtctgtcggtaatcggtactactttattaatgattttctgttacactgtatagtagtcctatggcacccccaccccatccctttcgtgccactcccgtccccacccccaccccagtgtgtataagctggcatttcgccagcttgtacgtagcttgccactcagtgaaaataataacattattatgagaaagtggacttaaccgaaatggaaccaactgacattctatcgtgttgtacatagaatgatgaagggttccactgttgttgtatgtcttaaatttatttaaaactttttttaatccagatgtagactatattctaaaaaataaaaaagcaaatgtgtcaactaaattggacaagcgtctggtcctcattaatctgccaatgaatggtttcgtcattaaataaaaatcaatttaattgatttactagcaaaagtaaa

SEQ ID NO: 154032 - DNA, 1889 bp, Homo sapiens
  Payload ID: 10271
  Gene Symbol: MID1IP1
  Gene Name: MID1 interacting protein 1
  Uniprot ID: Q9NPA3
  ENST ID: ENST00000378474
  CDS Start-End: 403-954
cggaccttttccttctggagtttccccggcgggttcacagtccagccactgaccgcagcagcgcccttgcgtagcagccgcttgcagcgagaacactgaattgccaacgagcaggagagtctcaaggcgcaagaggaggccagggctcgacccacagagcaccctcagccatcgcgagtttccgggcgccaaagccaggagaagccgcccatcccgcagggccggtctgccagcgagacgagagttggcgagggcggaggagtgccgggaatcccgccacaccggctatagccaggcccccagcgcgggccttggagagcgcgtgaaggcgggcatccccttgacccggccgaccatccccgtgcccctgcgtccctgcgctccaacgtccgcgcggccaccatgatgcaaatctgcgacacctacaaccagaagcactcgctctttaacgccatgaatcgcttcattggcgccgtgaacaacatggaccagacggtgatggtgcccagcttgctgcgcgacgtgcccctggctgaccccgggttagacaacgatgttggcgtggaggtaggcggcagtggcggctgcctggaggagcgcacgcccccagtccccgactcgggaagcgccaatggcagctttttcgcgccctctcgggacatgtacagccactacgtgcttctcaagtccatccgcaacgacatcgagtggggggtcctgcaccagccgcctccaccggctgggagcgaggagggcagtgcctggaagtccaaggacatcctggtggacctgggccacttggagggtgcggacgccggcgaagaagacctggaacagcagttccactaccacctgcgcgggctgcacactgtgctctcgaaactcacgcgcaaagccaacatcctcactaacagatacaagcaggagatcggcttcggcaattggggccactgaggcgtggcgcccgtggctgcccagcaccttcttcgacccatctcaccctctctcattcctcaaagctttttttttttttcctggctggggggcgggaagggcagactgcaaactggggggctgcgtacgtgcaggaggcgcggtggggctgcgtggaggagggggccacgtgtgagagagaagaaaatggtggccggagatgggagggcccaaggaacctcctgggagggggcctgcattctatgttggtgggaatgggactgggctgacgccctgcattcagcctgtgcctttcctggggtttcttttctgttcttttcggaggagagggcccgagaaggggccataccagggcgcggcgctgggttgccacacttgggaaagcagcccggagctgggtgctggggaaggcggggcgcgtagcctcccgccgccctgcggttgggccggtggaggcccaggcgttgctaggattgcatcagttttcctgtttgcactatttctttttgtaacattggccctgtgtgaagtatttcgaatctcctccttgctctgaaacttcagcgattccattgtgataagcgcacaaacagcactgtctgtcggtaatcggtactactttattaatgattttctgttacactgtatagtagtcctatggcacccccaccccatccctttcgtgccactcccgtccccacccccaccccagtgtgtataagctggcatttcgccagcttgtacgtagcttgccactcagtgaaaataataacattattatgagaaagtggacttaaccgaaatggaaccaactgacattctatcgtgttgtacatagaatgatgaagggttccactgttgttgtatgtcttaaatttatttaaaactttttttaatccagatgtagactatattctaaaaaataaaaaagcaaa

SEQ ID NO: 154033 - DNA, 1902 bp, Homo sapiens
  Payload ID: 10271
  Gene Symbol: MID1IP1
  Gene Name: MID1 interacting protein 1
  Uniprot ID: Q9NPA3
  ENST ID: ENST00000457894
  CDS Start-End: 321-872
aagggcccagagctctggccggcggaccttttccttctggagtttccccggcgggtgccagggctcgacccacagagcaccctcagccatcgcgagtttccgggcgccaaagccaggagaagccgcccatcccgcagggccggtctgccagcgagacgagagttggcgagggcggaggagtgccgggaatcccgccacaccggctatagccaggcccccagcgcgggccttggagagcgcgtgaaggcgggcatccccttgacccggccgaccatccccgtgcccctgcgtccctgcgctccaacgtccgcgcggccaccatgatgcaaatctgcgacacctacaaccagaagcactcgctctttaacgccatgaatcgcttcattggcgccgtgaacaacatggaccagacggtgatggtgcccagcttgctgcgcgacgtgcccctggctgaccccgggttagacaacgatgttggcgtggaggtaggcggcagtggcggctgcctggaggagcgcacgcccccagtccccgactcgggaagcgccaatggcagctttttcgcgccctctcgggacatgtacagccactacgtgcttctcaagtccatccgcaacgacatcgagtggggggtcctgcaccagccgcctccaccggctgggagcgaggagggcagtgcctggaagtccaaggacatcctggtggacctgggccacttggagggtgcggacgccggcgaagaagacctggaacagcagttccactaccacctgcgcgggctgcacactgtgctctcgaaactcacgcgcaaagccaacatcctcactaacagatacaagcaggagatcggcttcggcaattggggccactgaggcgtggcgcccgtggctgcccagcaccttcttcgacccatctcaccctctctcattcctcaaagctttttttttttttcctggctggggggcgggaagggcagactgcaaactggggggctgcgtacgtgcaggaggcgcggtggggctgcgtggaggagggggccacgtgtgagagagaagaaaatggtggccggagatgggagggcccaaggaacctcctgggagggggcctgcattctatgttggtgggaatgggactgggctgacgccctgcattcagcctgtgcctttcctggggtttcttttctgttcttttcggaggagagggcccgagaaggggccataccagggcgcggcgctgggttgccacacttgggaaagcagcccggagctgggtgctggggaaggcggggcgcgtagcctcccgccgccctgcggttgggccggtggaggcccaggcgttgctaggattgcatcagttttcctgtttgcactatttctttttgtaacattggccctgtgtgaagtatttcgaatctcctccttgctctgaaacttcagcgattccattgtgataagcgcacaaacagcactgtctgtcggtaatcggtactactttattaatgattttctgttacactgtatagtagtcctatggcacccccaccccatccctttcgtgccactcccgtccccacccccaccccagtgtgtataagctggcatttcgccagcttgtacgtagcttgccactcagtgaaaataataacattattatgagaaagtggacttaaccgaaatggaaccaactgacattctatcgtgttgtacatagaatgatgaagggttccactgttgttgtatgtcttaaatttatttaaaactttttttaatccagatgtagactatattctaaaaaataaaaaagcaaatgtgtcaactaaattggacaagcgtctggtcctcattaatctgccaatgaatggtttcgtcattaaataaaaatcaatttaattgatttactagc

SEQ ID NO: 154034 - DNA, 3781 bp, Homo sapiens
  Payload ID: 10271
  Gene Symbol: MID1IP1
  Gene Name: MID1 interacting protein 1
  Uniprot ID: Q9NPA3
  ENST ID: ENST00000614558
  CDS Start-End: 2200-2751
aagggcccagagctctggccggcggaccttttccttctggagtttccccggcgggtattagtccttgtggcaccaagtcagaatttcattcaaaagacaattaggaagatggttttctatggaaaatatttaagtgtaggtcttaatgtgaaagaaagagggagagaaagaaacccctttattatgttctcccttccttaggcattttttgtcccgtgggaaaaaactgtactagggacagagacctctgttaagttttagagaaaagggatcttttttttttttatttgagacagagtcttgctctgtcgcccaggctggagtgcagtggcacgatctcggctcactgcaactccgcctcctgggttcaagcaattctcctgcttcatcctcccgagtagctgggattacaggcgctggccaccacgcccggctaatttttgtatttttagtagagaccgggtttcaccatgttggccaggctagtctggaacccctgactttgtgatccgcccgcctcggcctcccaaagtgctgggattacaggcgtgagccaccgtttcaggccgagaaaagggatttaaaatgagaagcttgaatcttattgaacataattgtaggactgccagagaggactggtggatgaggaatatggcaagggacatgagatgggaaaaattaaataggctgtggtttggaagtctcaaagtgaaattcaaggtgcaaggctcttaaaagttaaatccagcgattcggtacatagcttaggccctattaaatgacccagtgctttaagaactatcttttgaaaggaacacttcacacaagcaccctcaaaaataattagacacctccccatttctctgttaaatggtgaaagacacccaagactagacctaactactgtcaccctctcctggcctcttggcagccaaaaggccacatggcccaggctctccagcatcactgtgtagccgacttggacaaaaatggacttctccccattgccacttgcagatctcttcaaagaatcagcagatctgatagtgtgcccctcttcatccccggcaaccactgttaaaggaaagattgggaaagatcccaccccgccaggagggaggcaaaagcctctgacgctcccctccccccatagctgaccaaggccagggccactgcgggagcaccgcgcgtccacgtgcacccagcatgcccggtcaccctttattacgtaagagtcccaggatggagttgtacctgctgccggcccctcttccccgacggctaataataaacccgggttcctgtttcccggccgcggccactccagattcggggctgaggggctcactctgcaaccaaggcacgtgcattctggtcatcccacgcggggagcgcgcgcaaggcccgcccagcccccacatgccagccccaccctccagtcggtccggacgccgacgcctttttgaccctcgctgtgcccggccctcctcatctggcctgcccagggcttggtgctggcggggtccagctgctccaatccctcctcctctgctctgccctgccctgccctggcctgccccggcgccctccctcagcccgggtatcaggcgagaggcggagctggcccggcgcgccccgcccccgctgtagaaagggccgggcgagtgttactcgcggtcatcccggcctgggccttttatctcggtgctgccgggggaggcgggaggaggagacaccaggggtggccctgagcgccggcgacacctttcctggactataaattgagcacctgggatgggtagggggccaacgcagtcaccgccgtccgcagtcacagtccagccactgaccgcagcagcgcccttgcgtagcagccgcttgcagcgagaacactgaattgccaacgagcaggagagtctcaaggcgcaagaggaggccagggctcgacccacagagcaccctcagccatcgcgagtttccgggcgccaaagccaggagaagccgcccatcccgcagggccggtctgccagcgagacgagagttggcgagggcggaggagtgccgggaatcccgccacaccggctatagccaggcccccagcgcgggccttggagagcgcgtgaaggcgggcatccccttgacccggccgaccatccccgtgcccctgcgtccctgcgctccaacgtccgcgcggccaccatgatgcaaatctgcgacacctacaaccagaagcactcgctctttaacgccatgaatcgcttcattggcgccgtgaacaacatggaccagacggtgatggtgcccagcttgctgcgcgacgtgcccctggctgaccccgggttagacaacgatgttggcgtggaggtaggcggcagtggcggctgcctggaggagcgcacgcccccagtccccgactcgggaagcgccaatggcagctttttcgcgccctctcgggacatgtacagccactacgtgcttctcaagtccatccgcaacgacatcgagtggggggtcctgcaccagccgcctccaccggctgggagcgaggagggcagtgcctggaagtccaaggacatcctggtggacctgggccacttggagggtgcggacgccggcgaagaagacctggaacagcagttccactaccacctgcgcgggctgcacactgtgctctcgaaactcacgcgcaaagccaacatcctcactaacagatacaagcaggagatcggcttcggcaattggggccactgaggcgtggcgcccgtggctgcccagcaccttcttcgacccatctcaccctctctcattcctcaaagctttttttttttttcctggctggggggcgggaagggcagactgcaaactggggggctgcgtacgtgcaggaggcgcggtggggctgcgtggaggagggggccacgtgtgagagagaagaaaatggtggccggagatgggagggcccaaggaacctcctgggagggggcctgcattctatgttggtgggaatgggactgggctgacgccctgcattcagcctgtgcctttcctggggtttcttttctgttcttttcggaggagagggcccgagaaggggccataccagggcgcggcgctgggttgccacacttgggaaagcagcccggagctgggtgctggggaaggcggggcgcgtagcctcccgccgccctgcggttgggccggtggaggcccaggcgttgctaggattgcatcagttttcctgtttgcactatttctttttgtaacattggccctgtgtgaagtatttcgaatctcctccttgctctgaaacttcagcgattccattgtgataagcgcacaaacagcactgtctgtcggtaatcggtactactttattaatgattttctgttacactgtatagtagtcctatggcacccccaccccatccctttcgtgccactcccgtccccacccccaccccagtgtgtataagctggcatttcgccagcttgtacgtagcttgccactcagtgaaaataataacattattatgagaaagtggacttaaccgaaatggaaccaactgacattctatcgtgttgtacatagaatgatgaagggttccactgttgttgtatgtcttaaatttatttaaaactttttttaatccagatgtagactatattctaaaaaataaaaaagcaaatgtgtcaactaaattggacaagcgtctggtcctcattaatctgccaatgaatggtttcgtcattaaataaaaatcaatttaattgatttactagc

SEQ ID NO: 154035 - DNA, 18413 bp, Homo sapiens
  Payload ID: 10272
  Gene Symbol: MDN1
  Gene Name: midasin AAA ATPase 1
  Uniprot ID: Q9NU22
  ENST ID: ENST00000369393
  CDS Start-End: 117-16907
cgcctttcctgcgggcgtagttgctggctgctcgggcactgggacctcggcggcttggggacgctggccgcgaagtagggagcgcaggtggccgctcggggtgagggccctgggtcatggagcacttcttgctggaggtggcagccgcgccgctgcggttaatcgcagccaagaacgagaagagccgcagtgagttgggcaggttcttggccaagcaggtgtggacacctcaagatcgccagtgtgtcctgagtaccttagcacagttgcttttggataaggactgtactgtgctggttggtcgccagcttcgccctctccttttggatttgctggaaaggaatgccgaagccattaaagctggaggccaaatcaaccatgatctgcatgaacggctatgtgtgtcgatgagcaaactcattggtaaccatcctgatgtcctcccgtttgccctgagatatttcaaggacacatccccagtctttcaaagacttttcctagagagttcagatgctaatccagtacgctatggacgtaggaggatgaagctccgggacctaatggaagcagccttcaagtttctgcagcaggagcagtctgtgttccgggagctctgggactggagtgtgtgtgtccctctcctcagaagccatgacaccttggttcgctggtatacagccaattgtcttgctttggttacctgtatgaatgaagagcacaagttatcatttcttaagaagatatttaatagtgatgaattgatccatttcaggttgaggttattagaagaggcccagttgcaggacttggagaaggccttggttttggccaatccagaagtctccctttggcgtaagcagaaggagctgcagtacttacagggacatcttgtttcgtctgacctctcccctagggtgacagctgtttgtggtgtggtgctgcctgggcagctgccagcccctggagagctgggtggtaataggagttcttcacgtgaacaggagctggcccttaggtcttatgtgctggttgagtctgtctgcaaaagtcttcagaccctggctatggcggttgcttctcagaatgctgtgttgttggaaggaccaataggatgtggcaaaacttccttagttgaatatttagctgcagtgacaggtagaacaaagcctcctcagcttctcaaagtccagcttggagatcagactgacagtaagatgcttttggggatgtatcgctgcacagatgttcctggagagtttgtgtggcagcctggcaccctgacacaggcagccacaatgggccactggatccttctggaggatattgactatgcccccttagacgtggtttctgtgctgatccctctcttggagaatggagagctcttgattcctggccgaggtgactgtctgaaagtggcacctggatttcagttttttgcaaccaggagactcttgagctgtggaggaaattggtatcgaccgctaaacagtcatgctactttgctagacaaatattggaccaaaattcacctggataacctggataagagagaactgaatgaggttcttcagagcagatatcctagcctattggcagtggttgatcacctgcttgacatttatatccaacttactggagagaaacatcactcttggagtgatagttctgttggatgtgaacaggcacctgaagaagtttcagaagccagaagagaaaacaaaagaccaacccttgagggaagagaattatctctaagggatctgctgaattggtgtaataggattgcccatagctttgacagttcatctttatcagcatcattaaatatttttcaagaggctctagactgtttcacagcaatgctttctgagcatacaagcaaactgaaaatggcagaagttattggaagcaaattgaacatttctagaaaaaaggctgaattcttttgtcaactttataaaccagaaattgtgatcaatgagctagatttgcaagtgggtcgagtgcggcttctacggaaacaaagtgaggctgttcacctacagagggagaagttcactttcgctgctacacggccgtcctctgttctcatcgagcagcttgcagtgtgtgtcagcaaaggggagcctgtgttgctggtgggagagaccgggactggcaaaacctctaccatccaatacttggctcacattacaggccaccgtttgagggttgtcaatatgaatcaacaaagtgatactgcagacttgcttggaggttataaaccggtggaccataagcttatttggctacccttacgggaggcatttgaggaactctttgctcagacattttccaagaaacaaaactttacgttcttggggcacattcagacctgttacagacagaaacggtggcatgatctcctgagactaatgcagcatgtacacaagtctgctgttaacaaggatggaaaagacagtgaaactgggttactcataaaagagaaatgggaagcatttggtcttagactcaaccatgcccaacaacagatgaaaatgactgaaaataccttattgttcgcatttgtagagggtacattagctcaggctgtaaagaaaggagagtggatcttgttggatgagattaacttggctgctccagaaatactagaatgtctgagtggtttgcttgaaggatcttctggatccctggtgttgctggatcgaggagacacagagccactggttcggcatcctgacttccgtttatttgcctgtatgaatccagcaactgatgtaggcaaaagaaatctcccaccaggaataagaaacaggttcacagaactttatgtagaagaattagaaagcaaagaagacttacaggttcttattgtagattatctgaaaggattgagtgtgaacaagaatacagtgcaaggaatcataaacttctacacagctttgcggaaagagtctgggaccaaactggtggatggcactggccatagacctcactacagccttcggactctgtgccgggccctgcgatttgcagcctccaatccatgtggcaacattcagcgctcactctatgagggtttttgtttgggtttcttaacacagcttgacagggcatcacacccaatagttcagaagctcatctgtcaacacattgtccctggcaatgtcaagagtctgctgaagcagcctattccagagccaaaaggaggtcggcttatccaggttgaaggctactggattgcggtgggagacaaggagcctacaatagatgagacgtacattctgacatcttctgtgaagctgaacctgagagatatagtccgagttgtctctgcaggaacctatccagtgctgattcagggagagacatcagttggtaaaacaagcctgatccagtggctggctgcagctactggcaaccactgtgtgcgtattaataatcacgaacacacggatattcaggagtacattggttgttacacgtctgactcctcagggaagcttgtctttaaggaaggtgttcttattgatgccatgagaaaaggctattggattattttagatgaattaaatttggcccctactgatgtgttagaggcgctgaataggctgttggatgataaccgtgaattgctagtaacagaaacacaggaagttgttaaagcacaccctcggtttatgctttttgccacccaaaatcccccaggactttatggaggcagaaaggtcctttctagagccttcaggaatcggtttgtggaattgcactttgatgagttacctagctccgagttggaaacaatcttgcacaagcggtgtagtttgccaccctcctattgcagcaagttggttaaagtcatgctggatcttcagtcctatcgcagaagttcttcagtgtttgctggaaagcagggcttcatcacccttcgtgatctgttccgatgggctgaaagatacagattggctgagccgaccgagaaggagtatgactggctacagcatttagccaatgatggttatatgcttctggcaggtcgagtcaggaagcaggaggaaattgatgtgattcaagaagtccttgagaaacatttcaagaaaaaattgtgtcctcaatctcttttctccaaagaaaatgttctaaaattgctgggtaaattgtctactcagatatccacattggagtgtaactttggccatatcgtgtggactgagggcatgcggagactcgcgatgctagtgggaagggcattggaatttggtgaacctgtgctgctggttggagacactgggtgtgggaaaactactatctgtcaggtatttgcagccttggcaaatcagaaattatactctgtcagctgccacttacacatggagacatcagacttcctgggtggcctgcggccagtgagacaaaagccaaacgacaaggaagaaattgacacatcaagactctttgagtggcatgatgggcctctggttcaggccatgaaggaggacggctttttcctcttggatgagatctcattggccgatgactctgtcttggaaagactcaacagtgtccttgaagtagaaaagtctctggtattagctgaaaaaggcagtccagaggacaaggatagtgaaatagagctgttgactgctgggaaaaaatttcgtattctagcaaccatgaaccctgggggtgactttggaaaaaaggagctgtctcctgccttaagaaaccggtttacagaaatatggtgccctcaaagcacaagccgtgaagatttaattcagatcatcagtcataatcttcgtccaggattgtgtctgggcagaatagatcctaaagggtctgacatacctgaagtgatgctggatttcattgactggctgacccaccaagagtttggcagaaagtgtgtggtcagtatcagagatatcctgtcctgggttaacttcatgaacaaaatgggggaggaagctgctttgaaaaggccagagatcatctccactgtgacatcttttgtccatgctgcatgcctggtgtacatagatggaataggttcaggggtaacttcctctgggtttggtacagcccttttggcacgaaaagaatgtctgaaatttctaatcaagaggcttgccaagatagtacgacttacagaatatcagaaaaatgagttgaagatttatgacagaatgaaggccaaagaattcactggaatagataacctttggggaattcatccattttttataccaaggggacctgtcctacacaggaataatattgcagactatgcactcagtgcagggaccactgctatgaatgcacagaggctcttaagagctaccaaactgaagaagcccattctcctggagggttcccctggtgttggcaagacaagtttggtgggagcattagcaaaggcttcaggaaatacccttgttagaatcaacttatcagagcaaacggacatcacagacctgtttggagcagatctacctgttgaaggtggcaagggaggagagtttgcctggcgtgatggccccttactggcagctttgaaggcaggccattgggtggtgttggatgagcttaacctggcttctcagtctgtattggaaggactcaatgcttgttttgaccaccgaggagaaatctatgtgcctgagttaggaatgagctttcaagtgcagcatgaaaagacgaagatttttgggtgtcagaatccctttagacaaggaggtgggaggaaaggcttgcccaggtctttccttaacagattcactcaggtcttcgttgatccccttacagtaattgacatggagttcattgccagtactttgtttccagccattgagaaaaatattgttaagaaaatggttgctttcaataaccaaattgatcatgaagtgactgttgagaagaaatgggggcaaaaaggaggaccctgggaattcaacctccgggaccttttccgctggtgtcagttgatgctggttgaccagtcccctgggtgttatgatcctggtcagcatgtgtttttggtctatggtgaaagaatgagaaccgaagaggacaaaaaaaaggtcattgctgtattcaaggatgtgtttggttcaaattccaacccatacatgggaaccagactatttcgtatcactccctatgatgttcagttgggctactcagtcctttcccgtgggagctgtgttcctcacccgtcccgccatcccctgttgctcctgcaccagtcattccaacccctggagtcaatcatgaagtgtgtgcagatgagctggatggtcatcctggtcgggccagcctctgtgggcaagaccagcctggtccagcttctggcacaccttactggccacacattaaagatcatggctatgaacagtgcaatggatactactgagctgctgggtggatttgagcaggttgatcttatacgaccttggaggaggctgctagagaaggtggagggaactgtaagggcactgttaagggatagcctccttatcagtgctgatgatgcagaagtagtgctgcgagcctggagtcattttcttctgacatataagcctaagtgtcttggagaaggtggtaaagctatcacgatggagattgtcaacaaactagaagcagtgttattgcttatgcagcgactcaacaataaaatcaactcatactgcaaggcagagtttgccaaacttgttgaagagttccgaagctttggtgtgaagcttacgcagttggccagtggccatagccatggcacatttgaatgggttgacagcatgttggttcaggccctgaagtctggagactggcttctgatggacaatgttaacttctgcaacccatcagtgttggatcgtttgaatgctttgcttgaacccggaggtgtcctcactattagtgagagaggaatgatagatggatccactcccacgataacaccaaatcccaatttcagacttttcctctcgatggatcctgttcatggagatatatcccgagctatgaggaatcgtggacttgaaatctacatttcaggggaaggggatgcaagcaccccagacaacctggatttgaaagttctgctgcacagccttggattggtggggaacagtgtatgtgacatcctcttggctttacacacagagacccggagcactgttgtaggttctccaacatcttctgtatcaactctaatccagacagccatactaattgtccagtacctgcagcgagggctgagtttagacagagccttttctgaagcatgctgggaagtatatgtctgttcccagcattcaccagcaaaccggaagcttgtacaggctttactggagaaacatgtttcttctttgcgagcacatgaaacctggggagactccattcttggcatgggactgtggccagattctgtgccctcagctctctttgctactgaagattcacacctgtctacagtccgaagagatggacagatcttagtatattgtctcaacaggatgagcatgaaaaccagcagctggacaaggagtcagccttttaccttgcaagacttagagaaaattatgcagtcccccagccctgagaacctgaaattcaatgcagtcgaagtgaatacttactggatcgatgaaccagatgttttggtcatggctgttaaattgctcatagaaagagcaaccaatcaggattggatgctcagagttaaatggctttatcatttagccaagaatataccgcaggggcttgagtccatacaaattcatttggaagccagtgctgcatctctcaggaatttttactcacattccctctcaggtgcagtcagtaatgttttcaaaatattacaaccaaatacaacagatgaatttgtgatccctctggatccccgatggaatatgcaggctctggacatgattagaaatttgatggactttgacccacaaacggaccagcctgaccagctctttgcccttttagaatcagctgcaaacaagacaatcatatatcttgaccgggaaaaacgggtttttactgaagcaaatttggtttctgttggtagcaaaaagctaagagagagtgttttgagaatgtcctttgaattccatcaagatccagaaagctatcacactctgccccatgaaattgtggtcaatcttgctgctttttttgaactttgtgatgcactagtcctgctctgggtacagtcctcccagggaatggtgtctgatgccagtgccaatgagatcttaggttctctgcggtggcgggaccggttctggactgtggccgacacagtaaaagtagatgccccaggtctggcccttcttgccctccattggcactgggttttaaaacatctggtccaccagatcccccgacttctgatgaattatgaagacaaatattacaaagaagttcagactgtctcagaacatattcagaattgtctggggagccagactggtggcttcgctggtataaagaagttgcagaagttcctgggacgaccgtttccttttaaggacaagctggtggtggagtgtttttcacaactgaaggtccttaacaaagtccttgccatcagggagcagatgtctgcccttggggagagtggatggcaggaagacattaaccgtctccaagtggttgcttctcagtggacattaaagaaaagtctcctgcaagcctggggactgatcctcagagcaaatattttggaagatgtcagcctagatgaattgaagaattttgtgcatgctcagtgtttagaactgaaagccaaaggactctcacttggttttctggagaaaaagcatgatgaagcttcctccctgtcccatccagacttgacctccgtaatccacctcaccaggagtgttcagttgtggcctgcaatggagtacctggctatgctttggcggtacaaagtgacagctgattttatggcacaagcttgtctcagaagatgcagcaaaaatcaacaaccccagataaatgaggagataagtcacctcatctcattttgtctttatcacacacctgttacacctcaagagcttcgagatctgtggtccttgctgcatcatcagaaggtgtctcctgaagaaattacatctttgtggtccgagttatttaattccatgtttatgtctttctggagcagtactgtgaccacaaatccagagtactggctaatgtggaaccctttgcctggtatgcagcagagggaggcacccaagtctgttttggactccacattgaagggccccggcaatctcaatagacccatattctctaagtgctgctttgaagtcttaaccagcagctggagagcaagtccctgggatgtgagtggcctccccattctttcctcctctcacgtgaccctaggagagtgggttgagagaactcagcagctccaggacatcagttcgatgctttggactaacatggctatctcttcagtagcagaattcagacgcacggattcccaactccaggggcaggtgctgttccggcacctggcaggcctagcagagctgctcccagagtcccggcggcaggagtacatgcagaactgtgagcagctgctgcttgggagcagccaggccttccagcatgtgggccagacacttggggacatggctggtcaggaggtgctgcccaaggaactgctctgccagttgctcacctccctgcaccactttgttggtgaaggggagagtaagaggagcctgcctgagccagcccagcgtgggagcctctgggtgagcctcggcttgctccagattcagacatggcttccccaggcacgctttgaccctgcggtgaagagggagtacaagctcaattacgtcaaggaagagttacaccaactgcagtgtgaatggaagacccggaacctgtcatcccagctgcagactggaagagacctggaagatgaagtcgttgtcagctactctcatcctcacgtcaggctgcttcgccaaaggatggatcggctggataatttaacctgtcacctgttgaagaaacaggcctttagaccccagctgcctgcctacgagtccctggttcaggagatccaccactacgtcaccagcatcgccaaggcccctgctgttcaggatctgctcacacggcttctgcaggccctccacatagatgggccacggtctgcccaagtagcccagagccttctaaaggaggaggcctcttggcagcagtcacaccaccagttccggaagcggctgtcagaggagtacaccttctatccagatgccgtgagcccactgcaggcatccatattgcagttacaacatggcatgaggctggtggcctctgagctccacacctcactccacagcagtatggttggtgcagacaggctggggaccctggccacagccttgctggctttcccatcggtgggccccaccttcccgacttactatgctcatgcagacactttgtgctcggtgaagtctgaggaggttctacgaggccttgggaagctaatcctcaagcgctcaggaggaaaggagctggaaggcaagggccagaaagcctgtcccactcgggagcagctgctgatgaatgctctcctttacctgcgctcccacgtgttatgcaagggagagttggaccagagggccctgcagctcttcagacatgtgtgtcaggaaatcatcagtgagtgggatgagcaggaacgcatagcccaagagaaggctgagcaggaaagcggcctgtatagatacaggagcaggaactctaggacagccctgagtgaagaggaggaggaagaacgggagttcagaaaacagttccccctgcatgaaaaggactttgcagatattttggtgcagccaacgttggaggagaacaaaggaacttcagatgggcaagaagaggaagcaggcacaaacccagctctcctctcccagaattcaatgcaggcagtaatgctgatacaccagcaattgtgtctcaactttgctcgatccctctggtatcaacagactctgccgccacatgaagcaaagcattacctcagcctgtttctgtcttgctatcagactggggcatcgcttgtgacacacttctaccccctgatgggagttgaactgaatgaccgactcttgggcagccaacttttggcctgtaccctctcccataacactctttttggggaggcaccctcagacctgatggtgaaacctgatgggccctatgacttctaccagcatcccaatgttccagaagcacggcagtgtcaacctgtgcttcaaggtttctcagaggctgtcagtcacttgctacaggactggccagaacacccagcgcttgaacagctcctggttgtaatggacagaattcgtagtttcccactttccagtcccatctcaaagttcctgaatggcttagagatccttctggcaaaggcacaggattgggaggaaaatgcaagtcgagctttgtctttgcggaaacatcttgatttgatcagtcagatgatcattcggtggcgtaaactggagctgaactgctggtccatgagtttggataatactatgaagcgccacaccgagaaatccaccaagcactggttctccatctatcagatgcttgagaagcacatgcaggaacaaacagaagaacaggaagatgacaaacagatgaccttgatgttgctggtcagcacattacaagcatttattgaaggatcctcgctgggagagttccatgtgcgacttcagatgttactggttttccattgtcatgtcttgctgatgccacaggttgaaggaaaggattcactttgcagtgttctatggaatttgtaccattattacaagcaattctttgaccgggtccaggccaaaattgtggaacttcgttcccccctagaaaaagaacttaaagaatttgttaagatttccaagtggaatgatgtcagcttctggtccattaagcaatctgtagaaaagacacacaggacactctttaaattcatgaagaaatttgaagcagtcctgagtgaaccctgccggtcatccctggtggagagtgacaaggaagaacagcctgactttttgcccaggccaacagatggagctgcaagtgaactgtcttccattcagaatctgaacagggcactgagggagaccctgttagcccaaccagcagctgggcaggccacaattccagagtggtgtcagggcgctgctccttccggcttggaaggggagcttctgcgtcgcttgccaaagctcaggaaacgcatgaggaagatgtgcctgacgttcatgaaggagagccccctgcctcgccttgtggagggccttgatcagttcacaggtgaagtgatttcctctgtgagtgagctgcagagcttaaaggtggaaccctctgcagagaaggagaagcagcggtcagaagccaagcacattctcatgcaaaaacagcgagctttgtcagacctctttaaacaccttgcaaaaattggtttgtcgtatcgcaaaggtcttgcttgggcccgttcaaaaaaccctcaagagatgcttcatcttcacccattagatctccagagcgcattgtccatcgtcagcagcactcaggaggctgattctaggctgcttacagaaatctcgtcttcatgggatggatgccagaagtatttttatcgctctcttgcacggcatgccaggcttaacgcagcactagcaactcctgccaaggaaatgggcatgggcaacgtggagaggtgcagagggttctcagcacatttgatgaagatgctcgtccgacagcggcgctccctgaccacgctcagtgagcagtggatcatcctcaggaacctcctcagctgtgtgcaagagattcacagcaggctgatggggccccaggcctaccccgtggccttcccccctcaggatggcgtgcagcagtggacagagcgcctgcagcacctggccatgcagtgccagatcctgcttgagcagctctcctggctcctccagtgctgccccagtgtagggccagctccaggccatggcaatgtccaggtactggggcagcctcctggcccctgcctggaaggaccagaacttagcaagggacaactttgtggagtagtgctggacctaattccttccaatctgagctacccatctccaatacctggaagtcagctgccctctggttgccggatgcggaaacaggatcacctttggcaacagtcaactacgagattaacagagatgctaaaaaccattaaaacagtgaaagctgacgtcgacaaaattagacagcagtcttgtgagactctctttcattcttggaaagattttgaagtttgctcttctgcgctgagttgcttgtcccaggtgtcagttcatttgcagggcctagagtccttgttcattcttccagggatggaggttgagcaaagagactcacaaatggcactagttgaaagtctggaatatgtaagaggagaaattagtaaagccatggctgactttactacctggaagacccatctgcttacttcagatagccaaggaggaaatcaaatgttggacgaaggatttgtggaagatttttcagagcaaatggaaattgccatccgagccatcctctgtgccatccagaacttagaagaaagaaagaatgaaaaagcagaggagaacactgaccaagcaagcccacaagaagattatgcaggctttgagagactgcaatcaggacatctaacaaaactcttagaggatgacttctgggccgatgtgagcactttgcacgtgcagaaaataatttctgccatctccgagctgttggagaggctgaaatcgtacggtgaggatggcacagcagcaaagcacctgttcttcagccaatcctgttccttgctggtgcgcctggtgccggtcctctccagctactcagacctcgtcctcttcttcctgaccatgtctttagcaactcaccgtagtactgcaaagctgctctctgtgcttgcccaggtctttacagagcttgcccagaagggattttgcttgcccaaagaatttatggaagattcagctggagagggagcaactgagttccatgactatgagggaggtggaattggagaaggcgagggcatgaaggatgtgagtgaccagatcggaaatgaagaacaggtggaagatacatttcagaagggtcaagaaaaagacaaagaggatcctgattcaaaatctgatattaagggcgaggataatgccattgagatgtcggaagattttgatgggaaaatgcatgatggggagcttgaagaacaagaagaggatgatgagaaatcagatagtgagggcggagacctggataaacacatgggcgatctcaatggtgaggaagctgacaaactagatgagaggctttggggtgatgatgatgaggaggaagatgaggaggaagaagacaataaaactgaagaaacaggaccaggaatggatgaggaagattctgaacttgttgctaaagatgacaacttggatagtggcaattcaaacaaagataaaagccagcaagataagaaggaagaaaaggaagaagcagaagctgatgatggtggacaaggtgaagacaaaattaatgaacaaatagatgagagggactatgatgaaaatgaggtggacccttaccatggcaatcaggaaaaggtgccagaacccgaggctttggaccttccagatgacttgaacctcgacagtgaagacaagaatggtggtgaggacaccgacaatgaagaaggagaagaagagaatcctttggagataaaagaaaaaccagaagaagcaggtcatgaagctgaggaaagaggagagaccgagaccgaccagaacgaaagtcagagtccacaggagcctgaggaaggccccagtgaagatgacaaggcagaaggggaagaggaaatggacacaggagctgatgaccaagatggagatgctgctcagcatcctgaagaacactctgaggagcagcagcagtctgtggaggaaaaagacaaggaagccgatgaagaaggtggagagaatggccctgctgaccaaggtttccagccccaggaggaagaagaacgggaggactctgatacagaggagcaggtgccagaggctttggagaggaaggagcatgcctcctgtgggcagactggtgtggagaacatgcagaacacacaggccatggagctggctggggccgcacctgagaaggagcaggggaaagaggaacacggaagtggagctgcagatgcaaaccaggcagaaggccatgaatcgaatttcattgcccagttggcctcccagaagcacaccaggaaaaacacacagagttttaagaggaaacctgggcaggctgacaatgaacgttccatgggtgatcacaatgagcgtgtgcacaagaggctgaggactgtggatacggacagccatgccgagcaggggccagctcagcagccccaggcccaggtggaggatgcagatgcattcgagcacattaaacaaggcagtgacgcatacgatgcacagacctatgatgtggccagcaaagaacagcaacagtctgcaaaagactctggcaaagatcaggaagaggaggagatagaggacacccttatggacacagaggagcaggaggagttcaaagcagcagacgtggagcagctgaagccagaggaaatcaagtcgggcaccacagcacccttgggctttgatgagatggaagtggagatccaaactgttaaaacagaggaagaccaagaccccagaacagacaaagcccataaggagacagaaaatgagaaaccagaaagaagccgagagtctaccattcatacagctcatcaattcctcatggacacgatcttccagccctttttaaaagatgtcaatgagctaagacaggagctggagagacagctggaaatgtggcagccacgtgaatctggaaacccagaggaggagaaggttgcagctgagatgtggcagagttacctgatcttaacagcgcctctttcacaacggttatgtgaagagcttcgtctcatattagagcctacccaggcagccaagctgaaaggagactatcgaactgggaaacgactaaacatacggaaagtcattccatacattgctagtcaatttcggaaagacaagatttggcttcgaaggaccaagcccagtaaacgccagtatcagatttgtttggctatcgatgactcttctagtatggtagacaatcataccaagcagcttgcatttgaatctttggctgtgattggaaatgctctaaccctcctggaagtgggtcagattgcagtgtgtagttttggagaatctgtaaagctgttacacccatttcatgagcagttcagtgattactctgggtcccagattctacgtctctgcaaattccaacaaaagaaaaccaagattgctcagtttctagagtctgttgccaacatgtttgcagctgctcagcagctctcgcagaacatcagttcagaaactgcacaactcctcctggtagtctctgatgggcgaggccttttccttgagggcaaagaaagagtcctggcagcagttcaggctgcccggaatgcaaatatctttgtcatctttgttgtattggacaatcccagttcacgggattctatcttggacattaaagtaccgatatttaaaggacctggagagatgcctgaaatccgatcctacatggaagagttcccattcccatactatatcattcttcgagatgtaaacgcacttcctgagacactcagcgatgccctcagacagtggtttgagttggtgacagcctctgaccacccatagaacagaaagaagagtccaaagtgagacttaactgtggtcagaaggtcacattgcttacccaggtgctcccttttggacaactacaaaaaattttattgtaatatttttattttacaacgtgatcttacagcctacagaatgctctctggctcccggctttgcctgggctgaggtttttataccaaacctggaagcagcagcaggtgcctgaactcgtaactagagaagagttatccttcttccctgccttggaagccctggcctgggaggaggtcataccccaccgttggagcccagctgcctgttttcttttgcaggggatctgggcacctgtgccttgaggagatgctgccaggagcatgggactctgacagtcctttgtataaaggactaaagggagctgcccttttgaccctgttctaagctctgccttgccaagcccatagtgtgtgcccaaaagctgtcaagtggccaagacagctcgtttctggagagtatgagggtgtgttttcttattgtgaaaggaactaccttctcttagagggtaggaagaatgtggtgtgtgtgtgttctcataaagcaactggacattataggtgcccaggtcatctataaaaacgatccttgggctgtgtaaaaatgaagtggcttttcagtatcctctttcacacttgctgcttcgggagactatgcaatgatgggaaggtgattgcccctttatttcattcagtgccatggtccctgttgttgtagtaatttatttgtttagttcatttttttttttcttaacagtcaaggggaagagtgattcctcacactgctttcaagctggactgagccagtctcattctgggaaagaaacgctgtgtccagaactcagcagctccatctattttttccagtcgaaagaaactgatctttaggcagtttttacttggccagaaagcagtgctgaatacttgaaactgtgtgctctgttctacttaatgttctgtcagaatgttcttttgtaggcagtatgtcatgatgtaatcatctatctccttgtctgtttccaagttacactgtgaagtctgcgacccttttgaggtggtcatcaaagacacagattccttgtttaaccaagtgtcccaaagcatgtacctgaagttatatcattttttattctaaaaagctatgcagcttatattctgaaaactattaaaacatataccactgttgttgatgtaatttgtgactcttcttaatggaagatgacaggattgtaaaaggtatgctaggggactgatcttctctgctggatcagtcagtcagctgttactagttgatgctgtgctaacatgatcccctcctacttccatgttgctcttactacaaaggttatcatttgcatttatgtccatggtaggctgagctataatatgctggctttgcagcagaatgaaaaggatgagttggtgtagccttataaggaggcttataaaaattaattatcctccataaatg

SEQ ID NO: 154036 - DNA, 3654 bp, Homo sapiens
  Payload ID: 10272
  Gene Symbol: MDN1
  Gene Name: midasin AAA ATPase 1
  ENST ID: ENST00000439638
  CDS Start-End: 112-3654
ttcctgcgggcgtagttgctggctgctcgggcactgggacctcggcggcttggggacgctggccgcgaagtagggagcgcaggtggccgctcggggtgagggccctgggtcatggagcacttcttgctggaggtggcagccgcgccgctgcggttaatcgcagccaagaacgagaagagccgcagtgagttgggcaggttcttggccaagcaggtgtggacacctcaagatcgccagtgtgtcctgagtaccttagcacagttgcttttggataaggactgtactgtgctggttggtcgccagcttcgccctctccttttggatttgctggaaaggaatgccgaagccattaaagctggaggccaaatcaaccatgatctgcatgaacggctatgtgtgtcgatgagcaaactcattggtaaccatcctgatgtcctcccgtttgccctgagatatttcaaggacacatccccagtctttcaaagacttttcctagagagttcagatgctaatccagtacgctatggacgtaggaggatgaagctccgggacctaatggaagcagccttcaagtttctgcagcaggagcagtctgtgttccgggagctctgggactggagtgtgtgtgtccctctcctcagaagccatgacaccttggttcgctggtatacagccaattgtcttgctttggttacctgtatgaatgaagagcacaagttatcatttcttaagaagatatttaatagtgatgaattgatccatttcaggttgaggttattagaagaggcccagttgcaggacttggagaaggccttggttttggccaatccagaagtctccctttggcgtaagcagaaggagctgcagtacttacagggacatcttgtttcgtctgacctctcccctagggtgacagctgtttgtggtgtggtgctgcctgggcagctgccagcccctggagagctgggtggtaataggagttcttcacgtgaacaggagctggcccttaggtcttatgtgctggttgagtctgtctgcaaaagtcttcagaccctggctatggcggttgcttctcagaatgctgtgttgttggaaggaccaataggatgtggcaaaacttccttagttgaatatttagctgcagtgacaggtagaacaaagcctcctcagcttctcaaagtccagcttggagatcagactgacagtaagatgcttttggggatgtatcgctgcacagatgttcctggagagtttgtgtggcagcctggcaccctgacacaggcagccacaatgggccactggatccttctggaggatattgactatgcccccttagacgtggttcttcagagcagatatcctagcctattggcagtggttgatcacctgcttgacatttatatccaacttactggagagaaacatcactcttggagtgatagttctgttggatgtgaacaggcacctgaagaagtttcagaagccagaagagaaaacaaaagaccaacccttgagggaagagaattatctctaagggatctgctgaattggtgtaataggattgcccatagctttgacagttcatctttatcagcatcattaaatatttttcaagaggctctagactgtttcacagcaatgctttctgagcatacaagcaaactgaaaatggcagaagttattggaagcaaattgaacatttctagaaaaaaggctgaattcttttgtcaactttataaaccagaaattgtgatcaatgagctagatttgcaagtgggtcgagtgcggcttctacggaaacaaagtgaggctgttcacctacagagggagaagttcactttcgctgctacacggccgtcctctgttctcatcgagcagcttgcagtgtgtgtcagcaaaggggagcctgtgttgctggtgggagagaccgggactggcaaaacctctaccatccaatacttggctcacattacaggccaccgtttgagggttgtcaatatgaatcaacaaagtgatactgcagacttgcttggaggttataaaccggtggaccataagcttatttggctacccttacgggaggcatttgaggaactctttgctcagacattttccaagaaacaaaactttacgttcttggggcacattcagacctgttacagacagaaacggtggcatgatctcctgagactaatgcagcatgtacacaagtctgctgttaacaaggatggaaaagacagtgaaactgggttactcataaaagagaaatgggaagcatttggtcttagactcaaccatgcccaacaacagatgaaaatgactgaaaataccttattgttcgcatttgtagagggtacattagctcaggctgtaaagaaaggagagtggatcttgttggatgagattaacttggctgctccagaaatactagaatgtctgagtggtttgcttgaaggatcttctggatccctggtgttgctggatcgaggagacacagagccactggttcggcatcctgacttccgtttatttgcctgtatgaatccagcaactgatgtaggcaaaagaaatctcccaccaggaataagaaacaggttcacagaactttatgtagaagaattagaaagcaaagaagacttacaggttcttattgtagattatctgaaaggattgagtgtgaacaagaatacagtgcaaggaatcataaacttctacacagctttgcggaaagagtctgggaccaaactggtggatggcactggccatagacctcactacagccttcggactctgtgccgggccctgcgatttgcagcctccaatccatgtggcaacattcagcgctcactctatgagggtttttgtttgggtttcttaacacagcttgacagggcatcacacccaatagttcagaagctcatctgtcaacacattgtccctggcaatgtcaagagtctgctgaagcagcctattccagagccaaaaggaggtcggcttatccaggttgaaggctactggattgcggtgggagacaaggagcctacaatagatgagacgtacattctgacatcttctgtgaagctgaacctgagagatatagtccgagttgtctctgcaggaacctatccagtgctgattcagggagagacatcagttggtaaaacaagcctgatccagtggctggctgcagctactggcaaccactgtgtgcgtattaataatcacgaacacacggatattcaggagtacattggttgttacacgtctgactcctcagggaagcttgtctttaaggaaggtgttcttattgatgccatgagaaaaggctattggattattttagatgaattaaatttggcccctactgatgtgttagaggcgctgaataggctgttggatgataaccgtgaattgctagtaacagaaacacaggaagttgttaaagcacaccctcggtttatgctttttgccacccaaaatcccccaggactttatggaggcagaaaggtcctttctagagccttcaggaatcggtttgtggaattgcactttgatgagttacctagctccgagttggaaacaatcttgcacaagcggtgtagtttgccaccctcctattgcagcaagttggttaaagtcatgctggatcttcag

SEQ ID NO: 154037 - DNA, 689 bp, Homo sapiens
  Payload ID: 10272
  Gene Symbol: MDN1
  Gene Name: midasin AAA ATPase 1
  ENST ID: ENST00000487831
  CDS Start-End: 1-189
gattctatcttggacattaaagtaccgatatttaaaggacctggagagatgcctgaaatccgatcctacatggaagagttcccattcccatactatatcattcttcgagatgtaaacgcacttcctgagacactcagcgatgccctcagacagtggtttgagttggtgacagcctctgaccacccatagaacagaaagaagagtccaaagtgagacttaactgtggtcagaaggtcacattgcttacccagtcaaggggaagagtgattcctcacactgctttcaagctggactgagccagtctcattctgggaaagaaacgctgtgtccagaactcagcagctccatctattttttccagtcgaaagaaactgatctttaggcagtttttacttggccagaaagcagtgctgaatacttgaaactgtgtgctctgttctacttaatgttctgtcagaatgttcttttgtaggcagtatgtcatgatgtaatcatctatctccttgtctgtttccaagttacactgtgaagtctgcgacccttttgaggtggtcatcaaagacacagattccttgtttaaccaagtgtcccaaagcatgtacctgaagttatatcattttttattctaaaaagctatgcagcttatattctgaaaactattaaaacatataccactgttgttgatgtaa

SEQ ID NO: 154038 - DNA, 17400 bp, Homo sapiens
  Payload ID: 10272
  Gene Symbol: MDN1
  Gene Name: midasin AAA ATPase 1
  Uniprot ID: Q9NU22
  ENST ID: ENST00000629399
  CDS Start-End: 117-16907
cgcctttcctgcgggcgtagttgctggctgctcgggcactgggacctcggcggcttggggacgctggccgcgaagtagggagcgcaggtggccgctcggggtgagggccctgggtcatggagcacttcttgctggaggtggcagccgcgccgctgcggttaatcgcagccaagaacgagaagagccgcagtgagttgggcaggttcttggccaagcaggtgtggacacctcaagatcgccagtgtgtcctgagtaccttagcacagttgcttttggataaggactgtactgtgctggttggtcgccagcttcgccctctccttttggatttgctggaaaggaatgccgaagccattaaagctggaggccaaatcaaccatgatctgcatgaacggctatgtgtgtcgatgagcaaactcattggtaaccatcctgatgtcctcccgtttgccctgagatatttcaaggacacatccccagtctttcaaagacttttcctagagagttcagatgctaatccagtacgctatggacgtaggaggatgaagctccgggacctaatggaagcagccttcaagtttctgcagcaggagcagtctgtgttccgggagctctgggactggagtgtgtgtgtccctctcctcagaagccatgacaccttggttcgctggtatacagccaattgtcttgctttggttacctgtatgaatgaagagcacaagttatcatttcttaagaagatatttaatagtgatgaattgatccatttcaggttgaggttattagaagaggcccagttgcaggacttggagaaggccttggttttggccaatccagaagtctccctttggcgtaagcagaaggagctgcagtacttacagggacatcttgtttcgtctgacctctcccctagggtgacagctgtttgtggtgtggtgctgcctgggcagctgccagcccctggagagctgggtggtaataggagttcttcacgtgaacaggagctggcccttaggtcttatgtgctggttgagtctgtctgcaaaagtcttcagaccctggctatggcggttgcttctcagaatgctgtgttgttggaaggaccaataggatgtggcaaaacttccttagttgaatatttagctgcagtgacaggtagaacaaagcctcctcagcttctcaaagtccagcttggagatcagactgacagtaagatgcttttggggatgtatcgctgcacagatgttcctggagagtttgtgtggcagcctggcaccctgacacaggcagccacaatgggccactggatccttctggaggatattgactatgcccccttagacgtggtttctgtgctgatccctctcttggagaatggagagctcttgattcctggccgaggtgactgtctgaaagtggcacctggatttcagttttttgcaaccaggagactcttgagctgtggaggaaattggtatcgaccgctaaacagtcatgctactttgctagacaaatattggaccaaaattcacctggataacctggataagagagaactgaatgaggttcttcagagcagatatcctagcctattggcagtggttgatcacctgcttgacatttatatccaacttactggagagaaacatcactcttggagtgatagttctgttggatgtgaacaggcacctgaagaagtttcagaagccagaagagaaaacaaaagaccaacccttgagggaagagaattatctctaagggatctgctgaattggtgtaataggattgcccatagctttgacagttcatctttatcagcatcattaaatatttttcaagaggctctagactgtttcacagcaatgctttctgagcatacaagcaaactgaaaatggcagaagttattggaagcaaattgaacatttctagaaaaaaggctgaattcttttgtcaactttataaaccagaaattgtgatcaatgagctagatttgcaagtgggtcgagtgcggcttctacggaaacaaagtgaggctgttcacctacagagggagaagttcactttcgctgctacacggccgtcctctgttctcatcgagcagcttgcagtgtgtgtcagcaaaggggagcctgtgttgctggtgggagagaccgggactggcaaaacctctaccatccaatacttggctcacattacaggccaccgtttgagggttgtcaatatgaatcaacaaagtgatactgcagacttgcttggaggttataaaccggtggaccataagcttatttggctacccttacgggaggcatttgaggaactctttgctcagacattttccaagaaacaaaactttacgttcttggggcacattcagacctgttacagacagaaacggtggcatgatctcctgagactaatgcagcatgtacacaagtctgctgttaacaaggatggaaaagacagtgaaactgggttactcataaaagagaaatgggaagcatttggtcttagactcaaccatgcccaacaacagatgaaaatgactgaaaataccttattgttcgcatttgtagagggtacattagctcaggctgtaaagaaaggagagtggatcttgttggatgagattaacttggctgctccagaaatactagaatgtctgagtggtttgcttgaaggatcttctggatccctggtgttgctggatcgaggagacacagagccactggttcggcatcctgacttccgtttatttgcctgtatgaatccagcaactgatgtaggcaaaagaaatctcccaccaggaataagaaacaggttcacagaactttatgtagaagaattagaaagcaaagaagacttacaggttcttattgtagattatctgaaaggattgagtgtgaacaagaatacagtgcaaggaatcataaacttctacacagctttgcggaaagagtctgggaccaaactggtggatggcactggccatagacctcactacagccttcggactctgtgccgggccctgcgatttgcagcctccaatccatgtggcaacattcagcgctcactctatgagggtttttgtttgggtttcttaacacagcttgacagggcatcacacccaatagttcagaagctcatctgtcaacacattgtccctggcaatgtcaagagtctgctgaagcagcctattccagagccaaaaggaggtcggcttatccaggttgaaggctactggattgcggtgggagacaaggagcctacaatagatgagacgtacattctgacatcttctgtgaagctgaacctgagagatatagtccgagttgtctctgcaggaacctatccagtgctgattcagggagagacatcagttggtaaaacaagcctgatccagtggctggctgcagctactggcaaccactgtgtgcgtattaataatcacgaacacacggatattcaggagtacattggttgttacacgtctgactcctcagggaagcttgtctttaaggaaggtgttcttattgatgccatgagaaaaggctattggattattttagatgaattaaatttggcccctactgatgtgttagaggcgctgaataggctgttggatgataaccgtgaattgctagtaacagaaacacaggaagttgttaaagcacaccctcggtttatgctttttgccacccaaaatcccccaggactttatggaggcagaaaggtcctttctagagccttcaggaatcggtttgtggaattgcactttgatgagttacctagctccgagttggaaacaatcttgcacaagcggtgtagtttgccaccctcctattgcagcaagttggttaaagtcatgctggatcttcagtcctatcgcagaagttcttcagtgtttgctggaaagcagggcttcatcacccttcgtgatctgttccgatgggctgaaagatacagattggctgagccgaccgagaaggagtatgactggctacagcatttagccaatgatggttatatgcttctggcaggtcgagtcaggaagcaggaggaaattgatgtgattcaagaagtccttgagaaacatttcaagaaaaaattgtgtcctcaatctcttttctccaaagaaaatgttctaaaattgctgggtaaattgtctactcagatatccacattggagtgtaactttggccatatcgtgtggactgagggcatgcggagactcgcgatgctagtgggaagggcattggaatttggtgaacctgtgctgctggttggagacactgggtgtgggaaaactactatctgtcaggtatttgcagccttggcaaatcagaaattatactctgtcagctgccacttacacatggagacatcagacttcctgggtggcctgcggccagtgagacaaaagccaaacgacaaggaagaaattgacacatcaagactctttgagtggcatgatgggcctctggttcaggccatgaaggaggacggctttttcctcttggatgagatctcattggccgatgactctgtcttggaaagactcaacagtgtccttgaagtagaaaagtctctggtattagctgaaaaaggcagtccagaggacaaggatagtgaaatagagctgttgactgctgggaaaaaatttcgtattctagcaaccatgaaccctgggggtgactttggaaaaaaggagctgtctcctgccttaagaaaccggtttacagaaatatggtgccctcaaagcacaagccgtgaagatttaattcagatcatcagtcataatcttcgtccaggattgtgtctgggcagaatagatcctaaagggtctgacatacctgaagtgatgctggatttcattgactggctgacccaccaagagtttggcagaaagtgtgtggtcagtatcagagatatcctgtcctgggttaacttcatgaacaaaatgggggaggaagctgctttgaaaaggccagagatcatctccactgtgacatcttttgtccatgctgcatgcctggtgtacatagatggaataggttcaggggtaacttcctctgggtttggtacagcccttttggcacgaaaagaatgtctgaaatttctaatcaagaggcttgccaagatagtacgacttacagaatatcagaaaaatgagttgaagatttatgacagaatgaaggccaaagaattcactggaatagataacctttggggaattcatccattttttataccaaggggacctgtcctacacaggaataatattgcagactatgcactcagtgcagggaccactgctatgaatgcacagaggctcttaagagctaccaaactgaagaagcccattctcctggagggttcccctggtgttggcaagacaagtttggtgggagcattagcaaaggcttcaggaaatacccttgttagaatcaacttatcagagcaaacggacatcacagacctgtttggagcagatctacctgttgaaggtggcaagggaggagagtttgcctggcgtgatggccccttactggcagctttgaaggcaggccattgggtggtgttggatgagcttaacctggcttctcagtctgtattggaaggactcaatgcttgttttgaccaccgaggagaaatctatgtgcctgagttaggaatgagctttcaagtgcagcatgaaaagacgaagatttttgggtgtcagaatccctttagacaaggaggtgggaggaaaggcttgcccaggtctttccttaacagattcactcaggtcttcgttgatccccttacagtaattgacatggagttcattgccagtactttgtttccagccattgagaaaaatattgttaagaaaatggttgctttcaataaccaaattgatcatgaagtgactgttgagaagaaatgggggcaaaaaggaggaccctgggaattcaacctccgggaccttttccgctggtgtcagttgatgctggttgaccagtcccctgggtgttatgatcctggtcagcatgtgtttttggtctatggtgaaagaatgagaaccgaagaggacaaaaaaaaggtcattgctgtattcaaggatgtgtttggttcaaattccaacccatacatgggaaccagactatttcgtatcactccctatgatgttcagttgggctactcagtcctttcccgtgggagctgtgttcctcacccgtcccgccatcccctgttgctcctgcaccagtcattccaacccctggagtcaatcatgaagtgtgtgcagatgagctggatggtcatcctggtcgggccagcctctgtgggcaagaccagcctggtccagcttctggcacaccttactggccacacattaaagatcatggctatgaacagtgcaatggatactactgagctgctgggtggatttgagcaggttgatcttatacgaccttggaggaggctgctagagaaggtggagggaactgtaagggcactgttaagggatagcctccttatcagtgctgatgatgcagaagtagtgctgcgagcctggagtcattttcttctgacatataagcctaagtgtcttggagaaggtggtaaagctatcacgatggagattgtcaacaaactagaagcagtgttattgcttatgcagcgactcaacaataaaatcaactcatactgcaaggcagagtttgccaaacttgttgaagagttccgaagctttggtgtgaagcttacgcagttggccagtggccatagccatggcacatttgaatgggttgacagcatgttggttcaggccctgaagtctggagactggcttctgatggacaatgttaacttctgcaacccatcagtgttggatcgtttgaatgctttgcttgaacccggaggtgtcctcactattagtgagagaggaatgatagatggatccactcccacgataacaccaaatcccaatttcagacttttcctctcgatggatcctgttcatggagatatatcccgagctatgaggaatcgtggacttgaaatctacatttcaggggaaggggatgcaagcaccccagacaacctggatttgaaagttctgctgcacagccttggattggtggggaacagtgtatgtgacatcctcttggctttacacacagagacccggagcactgttgtaggttctccaacatcttctgtatcaactctaatccagacagccatactaattgtccagtacctgcagcgagggctgagtttagacagagccttttctgaagcatgctgggaagtatatgtctgttcccagcattcaccagcaaaccggaagcttgtacaggctttactggagaaacatgtttcttctttgcgagcacatgaaacctggggagactccattcttggcatgggactgtggccagattctgtgccctcagctctctttgctactgaagattcacacctgtctacagtccgaagagatggacagatcttagtatattgtctcaacaggatgagcatgaaaaccagcagctggacaaggagtcagccttttaccttgcaagacttagagaaaattatgcagtcccccagccctgagaacctgaaattcaatgcagtcgaagtgaatacttactggatcgatgaaccagatgttttggtcatggctgttaaattgctcatagaaagagcaaccaatcaggattggatgctcagagttaaatggctttatcatttagccaagaatataccgcaggggcttgagtccatacaaattcatttggaagccagtgctgcatctctcaggaatttttactcacattccctctcaggtgcagtcagtaatgttttcaaaatattacaaccaaatacaacagatgaatttgtgatccctctggatccccgatggaatatgcaggctctggacatgattagaaatttgatggactttgacccacaaacggaccagcctgaccagctctttgcccttttagaatcagctgcaaacaagacaatcatatatcttgaccgggaaaaacgggtttttactgaagcaaatttggtttctgttggtagcaaaaagctaagagagagtgttttgagaatgtcctttgaattccatcaagatccagaaagctatcacactctgccccatgaaattgtggtcaatcttgctgctttttttgaactttgtgatgcactagtcctgctctgggtacagtcctcccagggaatggtgtctgatgccagtgccaatgagatcttaggttctctgcggtggcgggaccggttctggactgtggccgacacagtaaaagtagatgccccaggtctggcccttcttgccctccattggcactgggttttaaaacatctggtccaccagatcccccgacttctgatgaattatgaagacaaatattacaaagaagttcagactgtctcagaacatattcagaattgtctggggagccagactggtggcttcgctggtataaagaagttgcagaagttcctgggacgaccgtttccttttaaggacaagctggtggtggagtgtttttcacaactgaaggtccttaacaaagtccttgccatcagggagcagatgtctgcccttggggagagtggatggcaggaagacattaaccgtctccaagtggttgcttctcagtggacattaaagaaaagtctcctgcaagcctggggactgatcctcagagcaaatattttggaagatgtcagcctagatgaattgaagaattttgtgcatgctcagtgtttagaactgaaagccaaaggactctcacttggttttctggagaaaaagcatgatgaagcttcctccctgtcccatccagacttgacctccgtaatccacctcaccaggagtgttcagttgtggcctgcaatggagtacctggctatgctttggcggtacaaagtgacagctgattttatggcacaagcttgtctcagaagatgcagcaaaaatcaacaaccccagataaatgaggagataagtcacctcatctcattttgtctttatcacacacctgttacacctcaagagcttcgagatctgtggtccttgctgcatcatcagaaggtgtctcctgaagaaattacatctttgtggtccgagttatttaattccatgtttatgtctttctggagcagtactgtgaccacaaatccagagtactggctaatgtggaaccctttgcctggtatgcagcagagggaggcacccaagtctgttttggactccacattgaagggccccggcaatctcaatagacccatattctctaagtgctgctttgaagtcttaaccagcagctggagagcaagtccctgggatgtgagtggcctccccattctttcctcctctcacgtgaccctaggagagtgggttgagagaactcagcagctccaggacatcagttcgatgctttggactaacatggctatctcttcagtagcagaattcagacgcacggattcccaactccaggggcaggtgctgttccggcacctggcaggcctagcagagctgctcccagagtcccggcggcaggagtacatgcagaactgtgagcagctgctgcttgggagcagccaggccttccagcatgtgggccagacacttggggacatggctggtcaggaggtgctgcccaaggaactgctctgccagttgctcacctccctgcaccactttgttggtgaaggggagagtaagaggagcctgcctgagccagcccagcgtgggagcctctgggtgagcctcggcttgctccagattcagacatggcttccccaggcacgctttgaccctgcggtgaagagggagtacaagctcaattacgtcaaggaagagttacaccaactgcagtgtgaatggaagacccggaacctgtcatcccagctgcagactggaagagacctggaagatgaagtcgttgtcagctactctcatcctcacgttaggctgcttcgccaaaggatggatcggctggataatttaacctgtcacctgttgaagaaacaggcctttagaccccagctgcctgcctacgagtccctggttcaggagatccaccactacgtcaccagcatcgccaaggcccctgctgttcaggatctgctcacacggcttctgcaggccctccacatagatgggccacggtctgcccaagtagcccagagccttctaaaggaggaggcctcttggcagcagtcacaccaccagttccggaagcggctgtcagaggagtacaccttctatccagatgccgtgagcccactgcaggcatccatattgcagttacaacatggcatgaggctggtggcctctgagctccacacctcactccacagcagtatggttggtgcagacaggctggggaccctggccacagccttgctggctttcccatcggtgggccccaccttcccgacttactatgctcatgcagacactttgtgctcggtgaagtctgaggaggttctacgaggccttgggaagctaatcctcaagcgctcaggaggaaaggagctggaaggcaagggccagaaagcctgtcccactcgggagcagctgctgatgaatgctctcctttacctgcgctcccacgtgttatgcaagggagagttggaccagagggccctgcagctcttcagacatgtgtgtcaggaaatcatcagtgagtgggatgagcaggaacgcatagcccaagagaaggctgagcaggaaagcggcctgtatagatacaggagcaggaactctaggacagccctgagtgaagaggaggaggaagaacgggagttcagaaaacagttccccctgcatgaaaaggactttgcagatattttggtgcagccaacgttggaggagaacaaaggaacttcagatgggcaagaagaggaagcaggcacaaacccagctctcctctcccagaattcaatgcaggcagtaatgctgatacaccagcaattgtgtctcaactttgctcgatccctctggtatcaacagactctgccgccacatgaagcaaagcattacctcagcctgtttctgtcttgctatcagactggggcatcgcttgtgacacacttctaccccctgatgggagttgaactgaatgaccgactcttgggcagccaacttttggcctgtaccctctcccataacactctttttggggaggcaccctcagacctgatggtgaaacctgatgggccctatgacttctaccagcatcccaatgttccagaagcacggcagtgtcaacctgtgcttcaaggtttctcagaggctgtcagtcacttgctacaggactggccagaacacccagcgcttgaacagctcctggttgtaatggacagaattcgtagtttcccactttccagtcccatctcaaagttcctgaatggcttagagatccttctggcaaaggcacaggattgggaggaaaatgcaagtcgagctttgtctttgcggaaacatcttgatttgatcagtcagatgatcattcggtggcgtaaactggagctgaactgctggtccatgagtttggataatactatgaagcgccacaccgagaaatccaccaagcactggttctccatctatcagatgcttgagaagcacatgcaggaacaaacagaagaacaggaagatgacaaacagatgaccttgatgttgctggtcagcacattacaagcatttattgaaggatcctcgctgggagagttccatgtgcgacttcagatgttactggttttccattgtcatgtcttgctgatgccacaggttgaaggaaaggattcactttgcagtgttctatggaatttgtaccattattacaagcaattctttgaccgggtccaggccaaaattgtggaacttcgttcccccctagaaaaagaacttaaagaatttgttaagatttccaagtggaatgatgtcagcttctggtccattaagcaatctgtagaaaagacacacaggacactctttaaattcatgaagaaatttgaagcagtcctgagtgaaccctgccggtcatccctggtggagagtgacaaggaagaacagcctgactttttgcccaggccaacagatggagctgcaagtgaactgtcttccattcagaatctgaacagggcactgagggagaccctgttagcccaaccagcagctgggcaggccacaattccagagtggtgtcagggcgctgctccttccggcttggaaggggagcttctgcgtcgcttgccaaagctcaggaaacgcatgaggaagatgtgcctgacgttcatgaaggagagccccctgcctcgccttgtggagggccttgatcagttcacaggtgaagtgatttcctctgtgagtgagctgcagagcttaaaggtggaaccctctgcagagaaggagaagcagcggtcagaagccaagcacattctcatgcaaaaacagcgagctttgtcagacctctttaaacaccttgcaaaaattggtttgtcgtatcgcaaaggtcttgcttgggcccgttcaaaaaaccctcaagagatgcttcatcttcacccattagatctccagagcgcattgtccatcgtcagcagcactcaggaggctgattctaggctgcttacagaaatctcgtcttcatgggatggatgccagaagtatttttatcgctctcttgcacggcatgccaggcttaacgcagcactagcaactcctgccaaggaaatgggcatgggcaacgtggagaggtgcagagggttctcagcacatttgatgaagatgctcgtccgacagcggcgctccctgaccacgctcagtgagcagtggatcatcctcaggaacctcctcagctgtgtgcaagagattcacagcaggctgatggggccccaggcctaccccgtggccttcccccctcaggatggcgtgcagcagtggacagagcgcctgcagcacctggccatgcagtgccagatcctgcttgagcagctctcctggctcctccagtgctgccccagtgtagggccagctccaggccatggcaatgtccaggtactggggcagcctcctggcccctgcctggaaggaccagaacttagcaagggacaactttgtggagtagtgctggacctaattccttccaatctgagctacccatctccaatacctggaagtcagctgccctctggttgccggatgcggaaacaggatcacctttggcaacagtcaactacgagattaacagagatgctaaaaaccattaaaacagtgaaagctgacgtcgacaaaattagacagcagtcttgtgagactctctttcattcttggaaagattttgaagtttgctcttctgcgctgagttgcttgtcccaggtgtcagttcatttgcagggcctagagtccttgttcattcttccagggatggaggttgagcaaagagactcacaaatggcactagttgaaagtctggaatatgtaagaggagaaattagtaaagccatggctgactttactacctggaagacccatctgcttacttcagatagccaaggaggaaatcaaatgttggacgaaggatttgtggaagatttttcagagcaaatggaaattgccatccgagccatcctctgtgccatccagaacttagaagaaagaaagaatgaaaaagcagaggagaacactgaccaagcaagcccacaagaagattatgcaggctttgagagactgcaatcaggacatctaacaaaactcttagaggatgacttctgggccgatgtgagcactttgcacgtgcagaaaataatttctgccatctccgagctgttggagaggctgaaatcgtacggtgaggatggcacagcagcaaagcacctgttcttcagccaatcctgttccttgctggtgcgcctggtgccggtcctctccagctactcagacctcgtcctcttcttcctgaccatgtctttagcaactcaccgtagtactgcaaagctgctctctgtgcttgcccaggtctttacagagcttgcccagaagggattttgcttgcccaaagaatttatggaagattcagctggagagggagcaactgagttccatgactatgagggaggtggaattggagaaggcgagggcatgaaggatgtgagtgaccagatcggaaatgaagaacaggtggaagatacatttcagaagggtcaagaaaaagacaaagaggatcctgattcaaaatctgatattaagggcgaggataatgccattgagatgtcggaagattttgatgggaaaatgcatgatggggagcttgaagaacaagaagaggatgatgagaaatcagatagtgagggcggagacctggataaacacatgggcgatctcaatggtgaggaagctgacaaactagatgagaggctttggggtgatgatgatgaggaggaagatgaggaggaagaagacaataaaactgaagaaacaggaccaggaatggatgaggaagattctgaacttgttgctaaagatgacaacttggatagtggcaattcaaacaaagataaaagccagcaagataagaaggaagaaaaggaagaagcagaagctgatgatggtggacaaggtgaagacaaaattaatgaacaaatagatgagagggactatgatgaaaatgaggtggacccttaccatggcaatcaggaaaaggtgccagaacccgaggctttggaccttccagatgacttgaacctcgacagtgaagacaagaatggtggtgaggacaccgacaatgaagaaggagaagaagagaatcctttggagataaaagaaaaaccagaagaagcaggtcatgaagctgaggaaagaggagagaccgagaccgaccagaacgaaagtcagagtccacaggagcctgaggaaggccccagtgaagatgacaaggcagaaggggaagaggaaatggacacaggagctgatgaccaagatggagatgctgctcagcatcctgaagaacactctgaggagcagcagcagtctgtggaggaaaaagacaaggaagccgatgaagaaggtggagagaatggccctgctgaccaaggtttccagccccaggaggaagaagaacgggaggactctgatacagaggagcaggtgccagaggctttggagaggaaggagcatgcctcctgtgggcagactggtgtggagaacatgcagaacacacaggccatggagctggctggggccgcacctgagaaggagcaggggaaagaggaacacggaagtggagctgcagatgcaaaccaggcagaaggccatgaatcgaatttcattgcccagttggcctcccagaagcacaccaggaaaaacacacagagttttaagaggaaacctgggcaggctgacaatgaacgttccatgggtgatcacaatgagcgtgtgcacaagaggctgaggactgtggatacggacagccatgccgagcaggggccagctcagcagccccaggcccaggtggaggatgcagatgcattcgagcacattaaacaaggcagtgacgcatacgatgcacagacctatgatgtggccagcaaagaacagcaacagtctgcaaaagactctggcaaagatcaggaagaggaggagatagaggacacccttatggacacagaggagcaggaggagttcaaagcagcagacgtggagcagctgaagccagaggaaatcaagtcgggcaccacagcacccttgggctttgatgagatggaagtggagatccaaactgttaaaacagaggaagaccaagaccccagaacagacaaagcccataaggagacagaaaatgagaaaccagaaagaagccgagagtctaccattcatacagctcatcaattcctcatggacacgatcttccagccctttttaaaagatgtcaatgagctaagacaggagctggagagacagctggaaatgtggcagccacgtgaatctggaaacccagaggaggagaaggttgcagctgagatgtggcagagttacctgatcttaacagcgcctctttcacaacggttatgtgaagagcttcgtctcatattagagcctacccaggcagccaagctgaaaggagactatcgaactgggaaacgactaaacatacggaaagtcattccatacattgctagtcaatttcggaaagacaagatttggcttcgaaggaccaagcccagtaaacgccagtatcagatttgtttggctatcgatgactcttctagtatggtagacaatcataccaagcagcttgcatttgaatctttggctgtgattggaaatgctctaaccctcctggaagtgggtcagattgcagtgtgtagttttggagaatctgtaaagctgttacacccatttcatgagcagttcagtgattactctgggtcccagattctacgtctctgcaaattccaacaaaagaaaaccaagattgctcagtttctagagtctgttgccaacatgtttgcagctgctcagcagctctcgcagaacatcagttcagaaactgcacaactcctcctggtagtctctgatgggcgaggccttttccttgagggcaaagaaagagtcctggcagcagttcaggctgcccggaatgcaaatatctttgtcatctttgttgtattggacaatcccagttcacgggattctatcttggacattaaagtaccgatatttaaaggacctggagagatgcctgaaatccgatcctacatggaagagttcccattcccatactatatcattcttcgagatgtaaacgcacttcctgagacactcagcgatgccctcagacagtggtttgagttggtgacagcctctgaccacccatagaacagaaagaagagtccaaagtgagacttaactgtggtcagaaggtcacattgcttacccaggtgctcccttttggacaactacaaaaaattttattgtaatatttttattttacaacgtgatcttacagcctacagaatgctctctggctcccggctttgcctgggctgaggtttttataccaaacctggaagcagcagcaggtgcctgaactcgtaactagagaagagttatccttcttccctgccttggaagccctggcctgggaggaggtcataccccaccgttggagcccagctgcctgttttcttttgcaggggatctgggcacctgtgccttgaggagatgctgccaggagcatgggactctgacagtcctttgtataaaggactaaagggagctgcccttttgaccctgttctaagctctgccttgccaagcccatagtgtgtgcccaaaagctgtcaagtggccaagacagctcgtttctggag

SEQ ID NO: 154039 - DNA, 985 bp, Homo sapiens
  Payload ID: 10273
  Gene Symbol: MDK
  Gene Name: midkine (neurite growth-promoting factor 2)
  Uniprot ID: P21741
  ENST ID: ENST00000359803
  CDS Start-End: 223-654
gtgctcccggaaaggcactgggcgaccgcacccgtggctttctctgggcgaccgggtcccagactccccccagcacagcagagcgcttccctgcccacccgcggaaaccgccccaggtgggccgcgccccctccccagcagccagcagggcgccagggctgagccggccgtggaggggagcgggtcccgcgggttatacaggcgccggggctccgcggcaggatgcagcaccgaggcttcctcctcctcaccctcctcgccctgctggcgctcacctccgcggtcgccaaaaagaaagataaggtgaagaagggcggcccggggagcgagtgcgctgagtgggcctgggggccctgcacccccagcagcaaggattgcggcgtgggtttccgcgagggcacctgcggggcccagacccagcgcatccggtgcagggtgccctgcaactggaagaaggagtttggagccgactgcaagtacaagtttgagaactggggtgcgtgtgatgggggcacaggcaccaaagtccgccaaggcaccctgaagaaggcgcgctacaatgctcagtgccaggagaccatccgcgtcaccaagccctgcacccccaagaccaaagcaaaggccaaagccaagaaagggaagggaaaggactagacgccaagcctggatgccaaggagcccctggtgtcacatggggcctggcccacgccctccctctcccaggcccgagatgtgacccaccagtgccttctgtctgctcgttagctttaatcaatcatgccctgccttgtccctctcactccccagccccacccctaagtgcccaaagtggggagggacaagggattctgggaagcttgagcctcccccaaagcaatgtgagtcccagagcccgcttttgttcttccccacaattccattactaagaaacacatcaaataaactgactttttccccccaataaaagctcttcttttttaatata

SEQ ID NO: 154040 - DNA, 951 bp, Homo sapiens
  Payload ID: 10273
  Gene Symbol: MDK
  Gene Name: midkine (neurite growth-promoting factor 2)
  Uniprot ID: P21741
  ENST ID: ENST00000395565
  CDS Start-End: 177-608
ggacgggcccggcgcgggagggagcgaagcagcgcgggcagcgagcgagtgagcgcgcggcggcccctggtccgcccggccgcggccgatctaggggctgggggctggaggcgggggtgggggtctgagctgcgtcctgggctcgaggcgtcccccggggagtcgcctcttagcggatgcagcaccgaggcttcctcctcctcaccctcctcgccctgctggcgctcacctccgcggtcgccaaaaagaaagataaggtgaagaagggcggcccggggagcgagtgcgctgagtgggcctgggggccctgcacccccagcagcaaggattgcggcgtgggtttccgcgagggcacctgcggggcccagacccagcgcatccggtgcagggtgccctgcaactggaagaaggagtttggagccgactgcaagtacaagtttgagaactggggtgcgtgtgatgggggcacaggcaccaaagtccgccaaggcaccctgaagaaggcgcgctacaatgctcagtgccaggagaccatccgcgtcaccaagccctgcacccccaagaccaaagcaaaggccaaagccaagaaagggaagggaaaggactagacgccaagcctggatgccaaggagcccctggtgtcacatggggcctggcccacgccctccctctcccaggcccgagatgtgacccaccagtgccttctgtctgctcgttagctttaatcaatcatgccctgccttgtccctctcactccccagccccacccctaagtgcccaaagtggggagggacaagggattctgggaagcttgagcctcccccaaagcaatgtgagtcccagagcccgcttttgttcttccccacaattccattactaagaaacacatcaaataaactgactttttccccccaataaaagctcttcttttttaatatataaaagcccctt

SEQ ID NO: 154041 - DNA, 828 bp, Homo sapiens
  Payload ID: 10273
  Gene Symbol: MDK
  Gene Name: midkine (neurite growth-promoting factor 2)
  Uniprot ID: P21741
  ENST ID: ENST00000395566
  CDS Start-End: 85-516
ttctggagacaaaaggggccgcggcggccggagcgggacgggcccggcgcgggagggagcgaagcagcgcgggcagcgagcgagatgcagcaccgaggcttcctcctcctcaccctcctcgccctgctggcgctcacctccgcggtcgccaaaaagaaagataaggtgaagaagggcggcccggggagcgagtgcgctgagtgggcctgggggccctgcacccccagcagcaaggattgcggcgtgggtttccgcgagggcacctgcggggcccagacccagcgcatccggtgcagggtgccctgcaactggaagaaggagtttggagccgactgcaagtacaagtttgagaactggggtgcgtgtgatgggggcacaggcaccaaagtccgccaaggcaccctgaagaaggcgcgctacaatgctcagtgccaggagaccatccgcgtcaccaagccctgcacccccaagaccaaagcaaaggccaaagccaagaaagggaagggaaaggactagacgccaagcctggatgccaaggagcccctggtgtcacatggggcctggcccacgccctccctctcccaggcccgagatgtgacccaccagtgccttctgtctgctcgttagctttaatcaatcatgccctgccttgtccctctcactccccagccccacccctaagtgcccaaagtggggagggacaagggattctgggaagcttgagcctcccccaaagcaatgtgagtcccagagcccgcttttgttcttccccacaattccattactaagaaacacatcaaataaactgactttttccccccaataaaa

SEQ ID NO: 154042 - DNA, 686 bp, Homo sapiens
  Payload ID: 10273
  Gene Symbol: MDK
  Gene Name: midkine (neurite growth-promoting factor 2)
  Uniprot ID: P21741
  ENST ID: ENST00000395569
  CDS Start-End: 92-355
agaccggttctggagacaaaaggggccgcggcggccggagcgggacgggcccggcgcgggagggagcgaagcagcgcgggcagcgagcgagatgcagcaccgaggcttcctcctcctcaccctcctcgccctgctggcgctcacctccgcggtcgccaaaaagaaagccgactgcaagtacaagtttgagaactggggtgcgtgtgatgggggcacaggcaccaaagtccgccaaggcaccctgaagaaggcgcgctacaatgctcagtgccaggagaccatccgcgtcaccaagccctgcacccccaagaccaaagcaaaggccaaagccaagaaagggaagggaaaggactagacgccaagcctggatgccaaggagcccctggtgtcacatggggcctggcccacgccctccctctcccaggcccgagatgtgacccaccagtgccttctgtctgctcgttagctttaatcaatcatgccctgccttgtccctctcactccccagccccacccctaagtgcccaaagtggggagggacaagggattctgggaagcttgagcctcccccaaagcaatgtgagtcccagagcccgcttttgttcttccccacaattccattactaagaaacacatcaaataaactgactttttccccccaataaaagctcttcttttttaatata

SEQ ID NO: 154043 - DNA, 1026 bp, Homo sapiens
  Payload ID: 10273
  Gene Symbol: MDK
  Gene Name: midkine (neurite growth-promoting factor 2)
  Uniprot ID: P21741
  ENST ID: ENST00000407067
  CDS Start-End: 306-737
gagcgagtgagcgcgcggcggcccctggtccgcccggccgcggccgatctaggggctgggggctggaggcgggggtgggggtctgagctgcgtcctgggctcgaggcgtcccccggggagtcgcctcttagcggtgcgtccgggctagcggcgaggggccgccccaagtcttcccaccgccgccaccttagcagcccgacttggggcctggaaagtggagcacgcggaggtgggagggccctgcacgcggcccccggtggggaaggggacgggccagggattcagactcgggctctcccctcaggatgcagcaccgaggcttcctcctcctcaccctcctcgccctgctggcgctcacctccgcggtcgccaaaaagaaagataaggtgaagaagggcggcccggggagcgagtgcgctgagtgggcctgggggccctgcacccccagcagcaaggattgcggcgtgggtttccgcgagggcacctgcggggcccagacccagcgcatccggtgcagggtgccctgcaactggaagaaggagtttggagccgactgcaagtacaagtttgagaactggggtgcgtgtgatgggggcacaggcaccaaagtccgccaaggcaccctgaagaaggcgcgctacaatgctcagtgccaggagaccatccgcgtcaccaagccctgcacccccaagaccaaagcaaaggccaaagccaagaaagggaagggaaaggactagacgccaagcctggatgccaaggagcccctggtgtcacatggggcctggcccacgccctccctctcccaggcccgagatgtgacccaccagtgccttctgtctgctcgttagctttaatcaatcatgccctgccttgtccctctcactccccagccccacccctaagtgcccaaagtggggagggacaagggattctgggaagcttgagcctcccccaaagcaatgtgagtcccagagcccgcttttgttcttccccacaattccattactaagaaacacatcaaataaa

SEQ ID NO: 154044 - DNA, 1166 bp, Homo sapiens
  Payload ID: 10273
  Gene Symbol: MDK
  Gene Name: midkine (neurite growth-promoting factor 2)
  Uniprot ID: P21741
  ENST ID: ENST00000405308
  CDS Start-End: 430-861
cggcttcccgcttcccgcggagaacaacaatgaaagtgaaagaggggtggggcgggggcgagcccgggttctgtggcccatttgccctgtggccttgagcaagcccctcccccaggcctcgggggctctcccggtttgggggaaccgggcgaggcaatgccacaggcccagggttagagggggtgggcacttgcagctgccgatgtggctggatctggaacttctcagacggctcctgtcagcgccaagtttcaccaaatccaggcctgcgggctcctcccccaggacccccactcgcagtccctcaagcctgtgctcccggaaaggcactgggcgaccgcacccgtggctttctctgggcgaccgggtcccagactccccccagcacagcagagcgcttccctgcccacccgcggaaaccgccccaggatgcagcaccgaggcttcctcctcctcaccctcctcgccctgctggcgctcacctccgcggtcgccaaaaagaaagataaggtgaagaagggcggcccggggagcgagtgcgctgagtgggcctgggggccctgcacccccagcagcaaggattgcggcgtgggtttccgcgagggcacctgcggggcccagacccagcgcatccggtgcagggtgccctgcaactggaagaaggagtttggagccgactgcaagtacaagtttgagaactggggtgcgtgtgatgggggcacaggcaccaaagtccgccaaggcaccctgaagaaggcgcgctacaatgctcagtgccaggagaccatccgcgtcaccaagccctgcacccccaagaccaaagcaaaggccaaagccaagaaagggaagggaaaggactagacgccaagcctggatgccaaggagcccctggtgtcacatggggcctggcccacgccctccctctcccaggcccgagatgtgacccaccagtgccttctgtctgctcgttagctttaatcaatcatgccctgccttgtccctctcactccccagccccacccctaagtgcccaaagtggggagggacaagggattctgggaagcttgagcctcccccaaagcaatgtgagtcccagagcccgcttttgttcttccccacaattccattactaagaaacacatcaaataaactgactttttcccccc

SEQ ID NO: 154045 - DNA, 540 bp, Homo sapiens
  Payload ID: 10273
  Gene Symbol: MDK
  Gene Name: midkine (neurite growth-promoting factor 2)
  ENST ID: ENST00000441869
  CDS Start-End: 394-540
ggtgggcacttgcagctgccgatgtggctggatctggaacttctcagacggctcctgtcagcgccaagtttcaccaaatccaggcctgcgggctcctcccccaggacccccactcgcagtccctcaagcctgtgctcccggaaaggcactgggcgaccgcacccgtggctttctctgggcgaccgggtcccagactccccccagcacagcagagcgcttccctgcccacccgcggaaaccgccccaggtgggccgcgccccctccccagcagccagcagggcgccagggctgagccggccgtggaggggagcgggtcccgcgggttatacaggcgccggggctccgcggcaggcaagagaagctgaggcctgagaacggcccgggccttggcgatgcagcaccgaggcttcctcctcctcaccctcctcgccctgctggcgctcacctccgcggtcgccaaaaagaaagataaggtgaagaagggcggcccggggagcgagtgcgctgagtgggcctgggggccctgcacccccagcagc

SEQ ID NO: 154046 - DNA, 477 bp, Homo sapiens
  Payload ID: 10273
  Gene Symbol: MDK
  Gene Name: midkine (neurite growth-promoting factor 2)
  ENST ID: ENST00000533952
  CDS Start-End: 84-477
agccagcagggcgccagggctgagccggccgtggaggggagcgggtcccgcgggttatacaggcgccggggctccgcggcaggatgcagcaccgaggcttcctcctcctcaccctcctcgccctgctggcgctcacctccgcggtcgccaaaaagaaagataaggtgaagaagggcggcccggggagcgagtgcgctgagtgggcctgggggccctgcacccccagcagcaaggattgcggcgtgggtttccgcgagggcacctgcggggcccagacccagcgcatccggtgcagggtgccctgcaactggaagaaggagtttggagccgactgcaagtacaagtttgagaactggggtgcgtgtgatgggggcacaggcaccaaagtccgccaaggcaccctgaagaaggcgcgctacaatgctcagtgccaggagaccatccgcgtcaccaagccctgcacccccaagaccaaag

SEQ ID NO: 154047 - DNA, 1339 bp, Homo sapiens
  Payload ID: 10273
  Gene Symbol: MDK
  Gene Name: midkine (neurite growth-promoting factor 2)
  ENST ID: ENST00000489525
  CDS Start-End: 151-621
aagcagcgcgggcagcgagcgagtgagcgcgcggcggcccctggtccgcccggccgcggccgatctaggggctgggggctggaggcgggggtgggggtctgagctgcgtcctgggctcgaggcgtcccccggggagtcgcctcttagcggatgcagcaccgaggcttcctcctcctcaccctcctcgccctgctggcgctcacctccgcggtcgccaaaaagaaagataaggtgaagaagggcggcccggggagcgagtgcgctgagtgggcctgggggccctgcacccccagcagcaaggattgcggcgtgggtttccgcgagggcacctgcggggcccagacccagcgcatccggtgcagggtgccctgcaactggaagaaggagtttggagccgactgcaagtacaagtttgagaactggggtgcgtgtgatgggggcacaggcaccaaagtccgccaaggcaccctgaagaaggcgcgctacaatgctcagtgccaggagaccatccgcgtcaccaagccctgcacccccaagaccaaagcaaaggccaaaggtcagcgaaaggagaagggggtggggctgtcgcggggggctgcccccccccccccccgcctgtgaggggacaattccaagttaaaccttaagttttgagtcctggccagtggcttcctgacatcgcctcacttggcttccctgcctggaaaagtctgaagatgggcactacaagagaggccgcaggtgatgctggggacataaatcctccctggcccaaatagggaccaactcaaactactccattggagcatctggcttaggacccagggagagtgtcctggaacggcttgcctttgtcagctctccagccacgggcagcatttggtcagctctgccctttctagtgttgggaggaggtcaaggcccaccctgggcctctcagctcactcgtgactcagcccagcgaggccagcagggcaggggtgaatctgcccgcttctcagccaagaaagggaagggaaaggactagacgccaagcctggatgccaaggagcccctggtgtcacatggggcctggcccacgccctccctctcccaggcccgagatgtgacccaccagtgccttctgtctgctcgttagctttaatcaatcatgccctgccttgtccctctcactccccagccccacccctaagtgcccaaagtggggagggacaagggattctgggaagcttgagcctcccccaaagcaatgtgagtcccagagcccgcttttgttcttccccacaattccattactaagaaacacatcaaataaactgactttttccccccaataaaa

SEQ ID NO: 154048 - DNA, 635 bp, Homo sapiens
  Payload ID: 10273
  Gene Symbol: MDK
  Gene Name: midkine (neurite growth-promoting factor 2)
  ENST ID: ENST00000617138
  CDS Start-End: 106-564
catgtgaccggctcagaccggttctggagacaaaaggggccgcggcggccggagcgggacgggcccggcgcgggagggagcgaagcagcgcgggcagcgagcgagatgcagcaccgaggcttcctcctcctcaccctcctcgccctgctggcgctcacctccgcggtcgccaaaaagaaagaagaaggcgcgctacaatgctcagtgccaggagaccatccgcgtcaccaagccctgcacccccaagaccaaagcaaaggccaaagccaagaaagggaagggaaaggactagacgccaagcctggatgccaaggagcccctggtgtcacatggggcctggcccacgccctccctctcccaggcccgagatgtgacccaccagtgccttctgtctgctcgttagctttaatcaatcatgccctgccttgtccctctcactccccagccccacccctaagtgcccaaagtggggagggacaagggattctgggaagcttgagcctcccccaaagcaatgtgagtcccagagcccgcttttgttcttccccacaattccattactaagaaacacatcaaataaactgactttttccccccaataaaagctcttcttttttaatatataaaagcccctt

SEQ ID NO: 154049 - DNA, 6463 bp, Homo sapiens
  Payload ID: 10274
  Gene Symbol: MID1
  Gene Name: midline 1
  Uniprot ID: O15344
  ENST ID: ENST00000317552
  CDS Start-End: 402-2405
gattggcgaagctcctccgcggcccaagccagccacctacaacgtctctgagaactgatttgaaataagagccaggcggtcctcgcttccctgcgaccgacttttcataggctgggggagaaaaggttgagaaacttgacattgtctcgagcagagtgcgtgtagcaacagatcaaagaaaaagaggacgaaaacgtgctctttgctgcccgtagatttcgccgggttgcttttgtcttgcgggctcctgtcgggttcggtgtttccgctctgaagactgcgacgcgggctccgatgcagctcgctccctgccggatgggtcatgggattctaaacatgaggcagatagctgatcagcttccttgggttttgctgatgacacaagagagctttgcctgaagatggaaacactggagtcagaactgacctgccctatttgtctggagctctttgaggaccctcttctactgccctgcgcacacagcctctgcttcaactgcgcccaccgcatcctagtatcacactgtgccaccaacgagtctgtggagtccatcaccgccttccagtgccccacctgccggcatgtcatcaccctcagccagcgaggtctagacgggctcaagcgcaacgtcaccctacagaacatcatcgacaggttccagaaagcatcagtgagcgggcccaactctcccagcgagacccgtcgggagcgggcctttgacgccaacaccatgacctccgccgagaaggtcctctgccagttttgtgaccaggatcctgcccaggacgctgtgaagacctgtgtcacttgtgaagtatcctactgtgacgagtgcctgaaagccactcacccgaataagaagccctttacaggccatcgtctgattgagccaattccggactctcacatccgggggctgatgtgcttggagcatgaggatgagaaggtgaatatgtactgtgtgaccgatgaccagttaatctgtgccttgtgtaaactggttgggcggcaccgcgatcatcaggtggcagctttgagtgagcgctatgacaaattgaagcaaaacttagagagtaacctcaccaaccttattaagaggaacacagaactggagacccttttggctaaactcatccaaacctgtcaacatgttgaagtcaatgcatcacgtcaagaagccaaattgacagaggagtgtgatcttctcattgagatcattcagcaaagacgacagattattggaaccaagatcaaagaagggaaggtgatgaggcttcgcaaactggctcagcagattgcaaactgcaaacagtgcattgagcggtcagcatcactcatctcccaagcggaacactctctgaaggagaatgatcatgcgcgtttcctacagactgctaagaatatcaccgagagagtctccatggcaactgcatcctcccaggttctaattcctgaaatcaacctcaatgacacatttgacacctttgccttagatttttcccgagagaagaaactgctagaatgtctggattaccttacagctcccaaccctcccacaattagagaagagctctgcacagcttcatatgacaccatcactgtgcattggacctccgatgatgagttcagcgtggtctcctacgagctccagtacaccatattcaccggacaagccaacgtcgttagtctgtgtaattcggctgatagctggatgatagtacccaacatcaagcagaaccactacacggtgcacggtctgcagagcggcaccaagtacatcttcatggtcaaggccatcaaccaggcgggcagccgcagcagtgagcctgggaagttgaagacaaacagccaaccatttaaactggatcccaaatctgctcatcgaaaactgaaggtgtcccatgataacttgacagtagaacgtgatgagtcatcatccaagaagagtcacacacctgaacgcttcaccagccaggggagctatggagtagctggaaatgtgtttattgatagtggccggcattattgggaagtggtcataagtggaagcacatggtatgccattggtcttgcttacaaatcagccccgaagcatgaatggattgggaagaactctgcttcctgggcgctctgccgctgcaacaataactgggtggtgagacacaatagcaaggaaatccccattgagcctgccccccacctccggcgcgtgggcatcctgctggactatgataacggctctatcgccttttatgatgctttgaactccatccacctctacaccttcgacgtcgcatttgcgcagcctgtttgccccaccttcaccgtgtggaacaagtgtctgacgattatcactgggctccctatcccagaccatttggactgcacagagcagctgccgtgagcgtctggccacatggagctgctttctggggaacagtaaggttcaggccactatttaggggactgagaaagcacaggcttcatgagtgtaatgaaatctcaccagaagtgtcccgaaatcggctcagatagggctcaaaacaagagattcctctccttttactgtgtcttgtattaagtacgggctttaataatttctttaatttttttgtatttagaggaaaatctatagattatttataagagaaacataatcaggattacaacttttaggaattacttggttttgcacattaagaggcccataagtttatcagctatttacaaccttcatttcatcacaatctgtgggcttacaaaaaaacaaaaacttttgtagttttgtatgttactcatcttcttacctgatatcccatgatgatcccatggtaggtcttctcacctcgatggtgcataacaggatgtgtttgaacctagtaggggaggaaacaggctttcttactctggtttaatttgaagtgttttaattgtgatgtcaaaaagttgtatcagatcaactaaaatggagagcaagacagagaatgaaaagagttgattttggacctcggaccttgccgtggctaaatctttaccttctcatagctgatgggataatgttggaaagaaaggttctgaatcctttggccacattttgccctgcttctctcagggttaagggttctggaagaacattaagaatgagattgcaattgaaaatagtcattttgaatcctattgattattcaaaaattcaggctgatttgtcttttatcagaggtaggattctgttttatagtatagaatctactttatccttccttttaatagttcctttagacctgtgaaatttcttcactacatttaatagttctcctatttcccgctcccccatatcaattttccttttgtctccggggctgagtaaataaacatgttctgtcacaaatagcagcaccactttggattgattttgctctccaggacatcagcacatggccctgatcagcactaccacatccaaacataagtcactgaaaaacacttaatatttatgagttggtaatgacaagggacattgtataaagtactatttgctagattcatgcctcaaaagttattataaacagacctttattaaacacatcttgaaagatgtagaagtccctctatagtctagtatagtttacaatagagttgtaagaccaaaaaaaaaaaaaaaaaattcaaactcgttattcaggaacctgcttataaaatgtcagctgggattctttgcatgccaatctgatgcgttggaatggtccatgaattaaggctttcttgagcagttcttggcccagaactctggcattggttctagtttgatgaagggcatgacctctataaatggtttcaattgctaaaatatttacctgggatactgggtcagccattttgactgagcagactagtggatttagacattgtttttagttattttgtttttaaccaaatcaaccaactgcctccctgaaataagtcaatgaactcattgtttcagcatcacgtggccaaaggtcatgtgattgcaaatctggatttcaagggaggccaagccagcttcctgggtccttccatcctcttccctagcagacactctcctttttcttaacagatagattctatatatttactatattatttatacccagatgaatattttgatagatacctaagacaatttcacatctaaaagatggacgcctcaatggaaaaaaaacaatctttctctggaaaccttataggtttttctttttattacaatataaaagcaatgtgtgtttgccttctctgagtaaactgaaagggttgtctcagtaatttttacatacattttgggtaactggataatggatattttaatgcactttgtacactaacaggttctaaataaaagggtctaaaactcagcttctgagtttttaaaatcacggtctccaggtaccaataaatgctacagtttgccttatgatgttaacataaaacacttagtagaaggacaatatttccatgaaaataatgtttttcaatattaagaagttactactcaaattttcacagtaagccatttagggtatgtttggctatttttataaggacatgagagattatgtcataattttgttgtggaagtctcactcttggctaacttaaaagcattgtggatagtagcagttactagttccaggttgtcatatttacaggaaaatatgtatatggtgaaaggccaccgtgtttaattactataatgatgtagaaaagattcccgtgtgaattttttttttgaaagtctaaaaaatgtatgctgtaaaaatttgctgcagtgtaattttgcattctctttaaactgattgaggtcacagtattttattatttggggtcctcaccacaggaaacactgcgatacaggggcaaaagagatggcagtgccaattaaattaatacaacaaaatcaatgcagcaccaaccaagactgccaggtctggtgtcatgggtatgcccagagcccaggagttcagaagggccctaagcctgatttaatgctctgctgttgatgtcttgaaattcttaacaatttttgaacaaggggcctgcgttttcacttcgcactgggccttgcaaattacatagcgagtgctcataaaagaactcagaaacgtggtacctctcttcctggtggatacaaataaagaaatctggatccaaagttgaaagttgctggcgatatcattcaagtaggactctaaatagtggattaagatgagggtgggcctgggtgaagattctttccagctttaaaagaaagtgacttcaaaaactgactgcaaatattgacgatggtttctgctggaggaaaagaaacagcttgaatacagacaggcttttttattacggtactgatatattgaccttaaacttgctgaggaactgaactaacgtcctccagtgaccgtggaattccatctcagctccaggaacatgcagatacctgcaaagagacacgcatatatgctggcatacatgtgcatttggtgttgggaagttgaccatctggtctatcttaataaaatggtaaaaagcacaccaagacaatgatgggggcaggaggatgtttttgaaaacagcgcttctcaaccagtgctcgattttgccccccaggagacatttggcaatgcaatggcaacttttggttgtcgcagccggggaagggaagctaccagcatctagtgcgtagaggtcatggacgccgttaaacatcctacagtgcaagcgcagcccccgaccacgaagagttgtcttgctcaaatatcaacagtgctgcagtgtagaaacttgatcgttggttttcttttaatgcaaaactctcataaaaacctttcacttttcctgtcattgattatatgcttgatacacccaaaaagaaaaggggaggggcaccaattcacctacactccagtggctccatcacctttaaaaatatttataaaatagttccaaaaatctgatatctgaaaagcaatccaagcctgtgtaaatgggaatcactgataagtatcatcatctgtatcagcttggcttggacatgaaaaattgattctctttatgtcactccttgcacctggacaaattcaatccccggtacttaagtcacactgccaagccctcggccctgactattgtcttgattgctgttcctttctggttcaaaataaaatcatttttgtggcaccaagaccctctgtctctgcctgtctctgttgccttttcatcattttgtgtttttgcagttatgatgttgacaaatatttattcaacatctaccatttattcatactactttatgacatataattcattttcttttactgtctctcatccactatttgcctttccctattcaaaatacaattcttttgcaacactcaaaatattctccagggaatttttaaaacacaataaaagaaagcctatatagaagtg

SEQ ID NO: 154050 - DNA, 6044 bp, Homo sapiens
  Payload ID: 10274
  Gene Symbol: MID1
  Gene Name: midline 1
  Uniprot ID: O15344
  ENST ID: ENST00000380779
  CDS Start-End: 229-2232
gaccgattttcctgttgtgtttcactgttgacgcactcacagacacacaggaccgctccagcactgcctgccacccaccgtctggtctcggtggcctgtctatcatttcgtgggtccccatcctctgcctacggcgatgtttcttcaaaaagaactagtgtgcagtccattgatagctgatcagcttccttgggttttgctgatgacacaagagagctttgcctgaagatggaaacactggagtcagaactgacctgccctatttgtctggagctctttgaggaccctcttctactgccctgcgcacacagcctctgcttcaactgcgcccaccgcatcctagtatcacactgtgccaccaacgagtctgtggagtccatcaccgccttccagtgccccacctgccggcatgtcatcaccctcagccagcgaggtctagacgggctcaagcgcaacgtcaccctacagaacatcatcgacaggttccagaaagcatcagtgagcgggcccaactctcccagcgagacccgtcgggagcgggcctttgacgccaacaccatgacctccgccgagaaggtcctctgccagttttgtgaccaggatcctgcccaggacgctgtgaagacctgtgtcacttgtgaagtatcctactgtgacgagtgcctgaaagccactcacccgaataagaagccctttacaggccatcgtctgattgagccaattccggactctcacatccgggggctgatgtgcttggagcatgaggatgagaaggtgaatatgtactgtgtgaccgatgaccagttaatctgtgccttgtgtaaactggttgggcggcaccgcgatcatcaggtggcagctttgagtgagcgctatgacaaattgaagcaaaacttagagagtaacctcaccaaccttattaagaggaacacagaactggagacccttttggctaaactcatccaaacctgtcaacatgttgaagtcaatgcatcacgtcaagaagccaaattgacagaggagtgtgatcttctcattgagatcattcagcaaagacgacagattattggaaccaagatcaaagaagggaaggtgatgaggcttcgcaaactggctcagcagattgcaaactgcaaacagtgcattgagcggtcagcatcactcatctcccaagcggaacactctctgaaggagaatgatcatgcgcgtttcctacagactgctaagaatatcaccgagagagtctccatggcaactgcatcctcccaggttctaattcctgaaatcaacctcaatgacacatttgacacctttgccttagatttttcccgagagaagaaactgctagaatgtctggattaccttacagctcccaaccctcccacaattagagaagagctctgcacagcttcatatgacaccatcactgtgcattggacctccgatgatgagttcagcgtggtctcctacgagctccagtacaccatattcaccggacaagccaacgtcgttagtctgtgtaattcggctgatagctggatgatagtacccaacatcaagcagaaccactacacggtgcacggtctgcagagcggcaccaagtacatcttcatggtcaaggccatcaaccaggcgggcagccgcagcagtgagcctgggaagttgaagacaaacagccaaccatttaaactggatcccaaatctgctcatcgaaaactgaaggtgtcccatgataacttgacagtagaacgtgatgagtcatcatccaagaagagtcacacacctgaacgcttcaccagccaggggagctatggagtagctggaaatgtgtttattgatagtggccggcattattgggaagtggtcataagtggaagcacatggtatgccattggtcttgcttacaaatcagccccgaagcatgaatggattgggaagaactctgcttcctgggcgctctgccgctgcaacaataactgggtggtgagacacaatagcaaggaaatccccattgagcctgccccccacctccggcgcgtgggcatcctgctggactatgataacggctctatcgccttttatgatgctttgaactccatccacctctacaccttcgacgtcgcatttgcgcagcctgtttgccccaccttcaccgtgtggaacaagtgtctgacgattatcactgggctccctatcccagaccatttggactgcacagagcagctgccgtgagcgtctggccacatggagctgctttctggggaacagtaaggttcaggccactatttaggggactgagaaagcacaggcttcatgagtgtaatgaaatctcaccagaagtgtcccgaaatcggctcagatagggctcaaaacaagagattcctctccttttactgtgtcttgtattaagtacgggctttaataatttctttaatttttttgtatttagaggaaaatctatagattatttataagagaaacataatcaggattacaacttttaggaattacttggttttgcacattaagaggcccataagtttatcagctatttacaaccttcatttcatcacaatctgtgggcttacaaaaaaacaaaaacttttgtagttttgtatgttactcatcttcttacctgatatcccatgatgatcccatggtaggtcttctcacctcgatggtgcataacaggatgtgtttgaacctagtaggggaggaaacaggctttcttactctggtttaatttgaagtgttttaattgtgatgtcaaaaagttgtatcagatcaactaaaatggagagcaagacagagaatgaaaagagttgattttggacctcggaccttgccgtggctaaatctttaccttctcatagctgatgggataatgttggaaagaaaggttctgaatcctttggccacattttgccctgcttctctcagggttaagggttctggaagaacattaagaatgagattgcaattgaaaatagtcattttgaatcctattgattattcaaaaattcaggctgatttgtcttttatcagaggtaggattctgttttatagtatagaatctactttatccttccttttaatagttcctttagacctgtgaaatttcttcactacatttaatagttctcctatttcccgctcccccatatcaattttccttttgtctccggggctgagtaaataaacatgttctgtcacaaatagcagcaccactttggattgattttgctctccaggacatcagcacatggccctgatcagcactaccacatccaaacataagtcactgaaaaacacttaatatttatgagttggtaatgacaagggacattgtataaagtactatttgctagattcatgcctcaaaagttattataaacagacctttattaaacacatcttgaaagatgtagaagtccctctatagtctagtatagtttacaatagagttgtaagaccaaaaaaaaaaaaaaaaaattcaaactcgttattcaggaacctgcttataaaatgtcagctgggattctttgcatgccaatctgatgcgttggaatggtccatgaattaaggctttcttgagcagttcttggcccagaactctggcattggttctagtttgatgaagggcatgacctctataaatggtttcaattgctaaaatatttacctgggatactgggtcagccattttgactgagcagactagtggatttagacattgtttttagttattttgtttttaaccaaatcaaccaactgcctccctgaaataagtcaatgaactcattgtttcagcatcacgtggccaaaggtcatgtgattgcaaatctggatttcaagggaggccaagccagcttcctgggtccttccatcctcttccctagcagacactctcctttttcttaacagatagattctatatatttactatattatttatacccagatgaatattttgatagatacctaagacaatttcacatctaaaagatggacgcctcaatggaaaaaaaacaatctttctctggaaaccttataggtttttctttttattacaatataaaagcaatgtgtgtttgccttctctgagtaaactgaaagggttgtctcagtaatttttacatacattttgggtaactggataatggatattttaatgcactttgtacactaacaggttctaaataaaagggtctaaaactcagcttctgagtttttaaaatcacggtctccaggtaccaataaatgctacagtttgccttatgatgttaacataaaacacttagtagaaggacaatatttccatgaaaataatgtttttcaatattaagaagttactactcaaattttcacagtaagccatttagggtatgtttggctatttttataaggacatgagagattatgtcataattttgttgtggaagtctcactcttggctaacttaaaagcattgtggatagtagcagttactagttccaggttgtcatatttacaggaaaatatgtatatggtgaaaggccaccgtgtttaattactataatgatgtagaaaagattcccgtgtgaattttttttttgaaagtctaaaaaatgtatgctgtaaaaatttgctgcagtgtaattttgcattctctttaaactgattgaggtcacagtattttattatttggggtcctcaccacaggaaacactgcgatacaggggcaaaagagatggcagtgccaattaaattaatacaacaaaatcaatgcagcaccaaccaagactgccaggtctggtgtcatgggtatgcccagagcccaggagttcagaagggccctaagcctgatttaatgctctgctgttgatgtcttgaaattcttaacaatttttgaacaaggggcctgcgttttcacttcgcactgggccttgcaaattacatagcgagtgctcataaaagaactcagaaacgtggtacctctcttcctggtggatacaaataaagaaatctggatccaaagttgaaagttgctggcgatatcattcaagtaggactctaaatagtggattaagatgagggtgggcctgggtgaagattctttccagctttaaaagaaagtgacttcaaaaactgactgcaaatattgacgatggtttctgctggaggaaaagaaacagcttgaatacagacaggcttttttattacggtactgatatattgaccttaaacttgctgaggaactgaactaacgtcctccagtgaccgtggaattccatctcagctccaggaacatgcagatacctgcaaagagacacgcatatatgctggcatacatgtgcatttggtgttgggaagttgaccatctggtctatcttaataaaatggtaaaaagcacaccaagacaatgatgggggcaggaggatgtttttgaaaacagcgcttctcaaccagtgctcgattttgccccccaggagacatttggcaatgcaatggcaacttttggttgtcgcagccggggaagggaagctaccagcatctagtgcgtagaggtcatggacgccgttaaacatcctacagtgcaagcgcagcccccgaccacgaagagttgtcttgctcaaatatcaacagtgctgcagtgtagaaacttgatcgttggttttcttttaatgcaaaactctcataaaaacctttcacttttcctgtcattgattatatgcttgatacacccaaaaagaaaaggggaggggcaccaattcacctacactccagtggctccatcacctttaaaaatatttataaaatagttccaaaaatctgatatctgaaaagcaatccaagcctgtgtaaatgggaatcactgataagtatcatcatctgtatcagcttggcttggacatgaaaaattgattctctttatgtcactccttgcacctggacaaattcaatccccggtacttaagtcacactgccaagccctcggccctgactattgtcttgattgctgttcctttctggttcaaaataaaatcatttttgtggcaccaaga

SEQ ID NO: 154051 - DNA, 6195 bp, Homo sapiens
  Payload ID: 10274
  Gene Symbol: MID1
  Gene Name: midline 1
  Uniprot ID: O15344
  ENST ID: ENST00000380780
  CDS Start-End: 380-2383
ccctttcttctttatctcggtgtctgaggagttttgtctgcggcttgtcttgctacatttcttggttccctgaccaggaagcgaggtgattaacagacggttgaggcagctccttaggtggctttagcctgccctgtggaacatccctgcgggggactccaaccagccggagcgacgcggatcctgagagcgctcccgggtaggcatttgcccaggtgggacgcctcgccagagccgtgtgtggcaggcccccgtggaggatcaacgcagtggctgaacactgggaaggaactggcacttggagtccagacatctaaaacttgatagctgatcagcttccttgggttttgctgatgacacaagagagctttgcctgaagatggaaacactggagtcagaactgacctgccctatttgtctggagctctttgaggaccctcttctactgccctgcgcacacagcctctgcttcaactgcgcccaccgcatcctagtatcacactgtgccaccaacgagtctgtggagtccatcaccgccttccagtgccccacctgccggcatgtcatcaccctcagccagcgaggtctagacgggctcaagcgcaacgtcaccctacagaacatcatcgacaggttccagaaagcatcagtgagcgggcccaactctcccagcgagacccgtcgggagcgggcctttgacgccaacaccatgacctccgccgagaaggtcctctgccagttttgtgaccaggatcctgcccaggacgctgtgaagacctgtgtcacttgtgaagtatcctactgtgacgagtgcctgaaagccactcacccgaataagaagccctttacaggccatcgtctgattgagccaattccggactctcacatccgggggctgatgtgcttggagcatgaggatgagaaggtgaatatgtactgtgtgaccgatgaccagttaatctgtgccttgtgtaaactggttgggcggcaccgcgatcatcaggtggcagctttgagtgagcgctatgacaaattgaagcaaaacttagagagtaacctcaccaaccttattaagaggaacacagaactggagacccttttggctaaactcatccaaacctgtcaacatgttgaagtcaatgcatcacgtcaagaagccaaattgacagaggagtgtgatcttctcattgagatcattcagcaaagacgacagattattggaaccaagatcaaagaagggaaggtgatgaggcttcgcaaactggctcagcagattgcaaactgcaaacagtgcattgagcggtcagcatcactcatctcccaagcggaacactctctgaaggagaatgatcatgcgcgtttcctacagactgctaagaatatcaccgagagagtctccatggcaactgcatcctcccaggttctaattcctgaaatcaacctcaatgacacatttgacacctttgccttagatttttcccgagagaagaaactgctagaatgtctggattaccttacagctcccaaccctcccacaattagagaagagctctgcacagcttcatatgacaccatcactgtgcattggacctccgatgatgagttcagcgtggtctcctacgagctccagtacaccatattcaccggacaagccaacgtcgttagtctgtgtaattcggctgatagctggatgatagtacccaacatcaagcagaaccactacacggtgcacggtctgcagagcggcaccaagtacatcttcatggtcaaggccatcaaccaggcgggcagccgcagcagtgagcctgggaagttgaagacaaacagccaaccatttaaactggatcccaaatctgctcatcgaaaactgaaggtgtcccatgataacttgacagtagaacgtgatgagtcatcatccaagaagagtcacacacctgaacgcttcaccagccaggggagctatggagtagctggaaatgtgtttattgatagtggccggcattattgggaagtggtcataagtggaagcacatggtatgccattggtcttgcttacaaatcagccccgaagcatgaatggattgggaagaactctgcttcctgggcgctctgccgctgcaacaataactgggtggtgagacacaatagcaaggaaatccccattgagcctgccccccacctccggcgcgtgggcatcctgctggactatgataacggctctatcgccttttatgatgctttgaactccatccacctctacaccttcgacgtcgcatttgcgcagcctgtttgccccaccttcaccgtgtggaacaagtgtctgacgattatcactgggctccctatcccagaccatttggactgcacagagcagctgccgtgagcgtctggccacatggagctgctttctggggaacagtaaggttcaggccactatttaggggactgagaaagcacaggcttcatgagtgtaatgaaatctcaccagaagtgtcccgaaatcggctcagatagggctcaaaacaagagattcctctccttttactgtgtcttgtattaagtacgggctttaataatttctttaatttttttgtatttagaggaaaatctatagattatttataagagaaacataatcaggattacaacttttaggaattacttggttttgcacattaagaggcccataagtttatcagctatttacaaccttcatttcatcacaatctgtgggcttacaaaaaaacaaaaacttttgtagttttgtatgttactcatcttcttacctgatatcccatgatgatcccatggtaggtcttctcacctcgatggtgcataacaggatgtgtttgaacctagtaggggaggaaacaggctttcttactctggtttaatttgaagtgttttaattgtgatgtcaaaaagttgtatcagatcaactaaaatggagagcaagacagagaatgaaaagagttgattttggacctcggaccttgccgtggctaaatctttaccttctcatagctgatgggataatgttggaaagaaaggttctgaatcctttggccacattttgccctgcttctctcagggttaagggttctggaagaacattaagaatgagattgcaattgaaaatagtcattttgaatcctattgattattcaaaaattcaggctgatttgtcttttatcagaggtaggattctgttttatagtatagaatctactttatccttccttttaatagttcctttagacctgtgaaatttcttcactacatttaatagttctcctatttcccgctcccccatatcaattttccttttgtctccggggctgagtaaataaacatgttctgtcacaaatagcagcaccactttggattgattttgctctccaggacatcagcacatggccctgatcagcactaccacatccaaacataagtcactgaaaaacacttaatatttatgagttggtaatgacaagggacattgtataaagtactatttgctagattcatgcctcaaaagttattataaacagacctttattaaacacatcttgaaagatgtagaagtccctctatagtctagtatagtttacaatagagttgtaagaccaaaaaaaaaaaaaaaaaattcaaactcgttattcaggaacctgcttataaaatgtcagctgggattctttgcatgccaatctgatgcgttggaatggtccatgaattaaggctttcttgagcagttcttggcccagaactctggcattggttctagtttgatgaagggcatgacctctataaatggtttcaattgctaaaatatttacctgggatactgggtcagccattttgactgagcagactagtggatttagacattgtttttagttattttgtttttaaccaaatcaaccaactgcctccctgaaataagtcaatgaactcattgtttcagcatcacgtggccaaaggtcatgtgattgcaaatctggatttcaagggaggccaagccagcttcctgggtccttccatcctcttccctagcagacactctcctttttcttaacagatagattctatatatttactatattatttatacccagatgaatattttgatagatacctaagacaatttcacatctaaaagatggacgcctcaatggaaaaaaaacaatctttctctggaaaccttataggtttttctttttattacaatataaaagcaatgtgtgtttgccttctctgagtaaactgaaagggttgtctcagtaatttttacatacattttgggtaactggataatggatattttaatgcactttgtacactaacaggttctaaataaaagggtctaaaactcagcttctgagtttttaaaatcacggtctccaggtaccaataaatgctacagtttgccttatgatgttaacataaaacacttagtagaaggacaatatttccatgaaaataatgtttttcaatattaagaagttactactcaaattttcacagtaagccatttagggtatgtttggctatttttataaggacatgagagattatgtcataattttgttgtggaagtctcactcttggctaacttaaaagcattgtggatagtagcagttactagttccaggttgtcatatttacaggaaaatatgtatatggtgaaaggccaccgtgtttaattactataatgatgtagaaaagattcccgtgtgaattttttttttgaaagtctaaaaaatgtatgctgtaaaaatttgctgcagtgtaattttgcattctctttaaactgattgaggtcacagtattttattatttggggtcctcaccacaggaaacactgcgatacaggggcaaaagagatggcagtgccaattaaattaatacaacaaaatcaatgcagcaccaaccaagactgccaggtctggtgtcatgggtatgcccagagcccaggagttcagaagggccctaagcctgatttaatgctctgctgttgatgtcttgaaattcttaacaatttttgaacaaggggcctgcgttttcacttcgcactgggccttgcaaattacatagcgagtgctcataaaagaactcagaaacgtggtacctctcttcctggtggatacaaataaagaaatctggatccaaagttgaaagttgctggcgatatcattcaagtaggactctaaatagtggattaagatgagggtgggcctgggtgaagattctttccagctttaaaagaaagtgacttcaaaaactgactgcaaatattgacgatggtttctgctggaggaaaagaaacagcttgaatacagacaggcttttttattacggtactgatatattgaccttaaacttgctgaggaactgaactaacgtcctccagtgaccgtggaattccatctcagctccaggaacatgcagatacctgcaaagagacacgcatatatgctggcatacatgtgcatttggtgttgggaagttgaccatctggtctatcttaataaaatggtaaaaagcacaccaagacaatgatgggggcaggaggatgtttttgaaaacagcgcttctcaaccagtgctcgattttgccccccaggagacatttggcaatgcaatggcaacttttggttgtcgcagccggggaagggaagctaccagcatctagtgcgtagaggtcatggacgccgttaaacatcctacagtgcaagcgcagcccccgaccacgaagagttgtcttgctcaaatatcaacagtgctgcagtgtagaaacttgatcgttggttttcttttaatgcaaaactctcataaaaacctttcacttttcctgtcattgattatatgcttgatacacccaaaaagaaaaggggaggggcaccaattcacctacactccagtggctccatcacctttaaaaatatttataaaatagttccaaaaatctgatatctgaaaagcaatccaagcctgtgtaaatgggaatcactgataagtatcatcatctgtatcagcttggcttggacatgaaaaattgattctctttatgtcactccttgcacctggacaaattcaatccccggtacttaagtcacactgccaagccctcggccctgactattgtcttgattgctgttcctttctggttcaaaataaaatcatttttgtggcaccaaga

SEQ ID NO: 154052 - DNA, 3352 bp, Homo sapiens
  Payload ID: 10274
  Gene Symbol: MID1
  Gene Name: midline 1
  Uniprot ID: O15344
  ENST ID: ENST00000380782
  CDS Start-End: 187-1845
atttcgccgggttgcttttgtcttgcgggctcctgtcgggttcggtgtttccgctctgaagactgcgacgcgggctccgatgcagctcgctccctgccggatgggtcatgggattctaaacatgaggcagatagctgatcagcttccttgggttttgctgatgacacaagagagctttgcctgaagatggaaacactggagtcagaactgacctgccctatttgtctggagctctttgaggaccctcttctactgccctgcgcacacagcctctgcttcaactgcgcccaccgcatcctagtatcacactgtgccaccaacgagtctgtggagtccatcaccgccttccagtgccccacctgccggcatgtcatcaccctcagccagcgaggtctagacgggctcaagcgcaacgtcaccctacagaacatcatcgacaggttccagaaagcatcagtgagcgggcccaactctcccagcgagacccgtcgggagcgggcctttgacgccaacaccatgacctccgccgagaaggtcctctgccagttttgtgaccaggatcctgcccaggacgctgtgaagacctgtgtcacttgtgaagtatcctactgtgacgagtgcctgaaagccactcacccgaataagaagccctttacaggccatcgtctgattgagccaattccggactctcacatccgggggctgatgtgcttggagcatgaggatgagaaggtgaatatgtactgtgtgaccgatgaccagttaatctgtgccttgtgtaaactggttgggcggcaccgcgatcatcaggtggcagctttgagtgagcgctatgacaaattgaagcaaaacttagagagtaacctcaccaaccttattaagaggaacacagaactggagacccttttggctaaactcatccaaacctgtcaacatgttgaagtcaatgcatcacgtcaagaagccaaattgacagaggagtgtgatcttctcattgagatcattcagcaaagacgacagattattggaaccaagatcaaagaagggaaggtgatgaggcttcgcaaactggctcagcagattgcaaactgcaaacagtgcattgagcggtcagcatcactcatctcccaagcggaacactctctgaaggagaatgatcatgcgcgtttcctacagactgctaagaatatcaccgagagagtctccatggcaactgcatcctcccaggttctaattcctgaaatcaacctcaatgacacatttgacacctttgccttagatttttcccgagagaagaaactgctagaatgtctggattaccttacagctcccaaccctcccacaattagagaagagctctgcacagcttcatatgacaccatcactgtgcattggacctccgatgatgagttcagcgtggtctcctacgagctccagtacaccatattcaccggacaagccaacgtcgttagtctgtgtaattcggctgatagctggatgatagtacccaacatcaagcagaaccactacacggtgcacggtctgcagagcggcaccaagtacatcttcatggtcaaggccatcaaccaggcgggcagccgcagcagtgagcctgggaagttgaagacaaacagccaaccatttaaactggatcccaaatctgctcatcgaaaactgaaggtgtcccatgataacttgacagtagaacgtgatgagtcatcatccaagaagagtcacacacctgaacgcttcaccagccaggggagctatggagtagctggaaatgtgtttattgatagtggccggcattattgggaagtggtcataagtggaagcacatggtgagacacaatagcaaggaaatccccattgagcctgccccccacctccggcgcgtgggcatcctgctggactatgataacggctctatcgccttttatgatgctttgaactccatccacctctacaccttcgacgtcgcatttgcgcagcctgtttgccccaccttcaccgtgtggaacaagtgtctgacgattatcactgggctccctatcccagaccatttggactgcacagagcagctgccgtgagcgtctggccacatggagctgctttctggggaacagtaaggttcaggccactatttaggggactgagaaagcacaggcttcatgagtgtaatgaaatctcaccagaagtgtcccgaaatcggctcagatagggctcaaaacaagagattcctctccttttactgtgtcttgtattaagtacgggctttaataatttctttaatttttttgtatttagaggaaaatctatagattatttataagagaaacataatcaggattacaacttttaggaattacttggttttgcacattaagaggcccataagtttatcagctatttacaaccttcatttcatcacaatctgtgggcttacaaaaaaacaaaaacttttgtagttttgtatgttactcatcttcttacctgatatcccatgatgatcccatggtaggtcttctcacctcgatggtgcataacaggatgtgtttgaacctagtaggggaggaaacaggctttcttactctggtttaatttgaagtgttttaattgtgatgtcaaaaagttgtatcagatcaactaaaatggagagcaagacagagaatgaaaagagttgattttggacctcggaccttgccgtggctaaatctttaccttctcatagctgatgggataatgttggaaagaaaggttctgaatcctttggccacattttgccctgcttctctcagggttaagggttctggaagaacattaagaatgagattgcaattgaaaatagtcattttgaatcctattgattattcaaaaattcaggctgatttgtcttttatcagaggtaggattctgttttatagtatagaatctactttatccttccttttaatagttcctttagacctgtgaaatttcttcactacatttaatagttctcctatttcccgctcccccatatcaattttccttttgtctccggggctgagtaaataaacatgttctgtcacaaatagcagcaccactttggattgattttgctctccaggacatcagcacatggccctgatcagcactaccacatccaaacataagtcactgaaaaacacttaatatttatgagttggtaatgacaagggacattgtataaagtactatttgctagattcatgcctcaaaagttattataaacagacctttattaaacacatcttgaaagatgtagaagtccctctatagtctagtatagtttacaatagagttgtaagaccaaaaaaaaaaaaaaaaaatt

SEQ ID NO: 154053 - DNA, 6092 bp, Homo sapiens
  Payload ID: 10274
  Gene Symbol: MID1
  Gene Name: midline 1
  Uniprot ID: O15344
  ENST ID: ENST00000380785
  CDS Start-End: 277-2280
cccagcctgcttgaaggacctacaggtttgtctcttccagatcagaactgaggaacaaaaacccccatcctgggaaaaatggggaagctgatttcgccgggttgcttttgtcttgcgggctcctgtcgggttcggtgtttccgctctgaagactgcgacgcgggctccgatgcagctcgctccctgccggatgggtcatgggattctaaacatgaggcagatagctgatcagcttccttgggttttgctgatgacacaagagagctttgcctgaagatggaaacactggagtcagaactgacctgccctatttgtctggagctctttgaggaccctcttctactgccctgcgcacacagcctctgcttcaactgcgcccaccgcatcctagtatcacactgtgccaccaacgagtctgtggagtccatcaccgccttccagtgccccacctgccggcatgtcatcaccctcagccagcgaggtctagacgggctcaagcgcaacgtcaccctacagaacatcatcgacaggttccagaaagcatcagtgagcgggcccaactctcccagcgagacccgtcgggagcgggcctttgacgccaacaccatgacctccgccgagaaggtcctctgccagttttgtgaccaggatcctgcccaggacgctgtgaagacctgtgtcacttgtgaagtatcctactgtgacgagtgcctgaaagccactcacccgaataagaagccctttacaggccatcgtctgattgagccaattccggactctcacatccgggggctgatgtgcttggagcatgaggatgagaaggtgaatatgtactgtgtgaccgatgaccagttaatctgtgccttgtgtaaactggttgggcggcaccgcgatcatcaggtggcagctttgagtgagcgctatgacaaattgaagcaaaacttagagagtaacctcaccaaccttattaagaggaacacagaactggagacccttttggctaaactcatccaaacctgtcaacatgttgaagtcaatgcatcacgtcaagaagccaaattgacagaggagtgtgatcttctcattgagatcattcagcaaagacgacagattattggaaccaagatcaaagaagggaaggtgatgaggcttcgcaaactggctcagcagattgcaaactgcaaacagtgcattgagcggtcagcatcactcatctcccaagcggaacactctctgaaggagaatgatcatgcgcgtttcctacagactgctaagaatatcaccgagagagtctccatggcaactgcatcctcccaggttctaattcctgaaatcaacctcaatgacacatttgacacctttgccttagatttttcccgagagaagaaactgctagaatgtctggattaccttacagctcccaaccctcccacaattagagaagagctctgcacagcttcatatgacaccatcactgtgcattggacctccgatgatgagttcagcgtggtctcctacgagctccagtacaccatattcaccggacaagccaacgtcgttagtctgtgtaattcggctgatagctggatgatagtacccaacatcaagcagaaccactacacggtgcacggtctgcagagcggcaccaagtacatcttcatggtcaaggccatcaaccaggcgggcagccgcagcagtgagcctgggaagttgaagacaaacagccaaccatttaaactggatcccaaatctgctcatcgaaaactgaaggtgtcccatgataacttgacagtagaacgtgatgagtcatcatccaagaagagtcacacacctgaacgcttcaccagccaggggagctatggagtagctggaaatgtgtttattgatagtggccggcattattgggaagtggtcataagtggaagcacatggtatgccattggtcttgcttacaaatcagccccgaagcatgaatggattgggaagaactctgcttcctgggcgctctgccgctgcaacaataactgggtggtgagacacaatagcaaggaaatccccattgagcctgccccccacctccggcgcgtgggcatcctgctggactatgataacggctctatcgccttttatgatgctttgaactccatccacctctacaccttcgacgtcgcatttgcgcagcctgtttgccccaccttcaccgtgtggaacaagtgtctgacgattatcactgggctccctatcccagaccatttggactgcacagagcagctgccgtgagcgtctggccacatggagctgctttctggggaacagtaaggttcaggccactatttaggggactgagaaagcacaggcttcatgagtgtaatgaaatctcaccagaagtgtcccgaaatcggctcagatagggctcaaaacaagagattcctctccttttactgtgtcttgtattaagtacgggctttaataatttctttaatttttttgtatttagaggaaaatctatagattatttataagagaaacataatcaggattacaacttttaggaattacttggttttgcacattaagaggcccataagtttatcagctatttacaaccttcatttcatcacaatctgtgggcttacaaaaaaacaaaaacttttgtagttttgtatgttactcatcttcttacctgatatcccatgatgatcccatggtaggtcttctcacctcgatggtgcataacaggatgtgtttgaacctagtaggggaggaaacaggctttcttactctggtttaatttgaagtgttttaattgtgatgtcaaaaagttgtatcagatcaactaaaatggagagcaagacagagaatgaaaagagttgattttggacctcggaccttgccgtggctaaatctttaccttctcatagctgatgggataatgttggaaagaaaggttctgaatcctttggccacattttgccctgcttctctcagggttaagggttctggaagaacattaagaatgagattgcaattgaaaatagtcattttgaatcctattgattattcaaaaattcaggctgatttgtcttttatcagaggtaggattctgttttatagtatagaatctactttatccttccttttaatagttcctttagacctgtgaaatttcttcactacatttaatagttctcctatttcccgctcccccatatcaattttccttttgtctccggggctgagtaaataaacatgttctgtcacaaatagcagcaccactttggattgattttgctctccaggacatcagcacatggccctgatcagcactaccacatccaaacataagtcactgaaaaacacttaatatttatgagttggtaatgacaagggacattgtataaagtactatttgctagattcatgcctcaaaagttattataaacagacctttattaaacacatcttgaaagatgtagaagtccctctatagtctagtatagtttacaatagagttgtaagaccaaaaaaaaaaaaaaaaaattcaaactcgttattcaggaacctgcttataaaatgtcagctgggattctttgcatgccaatctgatgcgttggaatggtccatgaattaaggctttcttgagcagttcttggcccagaactctggcattggttctagtttgatgaagggcatgacctctataaatggtttcaattgctaaaatatttacctgggatactgggtcagccattttgactgagcagactagtggatttagacattgtttttagttattttgtttttaaccaaatcaaccaactgcctccctgaaataagtcaatgaactcattgtttcagcatcacgtggccaaaggtcatgtgattgcaaatctggatttcaagggaggccaagccagcttcctgggtccttccatcctcttccctagcagacactctcctttttcttaacagatagattctatatatttactatattatttatacccagatgaatattttgatagatacctaagacaatttcacatctaaaagatggacgcctcaatggaaaaaaaacaatctttctctggaaaccttataggtttttctttttattacaatataaaagcaatgtgtgtttgccttctctgagtaaactgaaagggttgtctcagtaatttttacatacattttgggtaactggataatggatattttaatgcactttgtacactaacaggttctaaataaaagggtctaaaactcagcttctgagtttttaaaatcacggtctccaggtaccaataaatgctacagtttgccttatgatgttaacataaaacacttagtagaaggacaatatttccatgaaaataatgtttttcaatattaagaagttactactcaaattttcacagtaagccatttagggtatgtttggctatttttataaggacatgagagattatgtcataattttgttgtggaagtctcactcttggctaacttaaaagcattgtggatagtagcagttactagttccaggttgtcatatttacaggaaaatatgtatatggtgaaaggccaccgtgtttaattactataatgatgtagaaaagattcccgtgtgaattttttttttgaaagtctaaaaaatgtatgctgtaaaaatttgctgcagtgtaattttgcattctctttaaactgattgaggtcacagtattttattatttggggtcctcaccacaggaaacactgcgatacaggggcaaaagagatggcagtgccaattaaattaatacaacaaaatcaatgcagcaccaaccaagactgccaggtctggtgtcatgggtatgcccagagcccaggagttcagaagggccctaagcctgatttaatgctctgctgttgatgtcttgaaattcttaacaatttttgaacaaggggcctgcgttttcacttcgcactgggccttgcaaattacatagcgagtgctcataaaagaactcagaaacgtggtacctctcttcctggtggatacaaataaagaaatctggatccaaagttgaaagttgctggcgatatcattcaagtaggactctaaatagtggattaagatgagggtgggcctgggtgaagattctttccagctttaaaagaaagtgacttcaaaaactgactgcaaatattgacgatggtttctgctggaggaaaagaaacagcttgaatacagacaggcttttttattacggtactgatatattgaccttaaacttgctgaggaactgaactaacgtcctccagtgaccgtggaattccatctcagctccaggaacatgcagatacctgcaaagagacacgcatatatgctggcatacatgtgcatttggtgttgggaagttgaccatctggtctatcttaataaaatggtaaaaagcacaccaagacaatgatgggggcaggaggatgtttttgaaaacagcgcttctcaaccagtgctcgattttgccccccaggagacatttggcaatgcaatggcaacttttggttgtcgcagccggggaagggaagctaccagcatctagtgcgtagaggtcatggacgccgttaaacatcctacagtgcaagcgcagcccccgaccacgaagagttgtcttgctcaaatatcaacagtgctgcagtgtagaaacttgatcgttggttttcttttaatgcaaaactctcataaaaacctttcacttttcctgtcattgattatatgcttgatacacccaaaaagaaaaggggaggggcaccaattcacctacactccagtggctccatcacctttaaaaatatttataaaatagttccaaaaatctgatatctgaaaagcaatccaagcctgtgtaaatgggaatcactgataagtatcatcatctgtatcagcttggcttggacatgaaaaattgattctctttatgtcactccttgcacctggacaaattcaatccccggtacttaagtcacactgccaagccctcggccctgactattgtcttgattgctgttcctttctggttcaaaataaaatcatttttgtggcaccaaga

SEQ ID NO: 154054 - DNA, 5973 bp, Homo sapiens
  Payload ID: 10274
  Gene Symbol: MID1
  Gene Name: midline 1
  Uniprot ID: O15344
  ENST ID: ENST00000380787
  CDS Start-End: 158-2161
acttgccccagcccagcctgcttgaaggacctacaggtttgtctcttccagatcagaactgaggaacaaaaacccccatcctgggaaaaatggggaagctgatagctgatcagcttccttgggttttgctgatgacacaagagagctttgcctgaagatggaaacactggagtcagaactgacctgccctatttgtctggagctctttgaggaccctcttctactgccctgcgcacacagcctctgcttcaactgcgcccaccgcatcctagtatcacactgtgccaccaacgagtctgtggagtccatcaccgccttccagtgccccacctgccggcatgtcatcaccctcagccagcgaggtctagacgggctcaagcgcaacgtcaccctacagaacatcatcgacaggttccagaaagcatcagtgagcgggcccaactctcccagcgagacccgtcgggagcgggcctttgacgccaacaccatgacctccgccgagaaggtcctctgccagttttgtgaccaggatcctgcccaggacgctgtgaagacctgtgtcacttgtgaagtatcctactgtgacgagtgcctgaaagccactcacccgaataagaagccctttacaggccatcgtctgattgagccaattccggactctcacatccgggggctgatgtgcttggagcatgaggatgagaaggtgaatatgtactgtgtgaccgatgaccagttaatctgtgccttgtgtaaactggttgggcggcaccgcgatcatcaggtggcagctttgagtgagcgctatgacaaattgaagcaaaacttagagagtaacctcaccaaccttattaagaggaacacagaactggagacccttttggctaaactcatccaaacctgtcaacatgttgaagtcaatgcatcacgtcaagaagccaaattgacagaggagtgtgatcttctcattgagatcattcagcaaagacgacagattattggaaccaagatcaaagaagggaaggtgatgaggcttcgcaaactggctcagcagattgcaaactgcaaacagtgcattgagcggtcagcatcactcatctcccaagcggaacactctctgaaggagaatgatcatgcgcgtttcctacagactgctaagaatatcaccgagagagtctccatggcaactgcatcctcccaggttctaattcctgaaatcaacctcaatgacacatttgacacctttgccttagatttttcccgagagaagaaactgctagaatgtctggattaccttacagctcccaaccctcccacaattagagaagagctctgcacagcttcatatgacaccatcactgtgcattggacctccgatgatgagttcagcgtggtctcctacgagctccagtacaccatattcaccggacaagccaacgtcgttagtctgtgtaattcggctgatagctggatgatagtacccaacatcaagcagaaccactacacggtgcacggtctgcagagcggcaccaagtacatcttcatggtcaaggccatcaaccaggcgggcagccgcagcagtgagcctgggaagttgaagacaaacagccaaccatttaaactggatcccaaatctgctcatcgaaaactgaaggtgtcccatgataacttgacagtagaacgtgatgagtcatcatccaagaagagtcacacacctgaacgcttcaccagccaggggagctatggagtagctggaaatgtgtttattgatagtggccggcattattgggaagtggtcataagtggaagcacatggtatgccattggtcttgcttacaaatcagccccgaagcatgaatggattgggaagaactctgcttcctgggcgctctgccgctgcaacaataactgggtggtgagacacaatagcaaggaaatccccattgagcctgccccccacctccggcgcgtgggcatcctgctggactatgataacggctctatcgccttttatgatgctttgaactccatccacctctacaccttcgacgtcgcatttgcgcagcctgtttgccccaccttcaccgtgtggaacaagtgtctgacgattatcactgggctccctatcccagaccatttggactgcacagagcagctgccgtgagcgtctggccacatggagctgctttctggggaacagtaaggttcaggccactatttaggggactgagaaagcacaggcttcatgagtgtaatgaaatctcaccagaagtgtcccgaaatcggctcagatagggctcaaaacaagagattcctctccttttactgtgtcttgtattaagtacgggctttaataatttctttaatttttttgtatttagaggaaaatctatagattatttataagagaaacataatcaggattacaacttttaggaattacttggttttgcacattaagaggcccataagtttatcagctatttacaaccttcatttcatcacaatctgtgggcttacaaaaaaacaaaaacttttgtagttttgtatgttactcatcttcttacctgatatcccatgatgatcccatggtaggtcttctcacctcgatggtgcataacaggatgtgtttgaacctagtaggggaggaaacaggctttcttactctggtttaatttgaagtgttttaattgtgatgtcaaaaagttgtatcagatcaactaaaatggagagcaagacagagaatgaaaagagttgattttggacctcggaccttgccgtggctaaatctttaccttctcatagctgatgggataatgttggaaagaaaggttctgaatcctttggccacattttgccctgcttctctcagggttaagggttctggaagaacattaagaatgagattgcaattgaaaatagtcattttgaatcctattgattattcaaaaattcaggctgatttgtcttttatcagaggtaggattctgttttatagtatagaatctactttatccttccttttaatagttcctttagacctgtgaaatttcttcactacatttaatagttctcctatttcccgctcccccatatcaattttccttttgtctccggggctgagtaaataaacatgttctgtcacaaatagcagcaccactttggattgattttgctctccaggacatcagcacatggccctgatcagcactaccacatccaaacataagtcactgaaaaacacttaatatttatgagttggtaatgacaagggacattgtataaagtactatttgctagattcatgcctcaaaagttattataaacagacctttattaaacacatcttgaaagatgtagaagtccctctatagtctagtatagtttacaatagagttgtaagaccaaaaaaaaaaaaaaaaaattcaaactcgttattcaggaacctgcttataaaatgtcagctgggattctttgcatgccaatctgatgcgttggaatggtccatgaattaaggctttcttgagcagttcttggcccagaactctggcattggttctagtttgatgaagggcatgacctctataaatggtttcaattgctaaaatatttacctgggatactgggtcagccattttgactgagcagactagtggatttagacattgtttttagttattttgtttttaaccaaatcaaccaactgcctccctgaaataagtcaatgaactcattgtttcagcatcacgtggccaaaggtcatgtgattgcaaatctggatttcaagggaggccaagccagcttcctgggtccttccatcctcttccctagcagacactctcctttttcttaacagatagattctatatatttactatattatttatacccagatgaatattttgatagatacctaagacaatttcacatctaaaagatggacgcctcaatggaaaaaaaacaatctttctctggaaaccttataggtttttctttttattacaatataaaagcaatgtgtgtttgccttctctgagtaaactgaaagggttgtctcagtaatttttacatacattttgggtaactggataatggatattttaatgcactttgtacactaacaggttctaaataaaagggtctaaaactcagcttctgagtttttaaaatcacggtctccaggtaccaataaatgctacagtttgccttatgatgttaacataaaacacttagtagaaggacaatatttccatgaaaataatgtttttcaatattaagaagttactactcaaattttcacagtaagccatttagggtatgtttggctatttttataaggacatgagagattatgtcataattttgttgtggaagtctcactcttggctaacttaaaagcattgtggatagtagcagttactagttccaggttgtcatatttacaggaaaatatgtatatggtgaaaggccaccgtgtttaattactataatgatgtagaaaagattcccgtgtgaattttttttttgaaagtctaaaaaatgtatgctgtaaaaatttgctgcagtgtaattttgcattctctttaaactgattgaggtcacagtattttattatttggggtcctcaccacaggaaacactgcgatacaggggcaaaagagatggcagtgccaattaaattaatacaacaaaatcaatgcagcaccaaccaagactgccaggtctggtgtcatgggtatgcccagagcccaggagttcagaagggccctaagcctgatttaatgctctgctgttgatgtcttgaaattcttaacaatttttgaacaaggggcctgcgttttcacttcgcactgggccttgcaaattacatagcgagtgctcataaaagaactcagaaacgtggtacctctcttcctggtggatacaaataaagaaatctggatccaaagttgaaagttgctggcgatatcattcaagtaggactctaaatagtggattaagatgagggtgggcctgggtgaagattctttccagctttaaaagaaagtgacttcaaaaactgactgcaaatattgacgatggtttctgctggaggaaaagaaacagcttgaatacagacaggcttttttattacggtactgatatattgaccttaaacttgctgaggaactgaactaacgtcctccagtgaccgtggaattccatctcagctccaggaacatgcagatacctgcaaagagacacgcatatatgctggcatacatgtgcatttggtgttgggaagttgaccatctggtctatcttaataaaatggtaaaaagcacaccaagacaatgatgggggcaggaggatgtttttgaaaacagcgcttctcaaccagtgctcgattttgccccccaggagacatttggcaatgcaatggcaacttttggttgtcgcagccggggaagggaagctaccagcatctagtgcgtagaggtcatggacgccgttaaacatcctacagtgcaagcgcagcccccgaccacgaagagttgtcttgctcaaatatcaacagtgctgcagtgtagaaacttgatcgttggttttcttttaatgcaaaactctcataaaaacctttcacttttcctgtcattgattatatgcttgatacacccaaaaagaaaaggggaggggcaccaattcacctacactccagtggctccatcacctttaaaaatatttataaaatagttccaaaaatctgatatctgaaaagcaatccaagcctgtgtaaatgggaatcactgataagtatcatcatctgtatcagcttggcttggacatgaaaaattgattctctttatgtcactccttgcacctggacaaattcaatccccggtacttaagtcacactgccaagccctcggccctgactattgtcttgattgctgttcctttctggttcaaaataaaatcatttttgtggcaccaaga

SEQ ID NO: 154055 - DNA, 945 bp, Homo sapiens
  Payload ID: 10274
  Gene Symbol: MID1
  Gene Name: midline 1
  ENST ID: ENST00000423614
  CDS Start-End: 353-945
gagaactgatttgaaataagagccaggcggtcctcgcttccctgcgaccgacttttcataggctgggggagaaaaggttgagaaacttgacattgtctcgagcagagtgcgtgtagcaacagatcaaagaaaaagaggacgaaaacgtgctctttgctgcccgtagatttcgccgggttgcttttgtcttgcgggctcctgtcgggttcggtgtttccgctctgaagactgcgacgcgggctccgatgcagctcgctccctgccggatgggtcatgggattctaaacatgaggcagatagctgatcagcttccttgggttttgctgatgacacaagagagctttgcctgaagatggaaacactggagtcagaactgacctgccctatttgtctggagctctttgaggaccctcttctactgccctgcgcacacagcctctgcttcaactgcgcccaccgcatcctagtatcacactgtgccaccaacgagtctgtggagtccatcaccgccttccagtgccccacctgccggcatgtcatcaccctcagccagcgaggtctagacgggctcaagcgcaacgtcaccctacagaacatcatcgacaggttccagaaagcatcagtgagcgggcccaactctcccagcgagacccgtcgggagcgggcctttgacgccaacaccatgacctccgccgagaaggtcctctgccagttttgtgaccaggatcctgcccaggacgctgtgaagacctgtgtcacttgtgaagtatcctactgtgacgagtgcctgaaagccactcacccgaataagaagccctttacaggccatcgtctgattgagccaattccggactctcacatccgggggctgatgtgcttggagcatgaggatgagaaggtgaatatgtactgtgtgaccgatgaccagttaatctgtgccttgtg

SEQ ID NO: 154056 - DNA, 1729 bp, Homo sapiens
  Payload ID: 10274
  Gene Symbol: MID1
  Gene Name: midline 1
  ENST ID: ENST00000413894
  CDS Start-End: 280-1729
ctgaagtgttagtatgtagtggagctggtggtgtgaagctgattcattttgtttcaaagccccaaatggcatgctgccgaacacaggcacaagcacagcagcgtctccttagaaataatgactccaaggcaaacagccctcattgcaaaatgtagaagactgccatctgcttgtctccactgtggtttattcgtttcagggttttaaatgacgtaataaaaagatagctgatcagcttccttgggttttgctgatgacacaagagagctttgcctgaagatggaaacactggagtcagaactgacctgccctatttgtctggagctctttgaggaccctcttctactgccctgcgcacacagcctctgcttcaactgcgcccaccgcatcctagtatcacactgtgccaccaacgagtctgtggagtccatcaccgccttccagtgccccacctgccggcatgtcatcaccctcagccagcgaggtctagacgggctcaagcgcaacgtcaccctacagaacatcatcgacaggttccagaaagcatcagtgagcgggcccaactctcccagcgagacccgtcgggagcgggcctttgacgccaacaccatgacctccgccgagaaggtcctctgccagttttgtgaccaggatcctgcccaggacgctgtgaagacctgtgtcacttgtgaagtatcctactgtgacgagtgcctgaaagccactcacccgaataagaagccctttacaggccatcgtctgattgagccaattccggactctcacatccgggggctgatgtgcttggagcatgaggatgagaaggtgaatatgtactgtgtgaccgatgaccagttaatctgtgccttgtgtaaactggttgggcggcaccgcgatcatcaggtggcagctttgagtgagcgctatgacaaattgaagcaaaacttagagagtaacctcaccaaccttattaagaggaacacagaactggagacccttttggctaaactcatccaaacctgtcaacatgttgaagtcaatgcatcacgtcaagaagccaaattgacagaggagtgtgatcttctcattgagatcattcagcaaagacgacagattattggaaccaagatcaaagaagggaaggtgatgaggcttcgcaaactggctcagcagattgcaaactgcaaacagtgcattgagcggtcagcatcactcatctcccaagcggaacactctctgaaggagaatgatcatgcgcgtttcctacagactgctaagaatatcaccgagagagtctccatggcaactgcatcctcccaggttctaattcctgaaatcaacctcaatgacacatttgacacctttgccttagatttttcccgagagaagaaactgctagaatgtctggattaccttacagctcccaaccctcccacaattagagaagagctctgcacagcttcatatgacaccatcactgtgcattggacctccgatgatgagttcagcgtggtctcctacgagctccagtacaccatattcaccggacaagccaacgtcgttagtctgtgtaattcggctgatagctggatgatagtacccaacatcaagcagaaccactacacggtgcacggtctgcagagcggcaccaagtacatcttcatggtcaaggccatcaaccaggcgggcagccgcagcagtgagcctgggaagttgaagacaaacagcc

SEQ ID NO: 154057 - DNA, 6393 bp, Homo sapiens
  Payload ID: 10274
  Gene Symbol: MID1
  Gene Name: midline 1
  Uniprot ID: O15344
  ENST ID: ENST00000453318
  CDS Start-End: 332-2335
gattctatgcagggtcactatgaaagaggcagcctgccccagtttgggtattctgaagtgttagtatgtagtggagctggtggtgtgaagctgattcattttgtttcaaagccccaaatggcatgctgccgaacacaggcacaagcacagcagcgtctccttagaaataatgactccaaggcaaacagccctcattgcaaaatgtagaagactgccatctgcttgtctccactgtggtttattcgtttcagggttttaaatgacgtaataaaaagatagctgatcagcttccttgggttttgctgatgacacaagagagctttgcctgaagatggaaacactggagtcagaactgacctgccctatttgtctggagctctttgaggaccctcttctactgccctgcgcacacagcctctgcttcaactgcgcccaccgcatcctagtatcacactgtgccaccaacgagtctgtggagtccatcaccgccttccagtgccccacctgccggcatgtcatcaccctcagccagcgaggtctagacgggctcaagcgcaacgtcaccctacagaacatcatcgacaggttccagaaagcatcagtgagcgggcccaactctcccagcgagacccgtcgggagcgggcctttgacgccaacaccatgacctccgccgagaaggtcctctgccagttttgtgaccaggatcctgcccaggacgctgtgaagacctgtgtcacttgtgaagtatcctactgtgacgagtgcctgaaagccactcacccgaataagaagccctttacaggccatcgtctgattgagccaattccggactctcacatccgggggctgatgtgcttggagcatgaggatgagaaggtgaatatgtactgtgtgaccgatgaccagttaatctgtgccttgtgtaaactggttgggcggcaccgcgatcatcaggtggcagctttgagtgagcgctatgacaaattgaagcaaaacttagagagtaacctcaccaaccttattaagaggaacacagaactggagacccttttggctaaactcatccaaacctgtcaacatgttgaagtcaatgcatcacgtcaagaagccaaattgacagaggagtgtgatcttctcattgagatcattcagcaaagacgacagattattggaaccaagatcaaagaagggaaggtgatgaggcttcgcaaactggctcagcagattgcaaactgcaaacagtgcattgagcggtcagcatcactcatctcccaagcggaacactctctgaaggagaatgatcatgcgcgtttcctacagactgctaagaatatcaccgagagagtctccatggcaactgcatcctcccaggttctaattcctgaaatcaacctcaatgacacatttgacacctttgccttagatttttcccgagagaagaaactgctagaatgtctggattaccttacagctcccaaccctcccacaattagagaagagctctgcacagcttcatatgacaccatcactgtgcattggacctccgatgatgagttcagcgtggtctcctacgagctccagtacaccatattcaccggacaagccaacgtcgttagtctgtgtaattcggctgatagctggatgatagtacccaacatcaagcagaaccactacacggtgcacggtctgcagagcggcaccaagtacatcttcatggtcaaggccatcaaccaggcgggcagccgcagcagtgagcctgggaagttgaagacaaacagccaaccatttaaactggatcccaaatctgctcatcgaaaactgaaggtgtcccatgataacttgacagtagaacgtgatgagtcatcatccaagaagagtcacacacctgaacgcttcaccagccaggggagctatggagtagctggaaatgtgtttattgatagtggccggcattattgggaagtggtcataagtggaagcacatggtatgccattggtcttgcttacaaatcagccccgaagcatgaatggattgggaagaactctgcttcctgggcgctctgccgctgcaacaataactgggtggtgagacacaatagcaaggaaatccccattgagcctgccccccacctccggcgcgtgggcatcctgctggactatgataacggctctatcgccttttatgatgctttgaactccatccacctctacaccttcgacgtcgcatttgcgcagcctgtttgccccaccttcaccgtgtggaacaagtgtctgacgattatcactgggctccctatcccagaccatttggactgcacagagcagctgccgtgagcgtctggccacatggagctgctttctggggaacagtaaggttcaggccactatttaggggactgagaaagcacaggcttcatgagtgtaatgaaatctcaccagaagtgtcccgaaatcggctcagatagggctcaaaacaagagattcctctccttttactgtgtcttgtattaagtacgggctttaataatttctttaatttttttgtatttagaggaaaatctatagattatttataagagaaacataatcaggattacaacttttaggaattacttggttttgcacattaagaggcccataagtttatcagctatttacaaccttcatttcatcacaatctgtgggcttacaaaaaaacaaaaacttttgtagttttgtatgttactcatcttcttacctgatatcccatgatgatcccatggtaggtcttctcacctcgatggtgcataacaggatgtgtttgaacctagtaggggaggaaacaggctttcttactctggtttaatttgaagtgttttaattgtgatgtcaaaaagttgtatcagatcaactaaaatggagagcaagacagagaatgaaaagagttgattttggacctcggaccttgccgtggctaaatctttaccttctcatagctgatgggataatgttggaaagaaaggttctgaatcctttggccacattttgccctgcttctctcagggttaagggttctggaagaacattaagaatgagattgcaattgaaaatagtcattttgaatcctattgattattcaaaaattcaggctgatttgtcttttatcagaggtaggattctgttttatagtatagaatctactttatccttccttttaatagttcctttagacctgtgaaatttcttcactacatttaatagttctcctatttcccgctcccccatatcaattttccttttgtctccggggctgagtaaataaacatgttctgtcacaaatagcagcaccactttggattgattttgctctccaggacatcagcacatggccctgatcagcactaccacatccaaacataagtcactgaaaaacacttaatatttatgagttggtaatgacaagggacattgtataaagtactatttgctagattcatgcctcaaaagttattataaacagacctttattaaacacatcttgaaagatgtagaagtccctctatagtctagtatagtttacaatagagttgtaagaccaaaaaaaaaaaaaaaaaattcaaactcgttattcaggaacctgcttataaaatgtcagctgggattctttgcatgccaatctgatgcgttggaatggtccatgaattaaggctttcttgagcagttcttggcccagaactctggcattggttctagtttgatgaagggcatgacctctataaatggtttcaattgctaaaatatttacctgggatactgggtcagccattttgactgagcagactagtggatttagacattgtttttagttattttgtttttaaccaaatcaaccaactgcctccctgaaataagtcaatgaactcattgtttcagcatcacgtggccaaaggtcatgtgattgcaaatctggatttcaagggaggccaagccagcttcctgggtccttccatcctcttccctagcagacactctcctttttcttaacagatagattctatatatttactatattatttatacccagatgaatattttgatagatacctaagacaatttcacatctaaaagatggacgcctcaatggaaaaaaaacaatctttctctggaaaccttataggtttttctttttattacaatataaaagcaatgtgtgtttgccttctctgagtaaactgaaagggttgtctcagtaatttttacatacattttgggtaactggataatggatattttaatgcactttgtacactaacaggttctaaataaaagggtctaaaactcagcttctgagtttttaaaatcacggtctccaggtaccaataaatgctacagtttgccttatgatgttaacataaaacacttagtagaaggacaatatttccatgaaaataatgtttttcaatattaagaagttactactcaaattttcacagtaagccatttagggtatgtttggctatttttataaggacatgagagattatgtcataattttgttgtggaagtctcactcttggctaacttaaaagcattgtggatagtagcagttactagttccaggttgtcatatttacaggaaaatatgtatatggtgaaaggccaccgtgtttaattactataatgatgtagaaaagattcccgtgtgaattttttttttgaaagtctaaaaaatgtatgctgtaaaaatttgctgcagtgtaattttgcattctctttaaactgattgaggtcacagtattttattatttggggtcctcaccacaggaaacactgcgatacaggggcaaaagagatggcagtgccaattaaattaatacaacaaaatcaatgcagcaccaaccaagactgccaggtctggtgtcatgggtatgcccagagcccaggagttcagaagggccctaagcctgatttaatgctctgctgttgatgtcttgaaattcttaacaatttttgaacaaggggcctgcgttttcacttcgcactgggccttgcaaattacatagcgagtgctcataaaagaactcagaaacgtggtacctctcttcctggtggatacaaataaagaaatctggatccaaagttgaaagttgctggcgatatcattcaagtaggactctaaatagtggattaagatgagggtgggcctgggtgaagattctttccagctttaaaagaaagtgacttcaaaaactgactgcaaatattgacgatggtttctgctggaggaaaagaaacagcttgaatacagacaggcttttttattacggtactgatatattgaccttaaacttgctgaggaactgaactaacgtcctccagtgaccgtggaattccatctcagctccaggaacatgcagatacctgcaaagagacacgcatatatgctggcatacatgtgcatttggtgttgggaagttgaccatctggtctatcttaataaaatggtaaaaagcacaccaagacaatgatgggggcaggaggatgtttttgaaaacagcgcttctcaaccagtgctcgattttgccccccaggagacatttggcaatgcaatggcaacttttggttgtcgcagccggggaagggaagctaccagcatctagtgcgtagaggtcatggacgccgttaaacatcctacagtgcaagcgcagcccccgaccacgaagagttgtcttgctcaaatatcaacagtgctgcagtgtagaaacttgatcgttggttttcttttaatgcaaaactctcataaaaacctttcacttttcctgtcattgattatatgcttgatacacccaaaaagaaaaggggaggggcaccaattcacctacactccagtggctccatcacctttaaaaatatttataaaatagttccaaaaatctgatatctgaaaagcaatccaagcctgtgtaaatgggaatcactgataagtatcatcatctgtatcagcttggcttggacatgaaaaattgattctctttatgtcactccttgcacctggacaaattcaatccccggtacttaagtcacactgccaagccctcggccctgactattgtcttgattgctgttcctttctggttcaaaataaaatcatttttgtggcaccaagaccctctgtctctgcctgtctctgttgccttttcatcattttgtgtttttgcagttatgatgttgacaaatatttattcaacatctaccatttattcatactactttatgacatataattcattttcttttactgtctctcatccactatttgcctttccctattcaaaatacaattcttttgcaacactcaaaatattctccagggaatttttaaaacacaataaaagaaagcctatatagaagtg

SEQ ID NO: 154058 - DNA, 1839 bp, Homo sapiens
  Payload ID: 10274
  Gene Symbol: MID1
  Gene Name: midline 1
  ENST ID: ENST00000610939
  CDS Start-End: 57-743
atagctgatcagcttccttgggttttgctgatgacacaagagagctttgcctgaagatggaaacactggagtcagaactgacctgccctatttgtctggagctctttgaggaccctcttctactgccctgcgcacacagcctctgcttcaactgcgcccaccgcatcctagtatcacactgtgccaccaacgagtctgtggagtccatcaccgccttccagtgccccacctgccggcatgtcatcaccctcagccagcgaggtctagacgggctcaagcgcaacgtcaccctacagaacatcatcgacaggttccagaaagcatcagtgagcgggcccaactctcccagcgagacccgtcgggagcgggcctttgacgccaacaccatgacctccgccgagaaggtcctctgccagttttgtgaccaggatcctgcccaggacgctgtgaagacctgtgtcacttgtgaagtatcctactgtgacgagtgcctgaaagccactcacccgaataagaagccctttacaggccatcgtctgattgagccaattccggactctcacatccgggggctgatgtgcttggagcatgaggatgagaagcaaaacttagagagtaacctcaccaaccttattaagaggaacacagaactggagacccttttggctaaactcatccaaacctgtcaacatgttgaactggaatgttctgtactgtttcccagagttgcccaatggggttaatctccagttgcccaaggtggtcttggtaagtcacactttactggcttcgtagttgtccctgtttcacttcctacccagtactggtgttttctggcaacaatttgaccatccattcttgtctcatatccttcttggggaggatacaactgccaaccatgtctaaaatgaaatgatagcacaagtctctttttctagtcatggctatagctcacatgttcaatttctctaaactcaagtctctttcattgtgtttgaataaacgtacatgtgaatcactggacatcaaagatatttaaaaatcaatctactcacttctcctgatattctagaatgacaacaacagggcaagatatttcatagatatcacttgtgggtgcgtcatgaaggcagaacaaagcttaacattttccagttgtacctcccagttaagttctatcagtgacgtaatcacgtgtatttcactcactgtacggaataccaaagagcagaaacccaatgttcattttccagaactttgcagaagcagatggcttctatacctgagtaactgaaacccaaaaaggggtccaactcagtatttttccagtacatcacttttcaggaatcatggcacaacaactaaaaggaatgtcacttaatgagaaataacatgtaagattgaaagtgattaaggtaaagtcatagagtagaggtttcctctttccattagaaataacttcccttcccttaaacacgtcacctccatctttcctggcactccattaatggtcatctgctaaaagttattgtttaccctctgaccacaacatcaaatgccaaacacatttgttgaaaattatttaatagaaatcgctacttttcagaaactttatgaaaaagacgtgatagagacaaacacccatggcaggttaagtagatttcttttcattcagtgtgcccagcccaaacggaagggtgtgaagcatttgttttataaagtgtgtaattaataagagaaaggaagggaggagtttattgtttttcaatgaattatgagcaaccccttccattctgcttcttcattttggaactgcttctaacaaagttaccattaaac

SEQ ID NO: 154059 - DNA, 1926 bp, Homo sapiens
  Payload ID: 10274
  Gene Symbol: MID1
  Gene Name: midline 1
  ENST ID: ENST00000616003
  CDS Start-End: 57-1679
atagctgatcagcttccttgggttttgctgatgacacaagagagctttgcctgaagatggaaacactggagtcagaactgacctgccctatttgtctggagctctttgaggaccctcttctactgccctgcgcacacagcctctgcttcaactgcgcccaccgcatcctagtatcacactgtgccaccaacgagtctgtggagtccatcaccgccttccagtgccccacctgccggcatgtcatcaccctcagccagcgaggtctagacgggctcaagcgcaacgtcaccctacagaacatcatcgacaggttccagaaagcatcagtgagcgggcccaactctcccagcgagacccgtcgggagcgggcctttgacgccaacaccatgacctccgccgagaaggtcctctgccagttttgtgaccaggatcctgcccaggacgctgtgaagacctgtgtcacttgtgaagtatcctactgtgacgagtgcctgaaagccactcacccgaataagaagccctttacaggccatcgtctgattgagccaattccggactctcacatccgggggctgatgtgcttggagcatgaggatgagaaggtgaatatgtactgtgtgaccgatgaccagttaatctgtgccttgtgtaaactggttgggcggcaccgcgatcatcaggtggcagctttgagtgagcgctatgacaaattgaagcaaaacttagagagtaacctcaccaaccttattaagaggaacacagaactggagacccttttggctaaactcatccaaacctgtcaacatgttgaaactgtaaaggatcagaaagtcattggcagagagaagcagcagtattaccctaggaataggagaaagtgggtcagcaactccctacaggcaagactgatggggagaagatgcatttcaagacgcgaaagaaaactgactctagatgtagagaaggtcaatgcatcacgtcaagaagccaaattgacagaggagtgtgatcttctcattgagatcattcagcaaagacgacagattattggaaccaagatcaaagaagggaaggtgatgaggcttcgcaaactggctcagcagattgcaaactgcaaacagtgcattgagcggtcagcatcactcatctcccaagcggaacactctctgaaggagaatgatcatgcgcgtttcctacagactgctaagaatatcaccgagagagtctccatggcaactgcatcctcccaggttctaattcctgaaatcaacctcaatgacacatttgacacctttgccttagatttttcccgagagaagaaactgctagaatgtctggattaccttacagctcccaaccctcccacaattagagaagagctctgcacagcttcatatgacaccatcactgtgcattggacctccgatgatgagttcagcgtggtctcctacgagctccagtacaccatattcaccggacaagccaacgtcgttagtgagtatctcatggcctatttatttctgtctttggtggctttcttcagattgattgcattcctgaatttaaacttcaaaggaagacaaggaaggaaagaacacacaatatttattgacttgtctttcttgaacaaaaaagtgatagcactcacttgtactacattagtaaaaacagctggctaaatattgatgaaaattaatgacctctagcaaaccacatggatgttaagggaaagaagccagaaacaaatatatagagagaaacaaatatatagagagatacatagagagagaaacaaatatatatatatagtattaatccacatataggttcataacttaaagatcaaaataaactattttgcttaaagaaacattcataggtgttaaaactataaaccctgggcaacctggtgaaaccccatctcta

SEQ ID NO: 154060 - DNA, 2876 bp, Homo sapiens
  Payload ID: 10275
  Gene Symbol: MID2
  Gene Name: midline 2
  Uniprot ID: Q9UJV3
  ENST ID: ENST00000262843
  CDS Start-End: 549-2756
gagaagacatgtaaacgtgcctccagaggaagggctgggggagctgggagtggcgggggcggcggaaggtgagcctgggaaggtggccgagcaccccttcttcttgggcccttcccagtgctcccttggggtgtcagccccagccccgtttgcccccactccgcctcccttttggaagggattgccttttttttcctctgcggcggcggaaatgacagtgtggtgctgccgtggtgtcatggtgctgcccctggactgaggggcgaaaactcttaagtttagctcgggaggcccagctgcggtagcatcgcggccgccgtgctgtcccctgcggggcgcgcgggctggcggatcccggctgctgcgcggcgtcggcgacggtagcggcagcggcggcgaaggcgggcggcggcctacagtggtagcggcggcggcggcgaccggggcccgggagctcgcgccggagcccgagccaacccgctgcggaggcagacgagagcccagcgccctcgagcgagcggaggagatggctggcacctgggaacgctatgggtgaaagcccagcctccgtggttcttaatgcctcaggaggactattttcactaaagatggaaacactggagtctgaattgacctgtccaatctgcctagagttgtttgaagacccccttctgctcccttgtgctcacagcctctgcttcagctgtgcccatcgcattttggtatcaagctgcagctctggtgaatccattgaacccattactgctttccagtgtcctacctgcaggtatgttatctcgctgaaccaccggggcctggatggcctcaagaggaatgtgactctgcagaacattattgatcgcttccagaaggcttcagtcagtgggcccaattcccctagtgagagccgccgggaaaggacttacaggcccaccactgccatgtctagcgagcgaattgcttgccaattctgtgagcaggacccgccaagggatgcagtaaaaacatgcatcacctgtgaggtctcctactgtgaccgttgcctgcgggccacgcaccccaacaagaaacctttcaccagccaccgcctggtggaaccagtgccagacacacatcttcgagggatcacctgcctggaccatgagaatgagaaagtgaacatgtactgtgtatctgatgaccaattgatctgtgccttatgcaaactggtgggtcgtcaccgagaccatcaggtcgcatccctgaatgatcgatttgagaaactcaagcaaactctggagatgaacctcaccaacctggttaagcgcaacagcgaactagaaaatcaaatggccaaactaatacagatctgccagcaggttgaggtgaatactgctatgcatgaggcaaaacttatggaagaatgtgacgagttggtagagatcatccagcagaggaagcaaatgatcgctgtcaaaatcaaagagacaaaggttatgaaactgagaaagttggcacagcaggttgctaattgccgccagtgtcttgaacggtcaacagtcctcatcaaccaagctgagcatatcctgaaagaaaatgaccaggcacggtttctacagtctgcaaaaaatattgctgagagggtcgctatggcaactgcatcttctcaagttctgattccagacatcaattttaatgatgcctttgaaaactttgctttagatttttccagagaaaagaaactgctagaggggttagattatttaacagccccaaacccaccatctatccgagaagaactctgtactgcctcccatgacaccattacagtccactggatctcggatgatgagttcagcatcagctcctatgagcttcagtacaccatattcactggccaggctaacttcatcagtaagtcatggtgtagttggggcctgtggccagagataaggaaatgtaaggaagcagtaagctgctcaagattggccggggcgccacgaggcctgtataattcagtagacagctggatgattgttcccaacattaaacagaaccattacacagtgcatggactccagagcgggactcgctacatcttcatcgttaaagccataaaccaagccggcagccggaacagtgaacctacccgactaaaaacaaacagccaaccctttaaattggatcccaaaatgactcacaagaagttgaagatctccaatgatggattgcagatggagaaggatgaaagctctctaaagaagagccacaccccagagaggtttagtggcacagggtgctatggggcagcaggaaatatattcattgacagtggctgccactattgggaggtggtcatgggttcctcaacatggtatgcaattggcattgcctacaaatcagctccaaagaatgaatggattggcaagaatgcctcctcatgggtcttctctcgctgcaatagtaacttcgtggtgagacacaacaacaaggaaatgctggtggatgtgcccccacacctgaagcgtctgggtgtcctcctggattatgacaacaatatgctgtctttctatgacccagctaactctctccatcttcatacttttgatgtgaccttcattcttccagtttgtccaacatttacaatctggaacaaatccctaatgatcctgtctggcttgcctgccccagattttattgattaccctgagcggcaggaatgcaactgcaggcctcaagaatccccttatgtttctgggatgaaaacctgtcattaagtttcaggagagtatataattcactggctctctagttcagcagttcttcccctcctacacctaagttagcgttcaatatacgagacacaaaataaagtttgtttgaagcatccaaaataa

SEQ ID NO: 154061 - DNA, 758 bp, Homo sapiens
  Payload ID: 10275
  Gene Symbol: MID2
  Gene Name: midline 2
  ENST ID: ENST00000451923
  CDS Start-End: 103-758
cttcaagatgacagggcgctggagaaaaggctgctggaatcagctggtgaaagcccagcctccgtggttcttaatgcctcaggaggactattttcactaaagatggaaacactggagtctgaattgacctgtccaatctgcctagagttgtttgaagacccccttctgctcccttgtgctcacagcctctgcttcagctgtgcccatcgcattttggtatcaagctgcagctctggtgaatccattgaacccattactgctttccagtgtcctacctgcaggtatgttatctcgctgaaccaccggggcctggatggcctcaagaggaatgtgactctgcagaacattattgatcgcttccagaaggcttcagtcagtgggcccaattcccctagtgagagccgccgggaaaggacttacaggcccaccactgccatgtctagcgagcgaattgcttgccaattctgtgagcaggacccgccaagggatgcagtaaaaacatgcatcacctgtgaggtctcctactgtgaccgttgcctgcgggccacgcaccccaacaagaaacctttcaccagccaccgcctggtggaaccagtgccagacacacatcttcgagggatcacctgcctggaccatgagaatgagaaagtgaacatgtactgtgtatctgatgaccaattgatctgtgccttatgcaaactggtgggtcgtcaccgagaccatcaggtcgcatccctgaatgatcgatttgagaaact

SEQ ID NO: 154062 - DNA, 2251 bp, Homo sapiens
  Payload ID: 10275
  Gene Symbol: MID2
  Gene Name: midline 2
  Uniprot ID: Q9UJV3
  ENST ID: ENST00000443968
  CDS Start-End: 14-2131
acctgggaacgctatgggtgaaagcccagcctccgtggttcttaatgcctcaggaggactattttcactaaagatggaaacactggagtctgaattgacctgtccaatctgcctagagttgtttgaagacccccttctgctcccttgtgctcacagcctctgcttcagctgtgcccatcgcattttggtatcaagctgcagctctggtgaatccattgaacccattactgctttccagtgtcctacctgcaggtatgttatctcgctgaaccaccggggcctggatggcctcaagaggaatgtgactctgcagaacattattgatcgcttccagaaggcttcagtcagtgggcccaattcccctagtgagagccgccgggaaaggacttacaggcccaccactgccatgtctagcgagcgaattgcttgccaattctgtgagcaggacccgccaagggatgcagtaaaaacatgcatcacctgtgaggtctcctactgtgaccgttgcctgcgggccacgcaccccaacaagaaacctttcaccagccaccgcctggtggaaccagtgccagacacacatcttcgagggatcacctgcctggaccatgagaatgagaaagtgaacatgtactgtgtatctgatgaccaattgatctgtgccttatgcaaactggtgggtcgtcaccgagaccatcaggtcgcatccctgaatgatcgatttgagaaactcaagcaaactctggagatgaacctcaccaacctggttaagcgcaacagcgaactagaaaatcaaatggccaaactaatacagatctgccagcaggttgaggtgaatactgctatgcatgaggcaaaacttatggaagaatgtgacgagttggtagagatcatccagcagaggaagcaaatgatcgctgtcaaaatcaaagagacaaaggttatgaaactgagaaagttggcacagcaggttgctaattgccgccagtgtcttgaacggtcaacagtcctcatcaaccaagctgagcatatcctgaaagaaaatgaccaggcacggtttctacagtctgcaaaaaatattgctgagagggtcgctatggcaactgcatcttctcaagttctgattccagacatcaattttaatgatgcctttgaaaactttgctttagatttttccagagaaaagaaactgctagaggggttagattatttaacagccccaaacccaccatctatccgagaagaactctgtactgcctcccatgacaccattacagtccactggatctcggatgatgagttcagcatcagctcctatgagcttcagtacaccatattcactggccaggctaacttcatcagcctgtataattcagtagacagctggatgattgttcccaacattaaacagaaccattacacagtgcatggactccagagcgggactcgctacatcttcatcgttaaagccataaaccaagccggcagccggaacagtgaacctacccgactaaaaacaaacagccaaccctttaaattggatcccaaaatgactcacaagaagttgaagatctccaatgatggattgcagatggagaaggatgaaagctctctaaagaagagccacaccccagagaggtttagtggcacagggtgctatggggcagcaggaaatatattcattgacagtggctgccactattgggaggtggtcatgggttcctcaacatggtatgcaattggcattgcctacaaatcagctccaaagaatgaatggattggcaagaatgcctcctcatgggtcttctctcgctgcaatagtaacttcgtggtgagacacaacaacaaggaaatgctggtggatgtgcccccacacctgaagcgtctgggtgtcctcctggattatgacaacaatatgctgtctttctatgacccagctaactctctccatcttcatacttttgatgtgaccttcattcttccagtttgtccaacatttacaatctggaacaaatccctaatgatcctgtctggcttgcctgccccagattttattgattaccctgagcggcaggaatgcaactgcaggcctcaagaatccccttatgtttctgggatgaaaacctgtcattaagtttcaggagagtatataattcactggctctctagttcagcagttcttcccctcctacacctaagttagcgttcaatatacgagacacaaaataaagtttgtttgaagcatccaaaataa

SEQ ID NO: 154063 - DNA, 3790 bp, Homo sapiens
  Payload ID: 10276
  Gene Symbol: MIDN
  Gene Name: midnolin
  Uniprot ID: Q504T8
  ENST ID: ENST00000300952
  CDS Start-End: 516-1922
gataaaggctgagggccgcgcgcttggcccagaccggcccggccagcgcgcattcggccccggacgaaggtactcgcagcacttggagcgcagaaccggccgcgcccgatcctccgagcggcggcgacggctgttgctaagggaggggacgcgcgaggaagcgcgacccgggcggcagacggcacccagcgccaccagccgagcggcgccccctccccaggacccttaaccgcgccgcgtcccggtcgcgcccgccgccctttgaaggagaagcaagtgccgtccccacccccggaaggcgcccccaggagccggagcgacctcggagcgccactcggattttggatttcggtctcgcattccgcggccgggactttctcgaggaggacgcgcgctgctccgcgcccccgagtgcccggaggacccggcatccggggagcctctcgcccctgtcccggaggcgcggcgaggattggcggcgcccgccgcccccagccccccagcgcgcgccggggatggagccgcagcccggcggcgcccggagctgccggcgcggggcccccggcggcgcctgcgagctgggcccggcggccgaggcggcgcccatgagcctcgccatccacagcaccacgggcacccgctacgacctggccgtgccgcccgacgagacggtggaggggctgcgcaagcggttgtcccagcgcctcaaagtgcccaaggagcgcctggctcttctccacaaagacacccggctcagttcggggaagctgcaggagttcggcgtgggtgatggcagcaagctgaccttggtacccaccgtggaagcgggcctcatgtctcaggcctcaaggccggaacagtccgtgatgcaagctctcgagagtctcacggagacgcaggtcagtgacttcctgtcgggccgttcgccactgacactggccttgcgtgtgggcgaccacatgatgttcgtgcagctgcagctcgcggcccagcacgctccactgcaacaccgccatgtgctggccgctgcggccgccgccgctgctgcgcggggggaccccagcatagcctcccccgtgtcctcgccctgccggccggtgtccagtgccgcccgagtccccccggtgcccaccagcccgtcccctgcatctccctcgcccatcacagccggctccttccggtcccacgcagcctccaccacctgcccggagcagatggactgctcccccacggccagcagcagtgccagtcctggtgccagcaccacgtctaccccaggggccagccctgccccccgctcccgaaaacccggcgccgtcatcgagagctttgtgaatcacgccccgggggtcttctcagggaccttctctggcacgctacaccccaactgccaagacagcagcgggcggccgcggcgtgacatcggcaccatcctgcagatcctgaacgacctcctgagcgccacccggcactaccagggcatgcccccttcgctggcccagctccgctgccacgcccagtgctccccggcctcaccggcccccgacctggcccccagaactacctcctgcgagaagctcacggctgccccctcagcctccctgctgcagggccagagccagatccgcatgtgcaagcccccgggggaccggcttcggcagacagaaaaccgcgccacgcgctgcaaggtggaacggctgcagctgcttctgcagcagaaacggctccgtagaaaggcccggcgggacgcgcggggtccgtaccactggtcacccagccgcaaggccggccgcagcgacagcagtagcagcgggggcggcggcagccccagcgaggcctccggcttgggcctcgacttcgaggactccgtgtggaagccagaagtcaaccctgacatcaagtcagagttcgtggtggcttaggatcttcggatcggccaccctcgcccctcgcaccccagcccagggcggcggggactccgagagccccggagagaacgtggcccagccctggagggcaggcggccactcccccagccagaagtctttttttcttttcttcttttttattatttttttctttttttaaaaagttctgaccgtggtttcctggactcttcatgggctttgcttcctacctccttcacccttcactcctgccctcctcttcctcctcctcctcctcctccgtctgtctcctttcacctctgcgccaggtcggtcctccctgccaaccttccccagctccaatatgtagcagtctctctggatggcggagagtgaaggagacggagaaacgcgccccatcccttccgccgcctcctttcccccccgaccctattcaggttttaagtcaaaaatgtcgatatgtcattatgcactttacagatgaggggaggggccgcagtgcgcagaacccaccccaccccccagtgcagacttcggggtctccaccccaggccagcagcgcccactgggctacagcaagccaacaggtcacagaagccaacgaggggactgtttctcttccactcctatcctcttttcttgatcttttttttgcattttccttcatttctttaacaaggagagcaaagctgttttagcagaggctggggctgaggtccccatggggtttgggtgcaggggcatggcaccctttcctgtcgggaagggagaggggaactacccccccagcctgccctccgccccgccccagccggcggactgtgctgtttcctccgcccccactcccgtgttttctgacctcctgcctgagtttggggtatttatagactattaattttctgactgagccaatagtggttggggaactcttgaaaaaggggagagaatggctgggtgctggggagttcccccctccgagccctccttcccggcccaacctgagggatgtggatttgggactgtctgggggcccctcctgcagcgaggatgggagggggtgctgagctgtgaatcccctgggcagggggcgacaactccgtgtagcattaacccccgtggcggggtccgctgctggtctaatttggaccccctgcctctcagtgcccctgccctaggggtgtctgtctccagaggggagggacaaatcccctactggggccatttcaatggggtagtttttggatttttttccccactcactttttattttttaatgataatggagatgtctggacccttcctcaccccacctgtcggtcttgtcctggctctgcctgtcccccaccgttgttctcgtaggtgaaccccaggtcctcaactccccccctttatgtgttgaaagttaatggtttcagatgtgaacatcacgtgttataactgtagcgctgtaaatttttttgtgggagggtgggcagggaggggtcccagagggtagagctcaaggattttgggttttgttttgttttcatttttccaaaaaaaaaagaaaaaaaaatagaaaaaaaaggagtaaaaggggcgggtttgttttttgaagaactgtcttggatacctatttaaatgtgtgttctgttttgttttttaacgatttttaaataacgtctgtgcctccactggttgagggtggaacctccaggcaggaaccggctcgccaccctctgcccggtaagggctgcccaagaaagcattacccgccctcggggggtcgggctgtgggggtcccggcacctggcgtgagtttcatgtatgaaaacataaaattgaaaaaaaaaaaaaaacctacacgagcaccgtgatttcaagtaataaacagaaaatgaaac

SEQ ID NO: 154064 - DNA, 416 bp, Homo sapiens
  Payload ID: 10276
  Gene Symbol: MIDN
  Gene Name: midnolin
  ENST ID: ENST00000586843
  CDS Start-End: 1-416
ccggctcagttcggggaagctgcaggagttcggcgtgggtgatggcagcaagctgaccttggtacccaccgtggaagcgggcctcatgtctcaggcctcaaggccggaacagtccgtgatgcaagctctcgagagtctcacggagacgcagcccccagcggcgcccgggccgggccgggctggcggaggaggcttccggaaatacagattcattttatttaagcgtccgtggcaccgacagggaccccagagcccagagaggggcggcgagaggccccaggtcagtgacttcctgtcgggccgttcgccactgacactggccttgcgtgtgggcgaccacatgatgttcgtgcagctgcagctcgcggcccagcacgctccactgcaacaccgccatgtgctggccgctgcggccg

SEQ ID NO: 154065 - DNA, 1163 bp, Homo sapiens
  Payload ID: 10276
  Gene Symbol: MIDN
  Gene Name: midnolin
  ENST ID: ENST00000586757
  CDS Start-End: 516-1163
gataaaggctgagggccgcgcgcttggcccagaccggcccggccagcgcgcattcggccccggacgaaggtactcgcagcacttggagcgcagaaccggccgcgcccgatcctccgagcggcggcgacggctgttgctaagggaggggacgcgcgaggaagcgcgacccgggcggcagacggcacccagcgccaccagccgagcggcgccccctccccaggacccttaaccgcgccgcgtcccggtcgcgcccgccgccctttgaaggagaagcaagtgccgtccccacccccggaaggcgcccccaggagccggagcgacctcggagcgccactcggattttggatttcggtctcgcattccgcggccgggactttctcgaggaggacgcgcgctgctccgcgcccccgagtgcccggaggacccggcatccggggagcctctcgcccctgtcccggaggcgcggcgaggattggcggcgcccgccgcccccagccccccagcgcgcgccggggatggagccgcagcccggcggcgcccggagctgccggcgcggggcccccggcggcgcctgcgagctgggcccggcggccgaggcggcgcccatgagcctcgccatccacagcaccacgggcacccgctacgacctggccgtgccgcccgacgagacggtggaggggctgcgcaagcggttgtcccagcgcctcaaagtgcccaaggagcgcctggctcttctccacaaagacacccggctcagttcggggaagctgcaggagttcggcgtgggtgatggcagcaagctgaccttggtacccaccgtggaagcgggcctcatgtctcaggcctcaaggccggaacagtccgtgatgcaagctctcgagagtctcacggagacgcaggtcagtgacttcctgtcgggccgttcgccactgacactggccttgcgtgtgggcgaccacatgatgttcgtgcagctgcagctcgcggcccagcacgctccactgcaacaccgccatgtgctggccgctgcggccgccgccgctgctgcgcggggggaccccagcatagcctcccccgtgtcctcgccctgccggccggtgtccagtgccgcccgagtccccccggtgcccaccagcccgtcccctgcatctccctcgcccatc

SEQ ID NO: 154066 - DNA, 3243 bp, Homo sapiens
  Payload ID: 10276
  Gene Symbol: MIDN
  Gene Name: midnolin
  Uniprot ID: Q504T8
  ENST ID: ENST00000591446
  CDS Start-End: 410-1816
agatcctccgagcggcggcgacggctgttgctaagggaggggacgcgcgaggaagcgcgacccgggcggcagacggcacccagcgccaccagccgagcggcgccccctccccaggacccttaaccgcgccgcgtcccggtcgcgcccgccgccctttgaaggagaagcaagtgccgtccccacccccggaaggcgcccccaggagccggagcgacctcggagcgccactcggattttggatttcggtctcgcattccgcggccgggactttctcgaggaggacgcgcgctgctccgcgcccccgagtgcccggaggacccggcatccggggagcctctcgcccctgtcccggaggcgcggcgaggattggcggcgcccgccgcccccagccccccagcgcgcgccggggatggagccgcagcccggcggcgcccggagctgccggcgcggggcccccggcggcgcctgcgagctgggcccggcggccgaggcggcgcccatgagcctcgccatccacagcaccacgggcacccgctacgacctggccgtgccgcccgacgagacggtggaggggctgcgcaagcggttgtcccagcgcctcaaagtgcccaaggagcgcctggctcttctccacaaagacacccggctcagttcggggaagctgcaggagttcggcgtgggtgatggcagcaagctgaccttggtacccaccgtggaagcgggcctcatgtctcaggcctcaaggccggaacagtccgtgatgcaagctctcgagagtctcacggagacgcaggtcagtgacttcctgtcgggccgttcgccactgacactggccttgcgtgtgggcgaccacatgatgttcgtgcagctgcagctcgcggcccagcacgctccactgcaacaccgccatgtgctggccgctgcggccgccgccgctgctgcgcggggggaccccagcatagcctcccccgtgtcctcgccctgccggccggtgtccagtgccgcccgagtccccccggtgcccaccagcccgtcccctgcatctccctcgcccatcacagccggctccttccggtcccacgcagcctccaccacctgcccggagcagatggactgctcccccacggccagcagcagtgccagtcctggtgccagcaccacgtctaccccaggggccagccctgccccccgctcccgaaaacccggcgccgtcatcgagagctttgtgaatcacgccccgggggtcttctcagggaccttctctggcacgctacaccccaactgccaagacagcagcgggcggccgcggcgtgacatcggcaccatcctgcagatcctgaacgacctcctgagcgccacccggcactaccagggcatgcccccttcgctggcccagctccgctgccacgcccagtgctccccggcctcaccggcccccgacctggcccccagaactacctcctgcgagaagctcacggctgccccctcagcctccctgctgcagggccagagccagatccgcatgtgcaagcccccgggggaccggcttcggcagacagaaaaccgcgccacgcgctgcaaggtggaacggctgcagctgcttctgcagcagaaacggctccgtagaaaggcccggcgggacgcgcggggtccgtaccactggtcacccagccgcaaggccggccgcagcgacagcagtagcagcgggggcggcggcagccccagcgaggcctccggcttgggcctcgacttcgaggactccgtgtggaagccagaagtcaaccctgacatcaagtcagagttcgtggtggcttaggatcttcggatcggccaccctcgcccctcgcaccccagcccagggcggcggggactccgagagccccggagagaacgtggcccagccctggagggcaggcggccactcccccagccagaagtctttttttcttttcttcttttttattatttttttctttttttaaaaagttctgaccgtggtttcctggactcttcatgggctttgcttcctacctccttcacccttcactcctgccctcctcttcctcctcctcctcctcctccgtctgtctcctttcacctctgcgccaggtcggtcctccctgccaaccttccccagctccaatatgtagcagtctctctggatggcggagagtgaaggagacggagaaacgcgccccatcccttccgccgcctcctttcccccccgaccctattcaggttttaagtcaaaaatgtcgatatgtcattatgcactttacagatgaggggaggggccgcagtgcgcagaacccaccccaccccccagtgcagacttcggggtctccaccccaggccagcagcgcccactgggctacagcaagccaacaggtcacagaagccaacgaggggactgtttctcttccactcctatcctcttttcttgatcttttttttgcattttccttcatttctttaacaaggagagcaaagctgttttagcagaggctggggctgaggtccccatggggtttgggtgcaggggcatggcaccctttcctgtcgggaagggagaggggaactacccccccagcctgccctccgccccgccccagccggcggactgtgctgtttcctccgcccccactcccgtgttttctgacctcctgcctgagtttggggtatttatagactattaattttctgactgagccaatagtggttggggaactcttgaaaaaggggagagaatggctgggtgctggggagttcccccctccgagccctccttcccggcccaacctgagggatgtggatttgggactgtctgggggcccctcctgcagcgaggatgggagggggtgctgagctgtgaatcccctgggcagggggcgacaactccgtgtagcattaacccccgtggcggggtccgctgctggtctaatttggaccccctgcctctcagtgcccctgccctaggggtgtctgtctccagaggggagggacaaatcccctactggggccatttcaatggggtagtttttggatttttttccccactcactttttattttttaatgataatggagatgtctggacccttcctcaccccacctgtcggtcttgtcctggctctgcctgtcccccaccgttgttctcgtaggtgaaccccaggtcctcaactccccccctttatgtgttgaaagttaatggtttcagatgtgaacatcacgtgttataactgta

SEQ ID NO: 154067 - DNA, 1358 bp, Homo sapiens
  Payload ID: 10277
  Gene Symbol: MIF4GD
  Gene Name: MIF4G domain containing
  Uniprot ID: A9UHW6
  ENST ID: ENST00000245551
  CDS Start-End: 81-851
gggcacgcgcgcgcgccaccggcccggcaggtgctgtccttattcccagcccagtcaagagctaccggggctggctagtcatgggggagcccagtagagaggagtataaaatccagtcctttgatgcagagacccagcagctgctgaagacagcactcaaagttgcctgctttgagacagaagatggagaatattccgtttgccagaggagctatagtaattgctctcgcctgatgccttcccgctgtaacacgcagtacagagatccgggtgctgtggacttggagaaagtggccaatgtgattgtggaccattctctgcaggactgtgtgttcagcaaggaagcaggacgcatgtgctacgccatcattcaggcagagagtaaacaagcaggccagagtgtcttccgacgtggactcctcaaccggctgcagcaggagtaccaggctcgggagcagctgcgagcacgctccctgcagggctgggtctgctatgtcacctttatctgcaacatctttgactacctgagggtgaacaacatgcccatgatggccctggtgaaccctgtctatgactgcctcttccggctggcccagccagacagtttgagcaaggaggaggaggtggactgtttggtgctgcagctgcaccgggttggggagcagctggagaaaatgaatgggcagcgcatggatgagctctttgtgctgatccgggatggcttcctgctcccaactggcctcagctccctggcccagctgctgctgctggagatcattgagttccgggcggccggctggaagacaacgccagctgcccacaagtattactacagcgaagtctccgactaggcctccagatcagggcttcctcaccagcactggcctttcttctacccacctctaaagctggcagtggagtctctgcctcacccaaagacttttcccttccagactttgagtgtcttcccttctagactttcccatctcctggtgagatgtttcccacttatgccgtggtcctgccctgagcccctttccccaccacaacccaccacggccaggcagagaagggcaactcccaagagccactgcactgtgtaaccattagtgcaactactaccttggtgcctcagtttacccatctgtaaaatgggtaagcatagccactggtgggatattttgggatgtcaaggggtggaggcagagcacaagtcacaccagaaactgctttttatacattttgtataaggacaactctggaaacaagcctatttcctccagccagtttcactgaatgctgcaccacatgctacaccagttcagcgtgagaattttctaataaatcttttctgatac

SEQ ID NO: 154068 - DNA, 1306 bp, Homo sapiens
  Payload ID: 10277
  Gene Symbol: MIF4GD
  Gene Name: MIF4G domain containing
  Uniprot ID: A9UHW6
  ENST ID: ENST00000325102
  CDS Start-End: 126-794
cagcgccggacgctggttgcgcgctcccaggcgccgagcggccccgggcacgcgcgcgcgccaccggcccggcaggtgctgtccttattcccagcccagtcaagagctaccggggctggctagtcatgggggagcccagtagagaggagtataaaatccagtcctttgatgcagagacccagcagctgctgaagacagcactcaaagatccgggtgctgtggacttggagaaagtggccaatgtgattgtggaccattctctgcaggactgtgtgttcagcaaggaagcaggacgcatgtgctacgccatcattcaggcagagagtaaacaagcaggccagagtgtcttccgacgtggactcctcaaccggctgcagcaggagtaccaggctcgggagcagctgcgagcacgctccctgcagggctgggtctgctatgtcacctttatctgcaacatctttgactacctgagggtgaacaacatgcccatgatggccctggtgaaccctgtctatgactgcctcttccggctggcccagccagacagtttgagcaaggaggaggaggtggactgtttggtgctgcagctgcaccgggttggggagcagctggagaaaatgaatgggcagcgcatggatgagctctttgtgctgatccgggatggcttcctgctcccaactggcctcagctccctggcccagctgctgctgctggagatcattgagttccgggcggccggctggaagacaacgccagctgcccacaagtattactacagcgaagtctccgactaggcctccagatcagggcttcctcaccagcactggcctttcttctacccacctctaaagctggcagtggagtctctgcctcacccaaagacttttcccttccagactttgagtgtcttcccttctagactttcccatctcctggtgagatgtttcccacttatgccgtggtcctgccctgagcccctttccccaccacaacccaccacggccaggcagagaagggcaactcccaagagccactgcactgtgtaaccattagtgcaactactaccttggtgcctcagtttacccatctgtaaaatgggtaagcatagccactggtgggatattttgggatgtcaaggggtggaggcagagcacaagtcacaccagaaactgctttttatacattttgtataaggacaactctggaaacaagcctatttcctccagccagtttcactgaatgctgcaccacatgctacaccagttcagcgtgagaattttctaataaatcttttctgatactaaaa

SEQ ID NO: 154069 - DNA, 952 bp, Homo sapiens
  Payload ID: 10277
  Gene Symbol: MIF4GD
  Gene Name: MIF4G domain containing
  ENST ID: ENST00000580571
  CDS Start-End: 135-647
cgggccccgcagcgccggacgctggttgcgcgctcccaggcgccgagcggccccgggcacgcgcgcgcgccaccggcccggcaggtgctgtccttattcccagcccagtcaagagctaccggggctggctagtcatgggggagcccagtagagaggagtataaaatccagtcctttgatgcagagacccagcagctgctgaagacagcactcaaagatccgggtgctgtggacttggagaaagtggccaatgtgattgtggaccattctctgcaggactgtgtgttcagcaaggaagcaggacgcatgtgctacgccatcattcaggtgaacaacatgcccatgatggccctggtgaaccctgtctatgactgcctcttccggctggcccagccagacagtttgagcaaggaggaggaggtggactgtttggtgctgcagctgcaccgggttggggagcagctggagaaaatgaatgggcagcgcatggatgagctctttgtgctgatccgggatggcttcctgctcccaactggcctcagctccctggcccagctgctgctgctggagatcattgagttccgggcggccggctggaagacaacgccagctgcccacaagtattactacagcgaagtctccgactaggcctccagatcagggcttcctcaccagcactggcctttcttctacccacctctaaagctggcagtggagtctctgcctcacccaaagacttttcccttccagactttgagtgtcttcccttctagactttcccatctcctggtgagatgtttcccacttatgccgtggtcctgccctgagcccctttccccaccacaacccaccacggccaggcagagaagggcaactcccaagagccactgcactgtgtaaccattagtgcaactactaccttggtgcctcagtttacccatctgtaaaatggg

SEQ ID NO: 154070 - DNA, 1419 bp, Homo sapiens
  Payload ID: 10277
  Gene Symbol: MIF4GD
  Gene Name: MIF4G domain containing
  Uniprot ID: A9UHW6
  ENST ID: ENST00000579297
  CDS Start-End: 135-926
cgggccccgcagcgccggacgctggttgcgcgctcccaggcgccgagcggccccgggcacgcgcgcgcgccaccggcccggcaggtgctgtccttattcccagcccagtcaagagctaccggggctggctagtcatgggggagcccagtagagaggagtataaaatccagtcctttgatgcagagacccagcagctgctgaagacagcactcaaagccccgtctcttgaatgcacagttgcctgctttgagacagaagatggagaatattccgtttgccagaggagctatagtaattgctctcgcctgatgccttcccgctgtaacacgcagtacagagatccgggtgctgtggacttggagaaagtggccaatgtgattgtggaccattctctgcaggactgtgtgttcagcaaggaagcaggacgcatgtgctacgccatcattcaggcagagagtaaacaagcaggccagagtgtcttccgacgtggactcctcaaccggctgcagcaggagtaccaggctcgggagcagctgcgagcacgctccctgcagggctgggtctgctatgtcacctttatctgcaacatctttgactacctgagggtgaacaacatgcccatgatggccctggtgaaccctgtctatgactgcctcttccggctggcccagccagacagtttgagcaaggaggaggaggtggactgtttggtgctgcagctgcaccgggttggggagcagctggagaaaatgaatgggcagcgcatggatgagctctttgtgctgatccgggatggcttcctgctcccaactggcctcagctccctggcccagctgctgctgctggagatcattgagttccgggcggccggctggaagacaacgccagctgcccacaagtattactacagcgaagtctccgactaggcctccagatcagggcttcctcaccagcactggcctttcttctacccacctctaaagctggcagtggagtctctgcctcacccaaagacttttcccttccagactttgagtgtcttcccttctagactttcccatctcctggtgagatgtttcccacttatgccgtggtcctgccctgagcccctttccccaccacaacccaccacggccaggcagagaagggcaactcccaagagccactgcactgtgtaaccattagtgcaactactaccttggtgcctcagtttacccatctgtaaaatgggtaagcatagccactggtgggatattttgggatgtcaaggggtggaggcagagcacaagtcacaccagaaactgctttttatacattttgtataaggacaactctggaaacaagcctatttcctccagccagtttcactgaatgctgcaccacatgctacaccagttcagcgtgagaattttctaataa

SEQ ID NO: 154071 - DNA, 890 bp, Homo sapiens
  Payload ID: 10277
  Gene Symbol: MIF4GD
  Gene Name: MIF4G domain containing
  ENST ID: ENST00000579194
  CDS Start-End: 425-890
tcacccggcatcttcctgggccagcaacgtcaggccggtttatttaagcaactgtaacgtccgcccgcacacaccctgccccagtctactcctgcctcctgctgggactggagggtgggcgctttcctgcttcagcttctcgctcttgtgtaatcccacaagcgagggatttctaaactgagcagcaggtgcctggctgatgcccagtccccaccagaagccaagcctggtgggccttcagccaaccaccgcacgccacggaccgcccaggagtccctgtcccgagcgcgccgtcagccccgtccagggcctgcaggacggaacccgccctgcgctccacacctgaggccgctcccttcgcctcttctcctcaggtgctgtccttattcccagcccagtcaagagctaccggggctggctagtcatgggggagcccagtagagaggagtataaaatccagtcctttgatgcagagacccagcagctgctgaagacagcactcaaagccccgtctcttgaatgcacagttgcctgctttgagacagaagatggagaatattccgtttgccagaggagctatagtaattgctctcgcctgatgccttcccgctgtaacacgcagtacagagatccgggtgctgtggacttggagaaagtggccaatgtgattgtggaccattctctgcaggactgtgtgttcagcaaggaagcaggacgcatgtgctacgccatcattcaggcagagagtaaacaagcaggccagagtgtcttccgacgtggactcctcaaccggctgcagcaggagtaccaggctcgggagcagctgcgagcacgctccctgcagggctgggtctgctatgtcacctttatctgcaacatctttgactacc

SEQ ID NO: 154072 - DNA, 586 bp, Homo sapiens
  Payload ID: 10277
  Gene Symbol: MIF4GD
  Gene Name: MIF4G domain containing
  ENST ID: ENST00000579612
  CDS Start-End: 78-586
cacgcgcgcgcgccaccggcccggcaggtgctgtccttattcccagcccagtcaagagctaccggggctggctagtcatgggggagcccagtagagaggagtataaaatccagtcctttgatgcagagacccagcagctgctgaagacagcactcaaagttgcctgctttgagacagaagatggagaatattccgtttgccagaggagctatagtaattgctctcgcctgatgccttcccgctgtaacacgcagtacagagatccgggtgctgtggacttggagaaagtggccaatgtgattgtggaccattctctgcaggactgtgtgttcagcaaggaagcaggacgcatgtgctacgccatcattcaggtgaacaacatgcccatgatggccctggtgaaccctgtctatgactgcctcttccggctggcccagccagacagtttgagcaaggaggaggaggtgggtggccccagccctggcacaagcacagaaggctgcaggatggacagtccagctcagccgtgtgtcagcccactgctcacggaggtggactgtttggtgctgcagctgcaccgggttgg

SEQ ID NO: 154073 - DNA, 1531 bp, Homo sapiens
  Payload ID: 10277
  Gene Symbol: MIF4GD
  Gene Name: MIF4G domain containing
  Uniprot ID: A9UHW6
  ENST ID: ENST00000577542
  CDS Start-End: 264-1055
ccggcccggcaggtgggtcccggctcccacgccgcctctcccgcccgcgggaccctgggccgtgggctccgcagcccgccctgtgcctccgggaggggcgttccgggcgcggggggaacggccgagggctggagaccctaaaggcgcctcctacggccagaggggagcctccggcgggagccacctctccggggcgcatcatcctgccccccagtgctgtccttattcccagcccagtcaagagctaccggggctggctagtcatgggggagcccagtagagaggagtataaaatccagtcctttgatgcagagacccagcagctgctgaagacagcactcaaagccccgtctcttgaatgcacagttgcctgctttgagacagaagatggagaatattccgtttgccagaggagctatagtaattgctctcgcctgatgccttcccgctgtaacacgcagtacagagatccgggtgctgtggacttggagaaagtggccaatgtgattgtggaccattctctgcaggactgtgtgttcagcaaggaagcaggacgcatgtgctacgccatcattcaggcagagagtaaacaagcaggccagagtgtcttccgacgtggactcctcaaccggctgcagcaggagtaccaggctcgggagcagctgcgagcacgctccctgcagggctgggtctgctatgtcacctttatctgcaacatctttgactacctgagggtgaacaacatgcccatgatggccctggtgaaccctgtctatgactgcctcttccggctggcccagccagacagtttgagcaaggaggaggaggtggactgtttggtgctgcagctgcaccgggttggggagcagctggagaaaatgaatgggcagcgcatggatgagctctttgtgctgatccgggatggcttcctgctcccaactggcctcagctccctggcccagctgctgctgctggagatcattgagttccgggcggccggctggaagacaacgccagctgcccacaagtattactacagcgaagtctccgactaggcctccagatcagggcttcctcaccagcactggcctttcttctacccacctctaaagctggcagtggagtctctgcctcacccaaagacttttcccttccagactttgagtgtcttcccttctagactttcccatctcctggtgagatgtttcccacttatgccgtggtcctgccctgagcccctttccccaccacaacccaccacggccaggcagagaagggcaactcccaagagccactgcactgtgtaaccattagtgcaactactaccttggtgcctcagtttacccatctgtaaaatgggtaagcatagccactggtgggatattttgggatgtcaaggggtggaggcagagcacaagtcacaccagaaactgctttttatacattttgtataaggacaactctggaaacaagcctatttcctccagccagtttcactgaatgctgcaccacatgctacaccagttcagcg

SEQ ID NO: 154074 - DNA, 696 bp, Homo sapiens
  Payload ID: 10277
  Gene Symbol: MIF4GD
  Gene Name: MIF4G domain containing
  ENST ID: ENST00000581777
  CDS Start-End: 427-696
cctcacccggcatcttcctgggccagcaacgtcaggccggtttatttaagcaactgtaacgtccgcccgcacacaccctgccccagtctactcctgcctcctgctgggactggagggtgggcgctttcctgcttcagcttctcgctcttgtgtaatcccacaagcgagggatttctaaactgagcagcaggtgcctggctgatgcccagtccccaccagaagccaagcctggtgggccttcagccaaccaccgcacgccacggaccgcccaggagtccctgtcccgagcgcgccgtcagccccgtccagggcctgcaggacggaacccgccctgcgctccacacctgaggccgctcccttcgcctcttctcctcaggtgctgtccttattcccagcccagtcaagagctaccggggctggctagtcatgggggagcccagtagagaggagtataaaatccagtcctttgatgcagagacccagcagctgctgaagacagcactcaaagatccgggtgctgtggacttggagaaagtggccaatgtgattgtggaccattctctgcaggactgtgtgttcagcaaggaagcaggacgcatgtgctacgccatcattcaggcagagagtaaacaagcaggccagagtgtcttccgacgtggactcctcaaccggctgcagcaggagtaccaggctcgg

SEQ ID NO: 154075 - DNA, 856 bp, Homo sapiens
  Payload ID: 10277
  Gene Symbol: MIF4GD
  Gene Name: MIF4G domain containing
  ENST ID: ENST00000579119
  CDS Start-End: 33-788
gcccagtcaagagctaccggggctggctagtcatgggggagcccagtagagaggagtataaaatccagtcctttgatgcagagacccagcagctgctgaagacagcactcaaagatccgggtgctgtggacttggagaaagtggccaatgtgattgtggaccattctctgcaggactgtgtgttcagcaaggaagcaggacgcatgtgctacgccatcattcaggcagagagtaaacaagcaggccagagtgtcttccgacgtggactcctcaaccggctgcagcaggagtaccaggctcgggagcagctgcgagcacgctccctgcagggctgggtctgctatgtcacctttatctgcaacatctttgactacctgagggtgaacaacatgcccatgatggccctggtgaaccctgtctatgactgcctcttccggctggcccagccagacagtttgagcaaggaggaggaggtgggtggccccagccctggcacaagcacagaaggctgcaggatggacagtccagctcagccgtgtgtcagcccactgctcacggaggtggactgtttggtgctgcagctgcaccgggttggggagcagctggagaaaatgaatgggcagcgcatggatgagctctttgtgctgatccgggatggcttcctgctcccaactggcctcagctccctggcccagctgctgctgctggagatcattgagttccgggcggccggctggaagacaacgccagctgcccacaagtattactacagcgaagtctccgactaggcctccagatcagggcttcctcaccagcactggcctttcttctacccacctctaaagctggcagtgga

SEQ ID NO: 154076 - DNA, 569 bp, Homo sapiens
  Payload ID: 10277
  Gene Symbol: MIF4GD
  Gene Name: MIF4G domain containing
  ENST ID: ENST00000578305
  CDS Start-End: 108-233
gcgcgctcccaggcgccgagcggccccgggcacgcgcgcgcgccaccggcccggcaggtgctgtccttattcccagcccagtcaagagctaccggggctggctagtcatgggggagcccagtagagaggagtataaaatccagtcctttgatgcagagacccagcagctgctgaagacagcactcaaaggtgaacaacatgcccatgatggccctggtgaaccctgtctatgactgcctcttccggctggcccagccagacagtttgagcaaggaggaggaggtggactgtttggtgctgcagctgcaccgggttggggagcagctggagaaaatgaatgggcagcgcatggatgagctctttgtgctgatccgggatggcttcctgctcccaactggcctcagctccctggcccagctgctgctgctggagatcattgagttccgggcggccggctggaagacaacgccagctgcccacaagtattactacagcgaagtctccgactaggcctccagatcagggcttcctcaccagcactggcctttcttctacccacctctaaagct

SEQ ID NO: 154077 - DNA, 855 bp, Homo sapiens
  Payload ID: 10277
  Gene Symbol: MIF4GD
  Gene Name: MIF4G domain containing
  ENST ID: ENST00000580717
  CDS Start-End: 242-855
gctcccacgccgcctctcccgcccgcgggaccctgggccgtgggctccgcagcccgccctgtgcctccgggaggggcgttccgggcgcggggggaacggccgagggctggagaccctaaaggcgcctcctacggccagaggggagcctccggcgggagccacctctccggggcgcatcatcctgccccccagtgctgtccttattcccagcccagtcaagagctaccggggctggctagtcatgggggagcccagtagagaggagtataaaatccagtcctttgatgcagagacccagcagctgctgaagacagcactcaaagatccgggtgctgtggacttggagaaagtggccaatgtgattgtggaccattctctgcaggactgtgtgttcagcaaggaagcaggacgcatgtgctacgccatcattcaggcagagagtaaacaagcaggccagagtgtcttccgacgtggactcctcaaccggctgcagcaggagtaccaggctcgggagcagctgcgagcacgctccctgcagggctgggtctgctatgtcacctttatctgcaacatctttgactacctgagggtgaacaacatgcccatgatggccctggtgaaccctgtctatgactgcctcttccggctggcccagccagacagtttgagcaaggaggaggaggtggactgtttggtgctgcagctgcaccgggttggggagcagctggagaaaatgaatgggcagcgcatggatgagctctttgtgctgatccgggatggcttcctgctcccaactggcctcagctccctggcccagctgctgctgctggagatcattgagttccgggcggccgg

SEQ ID NO: 154078 - DNA, 1230 bp, Homo sapiens
  Payload ID: 10277
  Gene Symbol: MIF4GD
  Gene Name: MIF4G domain containing
  Uniprot ID: A9UHW6
  ENST ID: ENST00000618645
  CDS Start-End: 54-722
caggtgctgtccttattcccagcccagtcaagagctaccggggctggctagtcatgggggagcccagtagagaggagtataaaatccagtcctttgatgcagagacccagcagctgctgaagacagcactcaaagatccgggtgctgtggacttggagaaagtggccaatgtgattgtggaccattctctgcaggactgtgtgttcagcaaggaagcaggacgcatgtgctacgccatcattcaggcagagagtaaacaagcaggccagagtgtcttccgacgtggactcctcaaccggctgcagcaggagtaccaggctcgggagcagctgcgagcacgctccctgcagggctgggtctgctatgtcacctttatctgcaacatctttgactacctgagggtgaacaacatgcccatgatggccctggtgaaccctgtctatgactgcctcttccggctggcccagccagacagtttgagcaaggaggaggaggtggactgtttggtgctgcagctgcaccgggttggggagcagctggagaaaatgaatgggcagcgcatggatgagctctttgtgctgatccgggatggcttcctgctcccaactggcctcagctccctggcccagctgctgctgctggagatcattgagttccgggcggccggctggaagacaacgccagctgcccacaagtattactacagcgaagtctccgactaggcctccagatcagggcttcctcaccagcactggcctttcttctacccacctctaaagctggcagtggagtctctgcctcacccaaagacttttcccttccagactttgagtgtcttcccttctagactttcccatctcctggtgagatgtttcccacttatgccgtggtcctgccctgagcccctttccccaccacaacccaccacggccaggcagagaagggcaactcccaagagccactgcactgtgtaaccattagtgcaactactaccttggtgcctcagtttacccatctgtaaaatgggtaagcatagccactggtgggatattttgggatgtcaaggggtggaggcagagcacaagtcacaccagaaactgctttttatacattttgtataaggacaactctggaaacaagcctatttcctccagccagtttcactgaatgctgcaccacatgctacaccagttcagcgtgagaattttctaataaatcttttctgatact

SEQ ID NO: 154079 - DNA, 1006 bp, Homo sapiens
  Payload ID: 10278
  Gene Symbol: MIEN1
  Gene Name: migration and invasion enhancer 1
  Uniprot ID: Q9BRT3
  ENST ID: ENST00000394231
  CDS Start-End: 293-640
cattagagtaaatgaagccatgaagtccagcggacaccgggagtggggagtggggaagcccggcactccgggagaccgggccagggaaggagggtctggaccggacccagcccctgcccggggagcgagctccggagctgccctacgaggtcaaaacgtagcagtggcggagacccgcagggggcgcccgaacgccaccctcggcccctccccgctccagaggccccgccccgtcacgtgcccgcggttcgcgtcacacccggaagcaggggcccgagcggagccggccgcgatgagcggggagccggggcagacgtccgtagcgccccctcccgaggaggtcgagccgggcagtggggtccgcatcgtggtggagtactgtgaaccctgcggcttcgaggcgacctacctggagctggccagtgctgtgaaggagcagtatccgggcatcgagatcgagtcgcgcctcgggggcacaggtgcctttgagatagagataaatggacagctggtgttctccaagctggagaatgggggctttccctatgagaaagatctcattgaggccatccgaagagccagtaatggagaaaccctagaaaagatcaccaacagccgtcctccctgcgtcatcctgtgactgcacaggactctgggttcctgctctgttctggggtccaaaccttggtctccctttggtcctgctgggagctccccctgcctctttcccctacttagctccttagcaaagagaccctggcctccactttgccctttgggtacaaagaaggaatagaagattccgtggccttgggggcaggagagagacactctccatgaacacttctccagccacctcatacccccttcccagggtaagtgcccacgaaagcccagtccactcttcgcctcggtaatacctgtctgatgccacagattttatttattctcccctaacccagggcaatgtcagctattggcagtaaagtggcgctacaaacactaa

SEQ ID NO: 154080 - DNA, 806 bp, Homo sapiens
  Payload ID: 10278
  Gene Symbol: MIEN1
  Gene Name: migration and invasion enhancer 1
  ENST ID: ENST00000577810
  CDS Start-End: 16-366
gcggagccggccgcgatgagcggggagccggggcagacgtccgtagcgccccctcccgaggaggtcgagccgggcagtggggtccgcatcgtggtggagtactgtgaaccctgcggcttcgaggcgacctacctggagctggccagtgctgtgaaggagcagtatccgggcatcgagatcgagtcgcgcctcgggggcacaggtgcctttgagatagagataaatggacagctggtgttctccaagctggagaatgggggctttccctatgagaaagatgtgagtatttacagcgttgggaggacctcttggtcaccctaccccaacagtgcatcatcctgtcattccactcctctagctcattgaggccatccgaagagccagtaatggagaaaccctagaaaagatcaccaacagccgtcctccctgcgtcatcctgtgactgcacaggactctgggttcctgctctgttctggggtccaaaccttggtctccctttggtcctgctgggagctccccctgcctctttcccctacttagctccttagcaaagagaccctggcctccactttgccctttgggtacaaagaaggaatagaagattccgtggccttgggggcaggagagagacactctccatgaacacttctccagccacctcatacccccttcccagggtaagtgcccacgaaagcccagtccactcttcgcctcggtaatacctgtctgatgccacagattttatttattctcccctaacccagggcaatgtcagctattggcagtaaagtggcgctacaaacact

SEQ ID NO: 154081 - DNA, 1573 bp, Homo sapiens
  Payload ID: 10279
  Gene Symbol: MIIP
  Gene Name: migration and invasion inhibitory protein
  Uniprot ID: Q5JXC2
  ENST ID: ENST00000235332
  CDS Start-End: 170-1336
gaccaatcaagacggccggccgaggcccctggaacggctcaggcggctgcggctgctacggcggcgcatgctaggggattctgccgggtagaagagctgggcctggaacccagccctgaggacatcctgcggcccaggggcaagtgacacctgctgagagaggcccaggatggtggaggctgaggaactggcacagctgcggctgctcaatctggagctcctgaggcagctgtgggtggggcaggatgctgtgcggcggtcagtggccagggcagcctcggagtcaagcctggaatccagcagcagctacaactcagagactccatcgaccccagagacgtcctcaacttccttgagcacctcctgcccacggggccggtcctccgtgtggggcccaccagatgcctgtcgaggggacctccgtgatgtggccagatcgggggtggcctctctcccacctgccaaatgccagcaccaggagtccctgggccgaccgagaccccactcagcaccctcgctgggcacctcaagcctgagggacccagagccctcagggaggctgggtgatccaggaccccaggaggcacagaccccgaggtccatcctggctcaacagagcaagctgtccaagcccagggtgaccttctctgaggagtctgcagttcctaagaggagctggcgcctcaggccatacctgggctatgactggattgcagggtctctggacaccagctcttccatcaccagccagcctgaggccttcttctccaagctgcaggagtttcgggaaaccaacaaggaggagtgtatctgcagccatcctgaaccccagttgccaggcctgcgtgagagcagtggcagcggcgtggaggaagaccatgaatgcgtgtactgttaccgtgtcaaccggcgcctgttcccggtgcctgtggatcccggtaccccctgccgcctgtgcaggacaccgcgagaccagcagggccctgggaccctggcgcagccagcgcacgtcagggtgagcatcccgctgtcgatcctggagcccccgcaccggtaccacatccaccggcgaaagagctttgacgcctctgacacactggccctgccccggcactgcctgctgggctgggacatttttcctccgaagtctgagaaaagctcagcccccaggaacctggacctctggtcctctgtctccgctgaggcccagcaccagaagctgtccggcaccagcagcccttttcacccggcctcaccaatgcagatgctgcccccgaccccgacctggtcagtgccccaggtccctcggccccacgtcccacggcagaagccctgaggactgactcctgggggagaacagcattcccgccgcctccagcctctcccctctggcaggcgcacccaggagatggaatcccctgcccgcccagctcaggcccagctgtcctaggttgggcaggtgggtggacccaagcttgtctgctgcctgagttccagagagggaggaccctggggtggagggtgagggattctgtggaagtttgtaaataaagctcagtgctctgcagctcaa

SEQ ID NO: 154082 - DNA, 1937 bp, Homo sapiens
  Payload ID: 10280
  Gene Symbol: MFGE8
  Gene Name: milk fat globule-EGF factor 8 protein
  Uniprot ID: Q08431
  ENST ID: ENST00000268150
  CDS Start-End: 93-1256
tgatttattccggtcccagaggagaaggcgccagaaccccgcggggtctgagcagcccagcgtgcccattccagcgcccgcgtccccgcagcatgccgcgcccccgcctgctggccgcgctgtgcggcgcgctgctctgcgcccccagcctcctcgtcgccctggatatctgttccaaaaacccctgccacaacggtggtttatgcgaggagatttcccaagaagtgcgaggagatgtcttcccctcgtacacctgcacgtgccttaagggctacgcgggcaaccactgtgagacgaaatgtgtcgagccactgggcctggagaatgggaacattgccaactcacagatcgccgcctcgtctgtgcgtgtgaccttcttgggtttgcagcattgggtcccggagctggcccgcctgaaccgcgcaggcatggtcaatgcctggacacccagcagcaatgacgataacccctggatccaggtgaacctgctgcggaggatgtgggtaacaggtgtggtgacgcagggtgccagccgcttggccagtcatgagtacctgaaggccttcaaggtggcctacagccttaatggacacgaattcgatttcatccatgatgttaataaaaaacacaaggagtttgtgggtaactggaacaaaaacgcggtgcatgtcaacctgtttgagacccctgtggaggctcagtacgtgagattgtaccccacgagctgccacacggcctgcactctgcgctttgagctactgggctgtgagctgaacggatgcgccaatcccctgggcctgaagaataacagcatccctgacaagcagatcacggcctccagcagctacaagacctggggcttgcatctcttcagctggaacccctcctatgcacggctggacaagcagggcaacttcaacgcctgggttgcggggagctacggtaacgatcagtggctgcaggtggacctgggctcctcgaaggaggtgacaggcatcatcacccagggggcccgtaactttggctctgtccagtttgtggcatcctacaaggttgcctacagtaatgacagtgcgaactggactgagtaccaggaccccaggactggcagcagtaagatcttccctggcaactgggacaaccactcccacaagaagaacttgtttgagacgcccatcctggctcgctatgtgcgcatcctgcctgtagcctggcacaaccgcatcgccctgcgcctggagctgctgggctgttagtggccacctgccacccccaggtcttcctgctttccatgggcccgctgcctcttggcttctcagcccctttaaatcaccatagggctggggactggggaaggggagggtgttcagaggcagcaccaccacacagtcacccctccctccctctttcccaccctccacctctcacgggccctgccccagcccctaagccccgtcccctaacccccagtcctcactgtcctgttttcttaggcactgagggatctgagtaggtctgggatggacaggaaagggcaaagtagggcgtgtggtttccctgcccctgtccggaccgccgatcccaggtgcgtgtgtctctgtctctcctagcccctctctcacacatcacattcccatggtggcctcaagaaaggcccggaagcgccaggctggagataacagcctcttgcccgtcggccctgcgtcggccctggggtaccatgtggccacaactgctgtggccccctgtccccaagacacttccccttgtctccctggttgcctctcttgccccttgtcctgaagcccagcgacacagaagggggtggggcgggtctatggggagaaagggagcgaggtcagaggagggcatgggttggcagggtgggcgtttggggccctctatgctggcttttcaccccagaggacacaggcagc

SEQ ID NO: 154083 - DNA, 1752 bp, Homo sapiens
  Payload ID: 10280
  Gene Symbol: MFGE8
  Gene Name: milk fat globule-EGF factor 8 protein
  ENST ID: ENST00000268151
  CDS Start-End: 63-1070
ccagaaccccgcggggtctgagcagcccagcgtgcccattccagcgcccgcgtccccgcagcatgccgcgcccccgcctgctggccgcgctgtgcggcgcgctgctctgcgcccccagcctcctcgtcgccctggatatctgttccaaaaacccctgccacaacggtggtttatgcgaggagatttcccaagaagtgcgaggagatgtcttcccctcgtacacctgcacgtgccttaagggctacgcgggcaaccactgtgagacgaaatgtgtcgagccactgggcctggagaatgggaacattgccaactcacagatcgccgcctcgtctgtgcgtgtgaccttcttgggtttgcagcattgggtcccggagctggcccgcctgaaccgcgcaggcatggtcaatgcctggacacccagcagcaatgacgataacccctggatccaggtgaacctgctgcggaggatgtgggtaacaggtgtggtgacgcagggtgccagccgcttggccagtcatgagtacctgaaggccttcaaggtggcctacagccttaatggacacgaattcgatttcatccatgatgttaataaaaaacacaaggagtttgtgggtaactggaacaaaaacgcggtgcatgtcaacctgtttgagacccctgtggaggctcagtacgtgagattgtaccccacgagctgccacacggcctgcactctgcgctttgagctactgggctgtgagctgaacggatgcgccaatcccctgggcctgaagaataacagcatccctgacaagcagatcacggcctccagcagctacaagacctggggcttgcatctcttcagctggaacccctcctatgcacggctggacaagcagggcaacttcaacgcctgggttgcggggagctacggtaacgatcagtggctgcagatcttccctggcaactgggacaaccactcccacaagaagaacttgtttgagacgcccatcctggctcgctatgtgcgcatcctgcctgtagcctggcacaaccgcatcgccctgcgcctggagctgctgggctgttagtggccacctgccacccccaggtcttcctgctttccatgggcccgctgcctcttggcttctcagcccctttaaatcaccatagggctggggactggggaaggggagggtgttcagaggcagcaccaccacacagtcacccctccctccctctttcccaccctccacctctcacgggccctgccccagcccctaagccccgtcccctaacccccagtcctcactgtcctgttttcttaggcactgagggatctgagtaggtctgggatggacaggaaagggcaaagtagggcgtgtggtttccctgcccctgtccggaccgccgatcccaggtgcgtgtgtctctgtctctcctagcccctctctcacacatcacattcccatggtggcctcaagaaaggcccggaagcgccaggctggagataacagcctcttgcccgtcggccctgcgtcggccctggggtaccatgtggccacaactgctgtggccccctgtccccaagacacttccccttgtctccctggttgcctctcttgccccttgtcctgaagcccagcgacacagaagggggtggggcgggtctatggggagaaagggagcgaggtcagaggagggcatgggttggcagggtgggcgtttggggccctctatgctggcttttcaccccagaggacacaggcagct

SEQ ID NO: 154084 - DNA, 1172 bp, Homo sapiens
  Payload ID: 10280
  Gene Symbol: MFGE8
  Gene Name: milk fat globule-EGF factor 8 protein
  ENST ID: ENST00000542878
  CDS Start-End: 61-1092
agaaccccgcggggtctgagcagcccagcgtgcccattccagcgcccgcgtccccgcagcatgccgcgcccccgcctgctggccgcgctgtgcggcgcgctgctctgcgcccccagcctcctcgtcgccctggaatgtgtcgagccactgggcctggagaatgggaacattgccaactcacagatcgccgcctcgtctgtgcgtgtgaccttcttgggtttgcagcattgggtcccggagctggcccgcctgaaccgcgcaggcatggtcaatgcctggacacccagcagcaatgacgataacccctggatccaggtgaacctgctgcggaggatgtgggtaacaggtgtggtgacgcagggtgccagccgcttggccagtcatgagtacctgaaggccttcaaggtggcctacagccttaatggacacgaattcgatttcatccatgatgttaataaaaaacacaaggagtttgtgggtaactggaacaaaaacgcggtgcatgtcaacctgtttgagacccctgtggaggctcagtacgtgagattgtaccccacgagctgccacacggcctgcactctgcgctttgagctactgggctgtgagctgaacggatgcgccaatcccctgggcctgaagaataacagcatccctgacaagcagatcacggcctccagcagctacaagacctggggcttgcatctcttcagctggaacccctcctatgcacggctggacaagcagggcaacttcaacgcctgggttgcggggagctacggtaacgatcagtggctgcaggtggacctgggctcctcgaaggaggtgacaggcatcatcacccagggggcccgtaactttggctctgtccagtttgtggcatcctacaaggttgcctacagtaatgacagtgcgaactggactgagtaccaggaccccaggactggcagcagtaagatcttccctggcaactgggacaaccactcccacaagaagaacttgtttgagacgcccatcctggctcgctatgtgcgcatcctgcctgtagcctggcacaaccgcatcgccctgcgcctggagctgctgggctgttagtggccacctgccacccccaggtcttcctgctttccatgggcccgctgcctcttggcttctcagcccctttaaatcaccat

SEQ ID NO: 154085 - DNA, 1989 bp, Homo sapiens
  Payload ID: 10280
  Gene Symbol: MFGE8
  Gene Name: milk fat globule-EGF factor 8 protein
  ENST ID: ENST00000558018
  CDS Start-End: 61-138
agaaccccgcggggtctgagcagcccagcgtgcccattccagcgcccgcgtccccgcagcatgccgcgcccccgcctgctggccgcgctgtgcggcgcgctgctctgcgcccccagcctcctcgtcgccctggggtgatgtggccttttccagaaggaggaaacaccatacctatcttacacacagatatctgttccaaaaacccctgccacaacggtggtttatgcgaggagatttcccaagaagtgcgaggagatgtcttcccctcgtacacctgcacgtgccttaagggctacgcgggcaaccactgtgagacgaaatgtgtcgagccactgggcctggagaatgggaacattgccaactcacagatcgccgcctcgtctgtgcgtgtgaccttcttgggtttgcagcattgggtcccggagctggcccgcctgaaccgcgcaggcatggtcaatgcctggacacccagcagcaatgacgataacccctggatccaggtgaacctgctgcggaggatgtgggtaacaggtgtggtgacgcagggtgccagccgcttggccagtcatgagtacctgaaggccttcaaggtggcctacagccttaatggacacgaattcgatttcatccatgatgttaataaaaaacacaaggagtttgtgggtaactggaacaaaaacgcggtgcatgtcaacctgtttgagacccctgtggaggctcagtacgtgagattgtaccccacgagctgccacacggcctgcactctgcgctttgagctactgggctgtgagctgaacggatgcgccaatcccctgggcctgaagaataacagcatccctgacaagcagatcacggcctccagcagctacaagacctggggcttgcatctcttcagctggaacccctcctatgcacggctggacaagcagggcaacttcaacgcctgggttgcggggagctacggtaacgatcagtggctgcaggtggacctgggctcctcgaaggaggtgacaggcatcatcacccagggggcccgtaactttggctctgtccagtttgtggcatcctacaaggttgcctacagtaatgacagtgcgaactggactgagtaccaggaccccaggactggcagcagtaagatcttccctggcaactgggacaaccactcccacaagaagaacttgtttgagacgcccatcctggctcgctatgtgcgcatcctgcctgtagcctggcacaaccgcatcgccctgcgcctggagctgctgggctgttagtggccacctgccacccccaggtcttcctgctttccatgggcccgctgcctcttggcttctcagcccctttaaatcaccatagggctggggactggggaaggggagggtgttcagaggcagcaccaccacacagtcacccctccctccctctttcccaccctccacctctcacgggccctgccccagcccctaagccccgtcccctaacccccagtcctcactgtcctgttttcttaggcactgagggatctgagtaggtctgggatggacaggaaagggcaaagtagggcgtgtggtttccctgcccctgtccggaccgccgatcccaggtgcgtgtgtctctgtctctcctagcccctctctcacacatcacattcccatggtggcctcaagaaaggcccggaagcgccaggctggagataacagcctcttgcccgtcggccctgcgtcggccctggggtaccatgtggccacaactgctgtggccccctgtccccaagacacttccccttgtctccctggttgcctctcttgccccttgtcctgaagcccagcgacacagaagggggtggggcgggtctatggggagaaagggagcgaggtcagaggagggcatgggttggcagggtgggcgtttggggccctctatgctggcttttcaccccagaggacacaggcagcttccaaaatatatttatcttcttcacgggaa

SEQ ID NO: 154086 - DNA, 849 bp, Homo sapiens
  Payload ID: 10280
  Gene Symbol: MFGE8
  Gene Name: milk fat globule-EGF factor 8 protein
  ENST ID: ENST00000558029
  CDS Start-End: 44-849
gagcagcccagcgtgcccattccagcgcccgcgtccccgcagcatgccgcgcccccgcctgctggccgcgctgtgcggcgcgctgctctgcgcccccagcctcctcgtcgccctggatatctgttccaaaaacccctgccacaacggtggtttatgcgaggagatttcccaagaagtgcgaggagatgtcttcccctcgtacacctgcacgtgccttaagggctacgcgggcaaccactgtgagacgaaatgtgtcgagccactgggcctggagaatgggaacattgccaactcacagatcgccgcctcgtctgtgcgtgtgaccttcttgggtttgcagcattgggtcccggagctggcccgcctgaaccgcgcaggcatggtcaatgcctggacacccagcagcaatgacgataacccctggatccaggtgaacctgctgcggaggatgtgggtaacaggtgtggtgacgcagggtgccagccgcttggccagtcatgagtacctgaaggccttcaaggtggcctacagccttaatggacacgaattcgatttcatccatgatgttaataaaaaacacaaggagtttgtgggtaactggaacaaaaacgcggtgcatgtcaacctgtttgagacccctgtggaggctcagtacgtgagattgtaccccacgagctgccacacggcctgcactctgcgctttgagctactgggctgtgagctgaacgcagctacaagacctggggcttgcatctcttcagctggaacccctcctatgcacggctggacaagcagggcaacttcaacgcctgggttgcggggagctacggtaacgatcagtggctgcag

SEQ ID NO: 154087 - DNA, 1689 bp, Homo sapiens
  Payload ID: 10280
  Gene Symbol: MFGE8
  Gene Name: milk fat globule-EGF factor 8 protein
  Uniprot ID: Q08431
  ENST ID: ENST00000566497
  CDS Start-End: 63-1226
ccagaaccccgcggggtctgagcagcccagcgtgcccattccagcgcccgcgtccccgcagcatgccgcgcccccgcctgctggccgcgctgtgcggcgcgctgctctgcgcccccagcctcctcgtcgccctggatatctgttccaaaaacccctgccacaacggtggtttatgcgaggagatttcccaagaagtgcgaggagatgtcttcccctcgtacacctgcacgtgccttaagggctacgcgggcaaccactgtgagacgaaatgtgtcgagccactgggcctggagaatgggaacattgccaactcacagatcgccgcctcgtctgtgcgtgtgaccttcttgggtttgcagcattgggtcccggagctggcccgcctgaaccgcgcaggcatggtcaatgcctggacacccagcagcaatgacgataacccctggatccaggtgaacctgctgcggaggatgtgggtaacaggtgtggtgacgcagggtgccagccgcttggccagtcatgagtacctgaaggccttcaaggtggcctacagccttaatggacacgaattcgatttcatccatgatgttaataaaaaacacaaggagtttgtgggtaactggaacaaaaacgcggtgcatgtcaacctgtttgagacccctgtggaggctcagtacgtgagattgtaccccacgagctgccacacggcctgcactctgcgctttgagctactgggctgtgagctgaacggatgcgccaatcccctgggcctgaagaataacagcatccctgacaagcagatcacggcctccagcagctacaagacctggggcttgcatctcttcagctggaacccctcctatgcacggctggacaagcagggcaacttcaacgcctgggttgcggggagctacggtaacgatcagtggctgcaggtggacctgggctcctcgaaggaggtgacaggcatcatcacccagggggcccgtaactttggctctgtccagtttgtggcatcctacaaggttgcctacagtaatgacagtgcgaactggactgagtaccaggaccccaggactggcagcagtaagatcttccctggcaactgggacaaccactcccacaagaagaacttgtttgagacgcccatcctggctcgctatgtgcgcatcctgcctgtagcctggcacaaccgcatcgccctgcgcctggagctgctgggctgttagtggccacctgccacccccaggcactgagggatctgagtaggtctgggatggacaggaaagggcaaagtagggcgtgtggtttccctgcccctgtccggaccgccgatcccaggtgcgtgtgtctctgtctctcctagcccctctctcacacatcacattcccatggtggcctcaagaaaggcccggaagcgccaggctggagataacagcctcttgcccgtcggccctgcgtcggccctggggtaccatgtggccacaactgctgtggccccctgtccccaagacacttccccttgtctccctggttgcctctcttgccccttgtcctgaagcccagcgacacagaagggggtggggcgggtctatggggagaaagggagcgaggtcagaggagggcatgggttggcagggtgggcgtttggggccctctatgctggcttttcaccccagaggacacaggcag

SEQ ID NO: 154088 - DNA, 456 bp, Homo sapiens
  Payload ID: 10280
  Gene Symbol: MFGE8
  Gene Name: milk fat globule-EGF factor 8 protein
  ENST ID: ENST00000613965
  CDS Start-End: 1-228
ttcgatttcatccatgatgttaataaaaaacacaaggagtttgtgggtaactggaacaaaaacgcggtgcatgtcaacctgtttgagacccctgtggaggctcagtacgtgagattgtaccccacgagctgccacacggcctgcactctgcgctttgagctactgggctgtgagctgaacgcaaggaaggcagacttgaggcgaggagcagatgacagagagcagtaacagctctgaagaaaagctagaggctgatgagatgaccatgacttggggtgaggggagagagcaagacaaggactgctctgtcgggaaggcctttgactgggggcctgaatgatggagagccagccacatgaaaaacttaaaaacagcactgcaaaaagagcactgcaggcaaggaattggttaaatgactgaagtaagcactgaataaacaatgtggttgttattaaa

SEQ ID NO: 154089 - DNA, 9576 bp, Homo sapiens
  Payload ID: 10281
  Gene Symbol: MIB1
  Gene Name: mindbomb E3 ubiquitin protein ligase 1
  Uniprot ID: Q86YT6
  ENST ID: ENST00000261537
  CDS Start-End: 265-3285
tgcccgctctccgccgccgcctccgagcagccgcgggccgccctccactccgagcggggggcgcggcggcgacagctgggcagcggctttgggctccgcggggaccgcgccgccgcccccgtgagttattctcacgtcccccggggctcgctgccgcccccgccgacgcctagagtccggcccgggcccaactccctcacgggccccccggcggcagcggcggcggcggcggcggcagcggcggagcccaccgcccgggccccgatgagtaactcccggaataaccgggtgatggtggaaggggttggcgctcgggtagtgcgcggcccggactggaagtgggggaagcaggacggcggcgagggccatgtgggcaccgtccggagcttcgagagccccgaggaggtggtggtagtgtgggacaacggcacagctgccaactaccgctgctccggggcttacgacctccgcatcctggacagcgcgcccaccggcatcaagcatgatggaaccatgtgtgatacctgccgccagcaaccaatcattggcattcgatggaagtgtgcagagtgtacaaattatgatttgtgcacagtgtgttatcatggagataaacatcatttaagacatcgcttttaccgaattactacaccgggaagtgagagggttctgttagagtctcgtaggaaatctaagaagattacagccagaggaatctttgcaggtgccagagtggtgcgaggagtggactggcagtgggaagatcaagatggaggaaatggacgtaggggaaaggtaacagaaatccaggactggagtgcatcaagcccacatagcgcagcatatgtcctctgggataatggtgctaagaacctttacagagttggctttgagggcatgtctgatctgaaatgtgtccaggatgccaagggaggttctttctacagagatcactgccctgtgctaggtgagcagaatggcaacaggaatcctggtggattgcagattggtgacctggtaaatatagatctcgacctcgaaattgtacagtctttgcagcatggtcatggaggatggactgatggaatgtttgagactttaactacaactggaactgtttgtggcattgatgaagatcatgacattgtagtacagtatccaagtggcaataggtggaccttcaatcctgctgttctcactaaagcgaacattgtccgaagtggagatgctgctcagggtgcagaaggaggcacctcgcagtttcaagtgggtgatcttgtacaagtttgttatgacctggaacgaattaaacttctacaaagaggacatggagaatgggctgaagcgatgcttccaactttaggtaaagttggccgagtacaacagatttattcagacagtgatttaaaggtggaagtttgtggaacatcttggacatacaatccagcagcagtttccaaggtggcatctgcaggatcagccattagcaatgcatctggtgaaagactctcacaactcctgaagaaattatttgaaacccaagaatctggtgacctcaatgaagaattagttaaggctgctgccaatggagatgttgctaaagtggaagatttgcttaaaagaccagatgtggatgtaaatgggcaatgtgctggccacacagctatgcaagctgctagtcagaatggacatgttgacattttgaagttacttttgaagcaaaacgtggatgtcgaagcagaggataaagatggtgatagagcagttcaccatgcagcttttggagatgaaggcgctgttatagaagtactacatcgaggtagtgctgatttgaatgctcgaaacaagcgccgacagacaccacttcatattgctgtcaataaaggtcatcttcaagttgtgaagactttattggactttggctgtcatcccagtctccaggattctgaaggtgatacccctcttcatgatgcaataagtaagaaacgtgatgatatcctagcagttcttttggaagctggagcagatgttaccatcacaaacaataatggatttaatgctctgcatcatgctgcactaaggggaaatcccagtgcaatgcgtgttttactatctaaattaccaagaccatggattgtggatgagaagaaagatgatggttatactgccttacatctggctgcccttaataatcacgtagaagtggctgaactgttggtacatcagggtaatgcaaacctggatatccagaatgtgaaccaacaaactgccctacaccttgctgttgaacgacagcatacccagattgttaggcttttggtccgtgcaggtgccaagcttgatattcaggataaggatggggatactcctttgcatgaagctctaaggcatcacactttgtctcagctacgtcagctccaagatatgcaagatgtggggaaggtggatgctgcctgggagccatccaaaaacacgttaataatgggacttggtacccagggggcagagaagaagagtgcagcatctattgcctgtttcttggcagccaatggtgctgacctgagcattcgaaataagaagggtcaatcgccacttgatctctgtcctgatccgaatctctgcaaagcactggcaaagtgtcataaggaaaaagtcagtggtcaagtgggttctcggagtccttctatgattagtaatgattctgaaaccttagaagagtgtatggtgtgctcagatatgaagagagatactctttttggtccatgtggacatattgctacctgttctttatgttctccacgtgtcaagaaatgcctcatctgtaaagaacaggttcaatccaggacaaagattgaagaatgtgtggtatgctctgacaagaaagcagctgttctttttcaaccctgtggccacatgtgtgcttgtgagaactgtgctaacctgatgaaaaagtgtgtgcagtgtcgagcagtagttgaacgaagagtgcctttcattatgtgctgtggagggaaaagttcagaagatgccactgatgatatctcaagtgggaatattccagtattacaaaaggacaaggataataccaatgtcaatgcagatgtgcaaaagttgcagcaacagttacaagacattaaagagcagacaatgtgccctgtgtgtctagatcgtctgaagaatatgattttcctttgtggtcacggaacctgtcaactctgtggagaccgcatgagtgaatgtcctatctgtcgcaaggctattgaacgaaggattcttttgtattaactaagacacatggtgtattttgttagctaatgtatctagtcatgagatcttaataggcttttgatctagttggaagttctgatgagttaatttctaatatcatagtttctttactagagtataattgggctgtaaatgtaccagaacaaaaaaccctacaaaatggtgttggaaattgtgttttttgtttttgttttaaatttgaaacatcaaattcatgtaactcataggataatttacctttggcttctaagaggaaagtcctttaaggatatccttttttaaaaaattgcatttttctcttataatttgtaaatttgttggatctcaaaagacataattctttgtgatcagttatccttcatttcatcgtggttttacacagtgagttgataacaggttctctgagaagtcatgcatcaaataaaagaggcaggtcaaacaattatgtcacatggtaaattataaaatgacagtacaagttccagatagttaagggaataccgaagggatgattctttttttaagataacaggaagttacccacatgtttgtttctgaattcttagagtaaatggaagcatagaatgagggaataatgactttgcatttctcttgttttctagattcaaaaggaacattgtttaacttgaatcagattaccagtttcaaggtgactgatagacaagaaaaggaaaaataagcaataatagtgggcaactgaagagaaaaaaaaaacgagtatctattaactggccactaacagttgcctttcttacattaatttatacactattttgttcagccagtgtttttaaaaaaaatctatgaaaagtgtacttccggttttctgtgattacttatctgggcttgatctgaccagtgaaatgacattgccctatttggacctctgaggttctatttagctttgcagatgtacatagtatcccagtgatctgcaaaattaatgccttttccaagaaaaaatcttttcttctctgtatcagttaattctgacagtgttagtgattctgtcttcattataggccttatttccattatctctttctttatagtattttttgttataaagaaaacagtctttctgtgtatacctacggatgagggtattatttaaactgccaacaatatccaagacatggtcaataacctaattataaatactttagaaagagtgaccaggacatgtatagaaatgtctgcttacctgtagactttaaaaacaaacaaaatttttggagcatttaatcattttttttctccttttatctcctttgtaatcttattgtctcctgagtaaatatacacataaatgtttggggattcattgctgctagattatatcaggtgtttacatagtgtctactatatgctgttgataagctttttcctaaaaatagttatcctcttttgtagtttttttccctcctttaaatctggctagcttttcttacttcagtttttatagaacaccaactaaatttgaaagtatgaagtctctagccctcttacactgtttctggctgtttaatccttgctgcctttgcaagtcctggtgaaagcaatggggagctttgctggctggttttgtagtctcaacaattccatgtctgtgtttagctgagtaactgctatcatttagaacagtaaaatttttatagatttcaaatttgaaaattcatgtacactcagttatctaataaggggccaccgacgctgtttttaaaactattttgaagttataaaaaggtagaacatctgactgatgatgttcacataaagagacagacagactatcatgttgcagacatgaaaacagcatgtcaggtttttcctttccttccatgccatgggctacccatctcttcccactagatcacctggtgaggagggagcacctggctgactcatgcagagtttggccaatcagagaattgtgtggtctccagctctactttccttaaacaaatcctttctgttttctgagctgcagtgctaaaacagatccctaaaaggtaatagcatcttccagactagtttaattatttcctttataagaatatgacataaatttttattatagaaataatgtcattataattttagtgctagtacttgtgggttttctgtatttgtatcaccttgaaatttgttccatgaatagaaaatacttctttattcatgttttcaatcacttagaattattttaaatttattttgggtttgtgagagataataagattaagaacttcatcatttcagtgactttcctccaactctctgaatctgctacctcttattatatgtcccttagcagtacttttccagttaggttcgttaccctgctcattagctaaacctctttatcttgtgcctcaaaagagcttttacttttcttagaaacatttataaaaaagaaaaaaactgacacgcattcattcaaaaaagtatttattgggctttagggattagatacacaacagtggaaaaatggcatcttagcacactcagaatttattgtgcagcagttgtgtattttaaggaatctgtagttaaaaggaagagatccaaaggtcctgataacatttcctaacgtttcagaagagttgtcattgagtagtgtttggatttcctctctgtatccctcaccctaccattttctcctttattcttctaagattgttagcgttgttactcaaaacatacacatacaacataccagatggtgctgttctaatggtatttgttcacgtaatttaacgttcttactgcttatactatatacatatttaattttgttgggagcaagaaggttttcaagaaaagataattttgtattagtgtaggaatatattagacaaatgtttagttggtcaaattatgcataagatatttgtaactttaaacattgcaaattgaccagctagctatggaagcataaaattaattgataattaatgttggaaatacatttctaaaatttatatttttatggtgttagcctgtaagagcattttagcatattgaaatgcatgctgcttaagatgtgtctggttcaaatatcaaaacttgctgggtcatttttacatagtagaaacatactgtctatgtgttgcccaattgctgtttgtccactctgaattctggaccctttttggactaagaattagttaaattcatgaactaagagaattagagatggggtagagtaggatcaggacagtggggttacaacagataggaaaggaaagtcagcatttgagtgtagagaaaaaaagaggatcatacagatgtcatcaaattataggctttaatacaggttgctttttttaatccaaaaggaaaagcacttatcctatcagaatgtctaccatgttttatagtaataatttgtgtaaaaaattgaatttttgaatagttttttgtattttttgtgatgaaaaactcataacataaaatttaccatattaactgtttctaaagaatacagttcagccatgtgaagtacatttacactgttgtgaagcagatctccagaactttttcatcttgcaaaactgaaactccatacccattaaacaactcccctttttgttttctcctcagtggaatagaattttgactccatataaatcaagaaacacctaaattctttagttgtttgtgtttgcaagatctaaggtcatggtaaacattaagttcttaaaatttttgggagggacagtgcacctctcctctgaattgttagcaattaaattgagtaggttttaaatgtctattcattggaagggtttgttatttcattttgagccagaggggagaggcacattttaaatatcagaattagattagctttgagtttgtacaattgggaacataatagattttcataaattatgtgtgccttgttggaagtgtcaactgtctttatgtctgcttgtaaaagtttcaaaatatgttttccctcaaaaaggcaacgttacttcatttgcttgaatattatgataggaatgcttactgatattacttgatagtcatatatagcctaggaaatttaacatatatataactatagcagtattaataatgatagttgtacttctttaaaacattaaatttgaggaaactttaatgctgtctcgtgtacattgctttactacagtgagggggaatatcctttagattgagcctcaatttactggttagtagtatgtgaaactctggtataaaaacgtaaactagacagtagagccgatgaattaaaattgtaaattgctacattggcattttctacctccttttctgtcagagtattactttttccagcatttattcttatttgtgagtaaagaggaaatgggaacctgaggttaaaattgacatttttgtttcattgagaatttaagcagtaggtacaggagaagtgacttgtcacattaatttggtgcctaaatctgtaactacaagttgtgatcgacatgtacaaaatgtctaagaaaggtcatatgctgaatattttacttttcctgtatagtctgcatgatttgtttcataaacccagcttatttcctccaaaaagcaaaatggtcctgtaatttttaaagtaaaataaacgtgccattttgtctgcaatctataatttcaggaagttattgaaagttctgactcagggctttttaacagttcaagcaattgtcagttatattttggaaactccatctgtgtaattctccagtgccttgaaagaattattaacttggcaacactattaaaactttataaaagatggtctttagtgcacgtgtatcattatatacacgttttaaagtcatattgcttagcttgttaataatgattctgcatgtgtgctgggtttgggtaattctttaaaggaagttttctagatttgcacttgatgtttgttttttaaaaactgattatttatggccgtgacactgttaccagaaaagtaattctaattaagttattatgcaaagtcatctataagtagcatctgggaagaggagatcgaggccacagtttgctattttagtatgaaaggaggatctgtttgggaaacatagattgtcttcccctcaaatgaggggaaaaaaaaaagaccctttgttcaaatggattctgttgtaaaaaattatttttaaaggaaatcacaaattgtatgtcattcttaatgctagtcttatagaataaatccataaaattgtttttatgttcagtatgtttatgtcattctaaatgcagcaaattcaatgatagcagttcaattgactcatagcagtgttttgtattttttctaattctttagctttcaatattggattaaagtcttgtttgtgaatatagtttccgtatggcaaatgatttcttgcttattagcttttgttaaagaatgcttagtaagagctaagcttttaaaagtaatgcaaacatttatcgttaataaaacctatggtgtaatatcatataatgcttttctttgatctttggagaattattcttttatagtagtatacatgaattttgatttttaaagcatttaaaaacaaatctcaatacattaaaaaacctgttattgttaaaaaggaaattaccatgcctttaagaaacaaggatgtacatcttcaattcagcataagtgtccacatctagaaggctctcattgcagttgtttacagttaaggtacctctatctaaagggccaaagaagcatttcatattttaacacctcacattctttcaggattaagacatatgaaaatagtctgaataggataaatttgataggaagtaacttaaccagtctggaagattcagctttttctataaaaagcttattcctcttcacaactcagatgtagatttcattttcaagaggtagatattttaaagcaatgatctatttgggttttagttttatgagtaaatcattaattgtatggtttgggggttattttattttccatgttaatataagcacttatttctgaagttattgagaggtcatctagctccagttcaaaagattatgtatatctgatgtttaagaggaaaaacatctgaaaaaatatcttttgtttatttgaaaaaagcatatatattccaactttaaaattgtgaatttattttgagtaacctctaattaactgtatttttttgtttctgttgctgtatagttagaaatttcatggcaatattttttactaaattgaaactataggttttaaaaataaagacattttagaaaatttg

SEQ ID NO: 154090 - DNA, 3290 bp, Homo sapiens
  Payload ID: 10282
  Gene Symbol: MIB2
  Gene Name: mindbomb E3 ubiquitin protein ligase 2
  Uniprot ID: Q96AX9
  ENST ID: ENST00000355826
  CDS Start-End: 40-3210
ggtgcttgccctgcccatccccgtggcgggggcgtggccatggcgggggcgctccggcgggggcgggccctgggctcccgcccttcgggtcccacagtttccagccgccgctctcctcagtgcccggtggcccaggagggcctgggagcccgaagccgtccccgagtcgctcctaggtcactggcgcgatgcgggccgtcctctcggctgatgggttggaagcccagcgaggctagaggccagtcccaaagtttccaggcatcagggctgcagcccaggagcctcaaggcggcccggcgggcgactggacggccggacaggtcccgagcagccccgcccaacatggacccagacccccaggcgggcgtgcaggtgggcatgcgggtggtgcgcggcgtggactggaagtggggccagcaggacggcggcgagggcggcgtgggcacggtggtggagcttggccgccacggcagcccctcgacacccgaccgcacagtggtcgtgcagtgggaccagggcacgcgcaccaactaccgcgccggctaccagggcgcgcacgacctgctgctgtacgacaacgcccagatcggcgtccggcaccccaacatcatctgtgactgctgcaagaagcacgggctgcgggggatgcgctggaagtgccgtgtgtgcctggactacgacctctgcacgcagtgctacatgcacaacaagcatgagctcgcccacgccttcgaccgctacgagaccgctcactcgcgccctgtcacactgagtccccgccagggcctcccgaggatcccactaaggggcatcttccagggagcgaaggtggtgcgaggccccgactgggagtggggctcacaggatggaggggaagggaaaccgggccgtgtggtggacatccgtggctgggatgtggagacaggccggagtgtggccagcgtgacgtgggctgatggtaccaccaatgtgtaccgtgtgggccacaagggcaaggtggacctcaagtgtgtgggcgaggcagcgggcggcttctactacaaggaccacctcccaaggctcggcaagccggcggagctgcagcgcagggtgagtgctgacagccagcccttccagcacggggacaaggtcaagtgtctgctggacactgatgtcctgcgggagatgcaggaaggccacggcggctggaaccccaggatggcggagtttatcggacagacgggcaccgtgcatcgtatcacggaccgcggggacgtgcgcgtgcagttcaaccacgagacgcgctggaccttccaccccggggcgctcaccaagcaccactccttctgggtgggcgacgtggtccgggtcatcggcgaccttgacacagtgaagcggctgcaggctgggcatggcgagtggacggacgacatggcccctgccctgggccgcgtcgggaaggtggtgaaagtgtttggagacgggaacctgcgtgtagcagtcgctggtcagcggtggaccttcagcccctcctgcctggtggcctaccggcccgaggaggatgccaacctggacgtggccgagcgcgcccgggagaacaaaagctcactgagcgtggccctggacaagcttcgggcccagaagagtgacccagagcacccgggaaggctggtggtggaggtggcgctgggtaacgcagcccgggctctggacctgctgcggaggcgcccagagcaggtggacaccaagaaccaaggcaggaccgctctgcaagtggctgcctacctgggccaggtggagttgatacggctgctgctacaagccagggcgggcgtggacctgccggacgacgagggcaacacggcactgcactacgcggccctggggaaccagcccgaggccaccagggtgctcctgagtgctgggtgccgggcggacgccatcaacagcacccagagcacagcactgcacgtggccgtgcagaggggcttcctggaggtggtgcgggccctgtgtgagcgcggctgtgacgtcaacctgcccgacgcccactcggacacgcccctgcactccgccatctcggcgggcactggagccagcggcattgtcgaggtcctcacggaggtgccaaacatcgatgttaccgccaccaacagccagggtttcaccctgctgcaccatgcctccctcaagggtcacgcgctagctgtgagaaagattctggctcgggcgcggcagctggtggacgccaagaaggaggacggcttcacggcgctgcatctggctgccctcaacaaccaccgcgaggtggcccagatcctcatccgggagggccgctgtgacgtgaacgtgcgcaaccggaagctgcagtccccgctgcatctcgccgtgcaacaggcccacgtggggctggtgccgctactggtggacgctgggtgcagtgtcaacgccgaggacgaggagggggacacagccctgcacgtggcgctgcagcgtcatcagctgctgcccctggtggctgatggggccgggggggacccagggcccttgcagctgctgtccaggctacaggcctcgggcctccccggcagcgcggagctgacggtgggcgcggcggtcgcctgcttcctggcgctggagggcgccgacgtgagctacaccaaccaccgcggtcggagcccgctggacctggccgccgagggtcgcgtgctcaaggcccttcagggctgcgcccagcgcttccgggagcggcaggcgggcgggggcgcggccccgggccccaggcaaacgctcgggacccccaacaccgtgacgaacctgcacgtgggcgccgcgccggggcccgaggccgctgagtgcctggtgtgctccgagctggcgctgctggtgctgttctcgccgtgccagcaccgcaccgtgtgtgaggagtgcgcgcgcaggatgaagaagtgcatcaggtgccaggtggtcgtcagcaagaaactgcgcccagacggctctgaggtggcgagcgccgcccccgcccccggcccgccgcgccagctggtggaggagctgcagagccgctaccggcagatggaggaacgcatcacctgccccatctgcatcgacagccacatccgcctcgtgttccagtgcggccacggcgcatgcgccccctgcggctccgcgctcagcgcctgccccatctgccgccagcccatccgcgaccgcatccagatcttcgtgtgagccgcgccgtccgccgcgcccgagctgccttcgcgtgcccccgccctgtgttttataaaaagaaagattctcggacgttg

SEQ ID NO: 154091 - DNA, 3012 bp, Homo sapiens
  Payload ID: 10282
  Gene Symbol: MIB2
  Gene Name: mindbomb E3 ubiquitin protein ligase 2
  ENST ID: ENST00000378708
  CDS Start-End: 179-2938
cagcctggcttgctggctgcccgtctggtttgctgtgttgtgtctccagtggctttagcttccaacaggaaagcctggtagccgagcgaatctgtgacccaggaagtagcaattaaatgcctgggacgctgcctcgaggctggtgtgtgctctgaggtcccgagcagccccgcccaacatggacccagacccccaggcgggcgtgcaggtgggcatgcgggtggtgcgcggcgtggactggaagtggggccagcaggacggcggcgagggcggcgtgggcacggtggtggagcttggccgccacggcagcccctcgacacccgaccgcacagtggtcgtgcagtgggaccagggcacgcgcaccaactaccgcgccggctaccagggcgcgcacgacctgctgctgtacgacaacgcccagatcggcgtccggcaccccaacatcatctgtgactgctgcaagaagcacgggctgcgggggatgcgctggaagtgccgtgtgtgcctggactacgacctctgcacgcagtgctacatgcacaacaagcatgagctcgcccacgccttcgaccgctacgagaccgctcactcgcgccctgtcacactgagtccccgccagggcctcccgaggatcccactaaggggcatcttccagggagcgaaggtggtgcgaggccccgactgggagtggggctcacaggatggaggggaagggaaaccgggccgtgtggtggacatccgtggctgggatgtggagacaggccggagtgtggccagcgtgacgtgggctgatggtaccaccaatgtgtaccgtgtgggccacaagggcaaggtggacctcaagtgtgtgggcgaggcagcgggcggcttctactacaaggaccacctcccaaggctcggcaagccggcggagctgcagcgcagggtgagtgctgacagccagcccttccagcacggggacaaggtcaagtgtctgctggacactgatgtcctgcgggagatgcaggaaggccacggcggctggaaccccaggatggcggagcaccactccttctgggtgggcgacgtggtccgggtcatcggcgaccttgacacagtgaagcggctgcaggctgggcatggcgagtggacggacgacatggcccctgccctgggccgcgtcgggaaggtggtgaaagtgtttggagacgggaacctgcgtgtagcagtcgctggtcagcggtggaccttcagcccctcctgcctggtggcctaccggcccgaggaggatgccaacctggacgtggccgagcgcgcccgggagaacaaaagctcactgagcgtggccctggacaagcttcgggcccagaagagtgacccagagcacccgggaaggctggtggtggaggtggcgctgggtaacgcagcccgggctctggacctgctgcggaggcgcccagagcaggtggacaccaagaaccaaggcaggaccgctctgcaagtggctgcctacctgggccaggtggagttgatacggctgctgctacaagccagggcgggcgtggacctgccggacgacgagggcaacacggcactgcactacgcggccctggggaaccagcccgaggccaccagggtgctcctgagtgctgggtgccgggcggacgccatcaacagcacccagagcacagcactgcacgtggccgtgcagaggggcttcctggaggtggtgcgggccctgtgtgagcgcggctgtgacgtcaacctgcccgacgcccactcggacacgcccctgcactccgccatctcggcgggcactggagccagcggcattgtcgaggtcctcacggaggtgccaaacatcgatgttaccgccaccaacagccagggtttcaccctgctgcaccatgcctccctcaagggtcacgcgctagctgtgagaaagattctggctcgggcgcggcagctggtggacgccaagaaggaggacggcttcacggcgctgcatctggctgccctcaacaaccaccgcgaggtggcccagatcctcatccgggagggccgctgtgacgtgaacgtgcgcaaccggaagctgcagtccccgctgcatctcgccgtgcaacaggcccacgtggggctggtgccgctactggtggacgctgggtgcagtgtcaacgccgaggacgaggagggggacacagccctgcacgtggcgctgcagcgtcatcagctgctgcccctggtggctgatggggccgggggggacccagggcccttgcagctgctgtccaggctacaggcctcgggcctccccggcagcgcggagctgacggtgggcgcggcggtcgcctgcttcctggcgctggagggcgccgacgtgagctacaccaaccaccgcggtcggagcccgctggacctggccgccgagggtcgcgtgctcaaggcccttcagggctgcgcccagcgcttccgggagcggcaggcgggcgggggcgcggccccgggccccaggcaaacgctcgggacccccaacaccgtgacgaacctgcacgtgggcgccgcgccggggcccgaggccgctgagtgcctggtgtgctccgagctggcgctgctggtgctgttctcgccgtgccagcaccgcaccgtgtgtgaggagtgcgcgcgcaggatgaagaagtgcatcaggtgccaggtggtcgtcagcaagaaactgcgcccagacggctctgaggtggcgagcgccgcccccgcccccggcccgccgcgccagctggtggaggagctgcagagccgctaccggcagatggaggaacgcatcacctgccccatctgcatcgacagccacatccgcctcgtgttccagtgcggccacggcgcatgcgccccctgcggctccgcgctcagcgcctgccccatctgccgccagcccatccgcgaccgcatccagatcttcgtgtgagccgcgccgtccgccgcgcccgagctgccttcgcgtgcccccgccctgtgttttataaaaagaaagattctcgg

SEQ ID NO: 154092 - DNA, 2890 bp, Homo sapiens
  Payload ID: 10282
  Gene Symbol: MIB2
  Gene Name: mindbomb E3 ubiquitin protein ligase 2
  Uniprot ID: Q96AX9
  ENST ID: ENST00000378712
  CDS Start-End: 326-2587
gctggggtcgtcgtccgggccgggtgggctgcggcgcgcggcaggcgctctggcctggcctggccgccgctgagcagtcggggccggtgggtggcctcgaacgccgggacagaccgacagacggactggccggcggtcccgcgcccccgagcggagcgggcgggacggaaacgtccgggcaagttggggtcggcagggttggaagcccagcgaggctagaggccagtcccaaagtttccaggcatcagggctgcagcccaggagcctcaaggcggcccggcgggcgactggacggccggacaggtcccgagcagccccgcccaacatggacccagacccccaggcgggcgtgcaggtgggcatgcgggtggtgcgcggcgtggactggaagtggggccagcaggacggcggcgagggcggcgtgggcacggtggtggagcttggccgccacggcagcccctcgacacccgaccgcacagtggtcgtgcagtgggaccagggcacgcgcaccaactaccgcgccggctaccagggcgcgcacgacctgctgctgtacgacaacgcccagatcggcgtccggcaccccaacatcatctgtgactgctgcaagaagcacgggctgcgggggatgcgctggaagtgccgtgtgtgcctggactacgacctctgcacgcagtgctacatgcacaacaagcatgagctcgcccacgccttcgaccgctacgagaccgctcactcgcgccctgtcacactgagtccccgccagggcctcccgaggatcccactaaggggcatcttccagggagcgaaggtggtgcgaggccccgactgggagtggggctcacaggatggcaagccggcggagctgcagcgcagggtgagtgctgacagccagcccttccagcacggggacaaggtcaagtgtctgctggacactgatgtcctgcgggagatgcaggaaggccacggcggctggaaccccaggatggcggagtttatcggacagacgggcaccgtgcatcgtatcacggaccgcggggacgtgcgcgtgcagttcaaccacgagacgcgctggaccttccaccccggggcgctcaccaagcaccactccttctgggtgggcgacgtggtccgggtcatcggcgaccttgacacagtgaagcggctgcaggctgggcatggcgagtggacggacgacatggcccctgccctgggccgcgtcgggaaggtggtgaaagtgtttggagacgggaacctgcgtgtagcagtcgctggtcagcggtggaccttcagcccctcctgcctggtggcctaccggcccgaggaggatgccaacctggacgtggccgagcgcgcccgggagaacaaaagctcactgagcgtggccctggacaagcttcgggcccagaagagtgacccagagcacccgggaaggctggtggtggaggtggcgctgggtaacgcagcccgggctctggacctgctgcggaggcgcccagagcaggtggacaccaagaaccaaggcaggaccgctctgcaagtggctgcctacctgggccaggtggagttgatacggctgctgctacaagccagggcgggcgtggacctgccggacgacgagggcaacacggcactgcactacgcggccctggggaaccagcccgaggccaccagggtgctcctgagtgctgggtgccgggcggacgccatcaacagcacccagagcacagcactgcacgtggccgtgcagaggggcttcctggaggtggtgcgggccctgtgtgagcgcggctgtgacgtcaacctgcccgacgcccactcggacacgcccctgcactccgccatctcggcgggcactggagccagcggcattgtcgaggtcctcacggaggtgccaaacatcgatgttaccgccaccaacagccagggtttcaccctgctgcaccatgcctccctcaagggtcacgcgctagctgtgagaaagattctggctcgggcgcggcagctggtggacgccaagaaggaggacggcttcacggcgctgcatctggctgccctcaacaaccaccgcgaggtggcccagatcctcatccgggagggccgctgtgacgtgaacgtgcgcaaccggaagctgcagtccccgctgcatctcgccgtgcaacaggcccacgtggggctggtgccgctactggtggacgctgggtgcagtgtcaacgccgaggacgaggagggggacacagccctgcacgtggcgctgcagcgtcatcagctgctgcccctggtggctgatggggccgggggggacccagggcccttgcagctgctgtccaggctacaggcctcgggcctccccggcagcgcggagctgacggtgggcgcggcggtcgcctgcttcctggcgctggagggcgccgacgtgagctacaccaaccaccgcggtcggagcccgctggacctggccgccgagggtcgcgtgctcaaggcccttcagggctgcgcccagcgcttccgagtgcgcgcgcaggatgaagaagtgcatcaggtgccaggtggtcgtcagcaagaaactgcgcccagacggctctgaggtggcgagcgccgcccccgcccccggcccgccgcgccagctggtggaggagctgcagagccgctaccggcagatggaggaacgcatcacctgccccatctgcatcgacagccacatccgcctcgtgttccagtgcggccacggcgcatgcgccccctgcggctccgcgctcagcgcctgccccatctgccgccagcccatccgcgaccgcatccagatcttcgtgtgagccgcgccgtccgccgcgcccgagctgccttcgcgtgcccccgccctgtgttttataaaaagaaagattctcgg

SEQ ID NO: 154093 - DNA, 592 bp, Homo sapiens
  Payload ID: 10282
  Gene Symbol: MIB2
  Gene Name: mindbomb E3 ubiquitin protein ligase 2
  ENST ID: ENST00000514363
  CDS Start-End: 102-446
gctctcctcagtgcccggtggcccaggagggcctgggagcccgaagccgtccccgagtcgctcctaggtcactggcgcgatgcgggccgtcctctcggctgatgggttggaagcccagcgaggctagaggccagtcccaaagtttccaggcatcagggctgcagcccaggagcctcaaggcggcccggcgggcgactggacggccggacaggtcccgagcagccccgcccaacatggacccagacccccaggcgggcgtgcaggcgtccggcaccccaacatcatctgtgactgctgcaagaagcacgggctgcgggggatgcgctggaagtgccgtgtgtgcctggactacgacctctgcacgcagtgctacatgcacaacaagcatgagctcgcccacgccttcgaccgctacgagaccgctcactcgcgccctgtcacactgagtccccgccagggcctcccgaggatcccactaaggggcatcttccagggagcgaaggtggtgcgaggccccgactgggagtggggctcacaggatggaggggaagggaaaccgggccgtgtggtggacatccgtggctgggatgtg

SEQ ID NO: 154094 - DNA, 780 bp, Homo sapiens
  Payload ID: 10282
  Gene Symbol: MIB2
  Gene Name: mindbomb E3 ubiquitin protein ligase 2
  ENST ID: ENST00000502470
  CDS Start-End: 344-598
agcggcgctggggtcggcgctggggtcgtcgtccgggccgggtgggctgcggcgcgcggcaggcgctctggcctggcctggccgccgctgagcagtcggggccggtgggtggcctcgaacgccgggacagaccgacagacggactggccggcggtcccgcgcccccgagcggagcgggcgggacggaaacgtccgggcaagttggggtcggcagggttggaagcccagcgaggctagaggccagtcccaaagtttccaggcatcagggctgcagcccaggagcctcaaggcggcccggcgggcgactggacggccggacaggtcccgagcagccccgcccaacatggacccagacccccaggcgggcgtgcaggtgggcatgcgggtggtgcgcggcgtggactggaagtggggccagcaggacggcggcgagggcggcgtgggcacggtggtggagcttggccgccacggcagcccctcgacacccgaccgcacagtggtcgtgcagtgggaccagggcacgcgcaccaactaccgcgccggctaccagggcgcgcacgacctgctgctgcgtccggcaccccaacatcatctgtgactgctgcaagaagcacgggctgcgggggatgcgctggaagtgccgtgtgtgcctggactacgacctctgcacgcagtgctacatgcacaacaagcatgagctcgcccacgccttcgaccgctacgagaccgctcactcgcgccctgtcacactgagtccccgccagggcctcccgaggatcc

SEQ ID NO: 154095 - DNA, 3252 bp, Homo sapiens
  Payload ID: 10282
  Gene Symbol: MIB2
  Gene Name: mindbomb E3 ubiquitin protein ligase 2
  ENST ID: ENST00000487053
  CDS Start-End: 352-2802
ccggggccagcggcgctggggtcggcgctggggtcgtcgtccgggccgggtgggctgcggcgcgcggcaggcgctctggcctggcctggccgccgctgagcagtcggggccggtgggtggcctcgaacgccgggacagaccgacagacggactggccggcggtcccgcgcccccgagcggagcgggcgggacggaaacgtccgggcaagttggggtcggcagggttggaagcccagcgaggctagaggccagtcccaaagtttccaggcatcagggctgcagcccaggagcctcaaggcggcccggcgggcgactggacggccggacaggtcccgagcagcccggcccaccatggacccctctgcccacaggtcccgagcagccccgcccaacatggacccagacccccaggcgggcgtgcaggtgggcatgcgggtggtgcgcggcgtggactggaagtggggccagcaggacggcggcgagggcggcgtgggcacggtggtggagcttggccgccacggcagcccctcgacacccgaccgcacagtggtcgtgcagtgggaccagggcacgcgcaccaactaccgcgccggctaccagggcgcgcacgacctgctgctgtacgacaacgcccagatcggcgtccggcaccccaacatcatctgtgactgctgcaagaagcacgggctgcgggggatgcgctggaagtgccgtgtgtgcctggactacgacctctgcacgcagtgctacatgcacaacaagcatgagctcgcccacgccttcgaccgctacgagaccgctcactcgcgccctgtcacactgagtccccgccagggcctcccgaggatcccactaaggggcatcttccagggagcgaaggtggtgcgaggccccgactgggagtggggctcacaggatggaggggaagggaaaccgggccgtgtggtggacatccgtggctgggatgtggagacaggccggagtgtggccagcgtgacgtgggctgatggtaccaccaatgtgtaccgtgtgggccacaagggcaaggtggacctcaagtgtgtgggcgaggcagcgggcggcttctactacaaggaccacctcccaaggctcggcaagccggcggagctgcagcgcagggtgagtgctgacagccagcccttccagcacggggacaaggtcaagtgtctgctggacactgatgtcctgcgggagatgcaggaaggccacggcggctggaaccccaggatggcggagtttatcggacagacgggcaccgtgcatcgtatcacggaccgcggggacgtgcgcgtgcagttcaaccacgagacgcgctggaccttccaccccggggcgctcaccaagcaccactccttctgggtgggcgacgtggtccgggtcatcggcgaccttgacacagtgaagcggctgcaggctgggcatggcgagtggacggacgacatggcccctgccctgggccgcgtcgggaaggtggtgaaagtgtttggagacgggaacctgcgtgtagcagtcgctggtcagcggtggaccttcagcccctcctgcctggtggcctaccggcccgaggaggatgccaacctggacgtggccgagcgcgcccgggagaacaaaagctcactgagcgtggccctggacaagcttcgggcccagaagagtgacccagagcacccgggaaggctggtggtggaggtggcgctgggtaacgcagcccgggctctggacctgctgcggaggcgcccagagcaggtggacaccaagaaccaaggcaggaccgctctgcaagtggctgcctacctgggccaggtggagttgatacggctgctgctacaagccagggcgggcgtggacctgccggacgacgagggcaacacggcactgcactacgcggccctggggaaccagcccgaggccaccagggtgctcctgagtgctgggtgccgggcggacgccatcaacagcacccagagcacagcactgcacgtggccgtgcagaggggcttcctggaggtggtgcgggccctgtgtgagcgcggctgtgacgtcaacctgcccgacgcccactcggacacgcccctgcactccgccatctcggcgggcactggagccagcggcattgtcgaggtcctcacggaggtgccaaacatcgatgttaccgccaccaacagccagggtttcaccctgctgcaccatgcctccctcaagggtcacgcgctagctgtgagaaagattctggctcgggcgcggcagctggtggacgccaagaaggaggacggcttcacggcgctgcatctggctgccctcaacaaccaccgcgaggtggcccagatcctcatccgggagggccgctgtgacgtgaacgtgcgcaaccggaagctgcagtccccgctgcatctcgccgtgcaacaggcccacgtggggctggtgccgctactggtggacgctgggtgcagtgtcaacgccgaggacgaggagggggacacagccctgcacgtggcgctgcagcgtcatcagctgctgcccctggtggctgatggggccgggggggacccagggcccttgcagctgctgtccaggctacaggcctcgggcctccccggcagcgcggagctgacggtgggcgcggcggtcgcctgcttcctggcgctggagggcgccgacgtgagctacaccaaccaccgcggtcggagcccgctggacctggccgccgagggtcgcgtgctcaaggcccttcagggctgcgcccagcgcttccgggagcggcaggcgggcgggggccgctgagtgcctggtgtgctccgagctggcgctgctggtgctgttctcgccgtgccagcaccgcaccgtgtgtgaggagtgcgcgcgcaggatgaagaagtgcatcaggtgccaggtggtcgtcagcaagaaactgcgcccagacggctctgaggtggcgagcgccgcccccgcccccggcccgccgcgccagctggtggaggagctgcagagccgctaccggcagatggaggaacgcatcacctgccccatctgcatcgacagccacatccgcctcgtgttccagtgcggccacggcgcatgcgccccctgcggctccgcgctcagcgcctgccccatctgccgccagcccatccgcgaccgcatccagatcttcgtgtgagccgcgccgtccgccgcgcccgagctgccttcgcgtgcccccgccctgtgttttataaaaagaaagattctcgg

SEQ ID NO: 154096 - DNA, 2997 bp, Homo sapiens
  Payload ID: 10282
  Gene Symbol: MIB2
  Gene Name: mindbomb E3 ubiquitin protein ligase 2
  ENST ID: ENST00000506488
  CDS Start-End: 162-1349
tgcccgtctggtttgctgtgttgtgtctccagtggctttagcttccaacaggaaagcctggtagccgagcgaatctgtgacccaggaagtagcaattaaatgcctgggacgctgcctcgaggctggtgtgtgctctgaggtcccgagcagccccgcccaacatggacccagacccccaggcgggcgtgcaggtgggcatgcgggtggtgcgcggcgtggactggaagtggggccagcaggacggcggcgagggcggcgtgggcacggtggtggagcttggccgccacggcagcccctcgacacccgaccgcacagtggtcgtgcagtgggaccagggcacgcgcaccaactaccgcgccggctaccagggcgcgcacgacctgctgctgtacgacaacgcccagatcggcgtccggcaccccaacatcatctgtgactgctgcaagaagcacgggctgcgggggatgcgctggaagtgccgtgtgtgcctggactacgacctctgcacgcagtgctacatgcacaacaagcatgagctcgcccacgccttcgaccgctacgagaccgctcactcgcgccctgtcacactgagtccccgccagggcctcccgaggatcccactaaggggcatcttccagggagcgaaggtggtgcgaggccccgactgggagtggggctcacaggatggaggggaagggaaaccgggccgtgtggtggacatccgtggctgggatgtggagacaggccggagtgtggccagcgtgacgtgggctgatggtaccaccaatgtgtaccgtgtgggccacaagggcaaggtggacctcaagtgtgtgggcgaggcagcgggcggcttctactacaaggaccacctcccaaggctcggcaagccggcggagctgcagcgcagggtgagtgctgacagccagcccttccagcacggggacaaggtcaagtgtctgctggacactgatgtcctgcgggagatgcaggaaggccacggcggctggaaccccaggatggcggagcaccactccttctgggtgggcgacgtggtccgggtcatcggcgaccttgacacagtgaagcggctgcaggctgggcatggcgagtggacggacgacatggcccctgccctgggccgcgtcgggaaggtggtgaaagtgtttggagacgggaacctgcgtgtagcagtcgctggtcagcggtggaccttcagcccctcctgcctggtggcctaccggcccgaggaggatgccaacctggacgtggccgagcgcgcccgggagaacaaaagtgcggcacagctcaggcggccagtgggaggtggggctgcccctggccaccactaacctcagccctgcccccaggctcactgagcgtggccctggacaagcttcgggcccagaagagtgacccagagcacccgggaaggctggtggtggaggtggcgctgggtaacgcagcccgggctctggacctgctgcggaggcgcccagagcaggtggacaccaagaaccaaggcaggaccgctctgcaagtggctgcctacctgggccaggtggagttgatacggctgctgctacaagccagggcgggcgtggacctgccggacgacgagggcaacacggcactgcactacgcggccctggggaaccagcccgaggccaccagggtgctcctgagtgctgggtgccgggcggacgccatcaacagcacccagagcacagcactgcacgtggccgtgcagaggggcttcctggaggtggtgcgggccctgtgtgagcgcggctgtgacgtcaacctgcccgacgcccactcggacacgcccctgcactccgccatctcggcgggcactggagccagcggcattgtcgaggtcctcacggaggtgccaaacatcgatgttaccgccaccaacagccagggtttcaccctgctgcaccatgcctccctcaagggtcacgcgctagctgtgagaaagattctggctcgggcgcggcagctggtggacgccaagaaggaggacggcttcacggcgctgcatctggctgccctcaacaaccaccgcgaggtggcccagatcctcatccgggagggccgctgtgacgtgaacgtgcgcaaccggaagctgcagtccccgctgcatctcgccgtgcaacaggcccacgtggggctggtgccgctactggtggacgctgggtgcagtgtcaacgccgaggacgaggagggggacacagccctgcacgtggcgctgcagcgtcatcagctgctgcccctggtggctgatggggccgggggggacccagggcccttgcagctgctgtccaggctacaggcctcgggcctccccggcagcgcggagctgacggtgggcgcggcggtcgcctgcttcctggcgctggagggcgccgacgtgagctacaccaaccaccgcggtcggagcccgctggacctggccgccgagggtcgcgtgctcaaggcccttcagggctgcgcccagcgcttccgggagcggcaggcgggcgggggcgcggccccgggccccaggcaaacgctcgggacccccaacaccgtgacgaacctgcacgtgggcgccgcgccggggcccgaggccgctgagtgcctggtgtgctccgagctggcgctgctggtgctgttctcgccgtgccagcaccgcaccgtgtgtgaggagtgcgcgcgcaggatgaagaagtgcatcaggtgccaggtggtcgtcagcaagaaactgcgcccagacggctctgaggtggcgagcgccgcccccgcccccggcccgccgcgccagctggtggaggagctgcagagccgctaccggcagatggaggaacgcatcacctgccccatctgcatcgacagccacatccgcctcgtgttccagtgcggccacggcgcatgcgccccctgcggctccgcgctcagcgcctgccccatctgccgccagcccatccgcgaccgcatccagatcttcgtgtgagc

SEQ ID NO: 154097 - DNA, 3034 bp, Homo sapiens
  Payload ID: 10282
  Gene Symbol: MIB2
  Gene Name: mindbomb E3 ubiquitin protein ligase 2
  ENST ID: ENST00000489635
  CDS Start-End: 136-522
tcccgcccttcgggtcccacagtttccagccgccgctctcctcagtgcccggtggcccaggagggcctgggagcccgaagccgtccccgagtcgctcctaggtcactggcgcgatgcgggccgtcctctcggctgatgggttggaagcccagcgaggctagaggccagtcccaaagtttccaggcatcagggctgcagcccaggagcctcaaggcggcccggcgggcgactggacggccggacaggtcccgagcagcccggcccaccatggacccctctgcccacaggtcccgagcagccccgcccaacatggacccagacccccaggcgggcgtgcaggcgtccggcaccccaacatcatctgtgactgctgcaagaagcacgggctgcgggggatgcgctggaagtgccgtgtgtgcctggactacgacctctgcacgcagtgctacatgcacaacaagcatgagctcgcccacgccttcgaccgctacgagaccgctcactcgcgccctgtcacactgagtccccgccagggcctcccgaggatcccactaaggggcatcttccagggagcgaaggtggtgcgaggccccgactgggagtggggctcacaggatggaggggaagggaaaccgggccgtgtggtggacatccgtggctgggatgtggagacaggccggagtgtggccagcgtgacgtgggctgatggtaccaccaatgtgtaccgtgtgggccacaagggcaaggtggacctcaagtgtgtgggcgaggcagcgggcggcttctactacaaggaccacctcccaaggctcggcaagccggcggagctgcagcgcagggtgagtgctgacagccagcccttccagcacggggacaaggtcaagtgtctgctggacactgatgtcctgcgggagatgcaggaaggccacggcggctggaaccccaggatggcggagtttatcggacagacgggcaccgtgcatcgtatcacggaccgcggggacgtgcgcgtgcagttcaaccacgagacgcgctggaccttccaccccggggcgctcaccaagcaccactccttctgggtgggcgacgtggtccgggtcatcggcgaccttgacacagtgaagcggctgcaggctgggcatggcgagtggacggacgacatggcccctgccctgggccgcgtcgggaaggtggtgaaagtgtttggagacgggaacctgcgtgtagcagtcgctggtcagcggtggaccttcagcccctcctgcctggtggcctaccggcccgaggaggatgccaacctggacgtggccgagcgcgcccgggagaacaaaagctcactgagcgtggccctggacaagcttcgggcccagaagagtgacccagagcacccgggaaggctggtggtggaggtggcgctgggtaacgcagcccgggctctggacctgctgcggaggcgcccagagcaggtggacaccaagaaccaaggcaggaccgctctgcaagtggctgcctacctgggccaggtggagttgatacggctgctgctacaagccagggcgggcgtggacctgccggacgacgagggcaacacggcactgcactacgcggccctggggaaccagcccgaggccaccagggtgctcctgagtgctgggtgccgggcggacgccatcaacagcacccagagcacagcactgcacgtggccgtgcagaggggcttcctggaggtggtgcgggccctgtgtgagcgcggctgtgacgtcaacctgcccgacgcccactcggacacgcccctgcactccgccatctcggcgggcactggagccagcggcattgtcgaggtcctcacggaggtgccaaacatcgatgttaccgccaccaacagccagggtttcaccctgctgcaccatgcctccctcaagggtcacgcgctagctgtgagaaagattctggctcgggcgcggcagctggtggacgccaagaaggaggacggcttcacggcgctgcatctggctgccctcaacaaccaccgcgaggtggcccagatcctcatccgggagggccgctgtgacgtgaacgtgcgcaaccggaagctgcagtccccgctgcatctcgccgtgcaacaggcccacgtggggctggtgccgctactggtggacgctgggtgcagtgtcaacgccgaggacgaggagggggacacagccctgcacgtggcgctgcagcgtcatcagctgctgcccctggtggctgatggggccgggggggacccagggcccttgcagctgctgtccaggctacaggcctcgggcctccccggcagcgcggagctgacggtgggcgcggcggtcgcctgcttcctggcgctggagggcgccgacgtgagctacaccaaccaccgcggtcggagcccgctggacctggccgccgagggtcgcgtgctcaaggcccttcagggctgcgcccagcgcttccgggagcggcaggcgggcgggggcgcggccccgggccccaggcaaacgctcgggacccccaacaccgtgacgaacctgcacgtgggcgccgcgccggggcccgaggccgctgagtgcctggtgtgctccgagctggcgctgctggtgctgttctcgccgtgccagcaccgcaccgtgtgtgaggagtgcgcgcgcaggatgaagaagtgcatcaggtgccaggtggtcgtcagcaagaaactgcgcccagacggctctgaggtggcgagcgccgcccccgcccccggcccgccgcgccagctggtggaggagctgcagagccgctaccggcagatggaggaacgcatcacctgccccatctgcatcgacagccacatccgcctcgtgttccagtgcggccacggcgcatgcgccccctgcggctccgcgctcagcgcctgccccatctgccgccagcccatccgcgaccgcatccagatcttcgtgtgagccgcgccgtccgccgcgcccgagctgccttcgcgtgcccccgccctgtgttttataaaaagaaagattctcgg

SEQ ID NO: 154098 - DNA, 3305 bp, Homo sapiens
  Payload ID: 10282
  Gene Symbol: MIB2
  Gene Name: mindbomb E3 ubiquitin protein ligase 2
  Uniprot ID: Q96AX9
  ENST ID: ENST00000505820
  CDS Start-End: 18-3230
gtggcgggggcgtggccatggcgggggcgctccggcgggggcgggccctgggctcccgcccttcgggtcccacagtttccagccgccgctctcctcagtgcccggtggcccaggagggcctgggagcccgaagccgtccccgagtcgctcctaggtcactggcgcgatgcgggccgtcctctcggctgatgggttggaagcccagcgaggctagaggccagtcccaaagtttccaggcatcagggctgcagcccaggagcctcaaggcggcccggcgggcgactggacggccggacaggtcccgagcagcccggcccaccatggacccctctgcccacaggtcccgagcagccccgcccaacatggacccagacccccaggcgggcgtgcaggtgggcatgcgggtggtgcgcggcgtggactggaagtggggccagcaggacggcggcgagggcggcgtgggcacggtggtggagcttggccgccacggcagcccctcgacacccgaccgcacagtggtcgtgcagtgggaccagggcacgcgcaccaactaccgcgccggctaccagggcgcgcacgacctgctgctgtacgacaacgcccagatcggcgtccggcaccccaacatcatctgtgactgctgcaagaagcacgggctgcgggggatgcgctggaagtgccgtgtgtgcctggactacgacctctgcacgcagtgctacatgcacaacaagcatgagctcgcccacgccttcgaccgctacgagaccgctcactcgcgccctgtcacactgagtccccgccagggcctcccgaggatcccactaaggggcatcttccagggagcgaaggtggtgcgaggccccgactgggagtggggctcacaggatggaggggaagggaaaccgggccgtgtggtggacatccgtggctgggatgtggagacaggccggagtgtggccagcgtgacgtgggctgatggtaccaccaatgtgtaccgtgtgggccacaagggcaaggtggacctcaagtgtgtgggcgaggcagcgggcggcttctactacaaggaccacctcccaaggctcggcaagccggcggagctgcagcgcagggtgagtgctgacagccagcccttccagcacggggacaaggtcaagtgtctgctggacactgatgtcctgcgggagatgcaggaaggccacggcggctggaaccccaggatggcggagtttatcggacagacgggcaccgtgcatcgtatcacggaccgcggggacgtgcgcgtgcagttcaaccacgagacgcgctggaccttccaccccggggcgctcaccaagcaccactccttctgggtgggcgacgtggtccgggtcatcggcgaccttgacacagtgaagcggctgcaggctgggcatggcgagtggacggacgacatggcccctgccctgggccgcgtcgggaaggtggtgaaagtgtttggagacgggaacctgcgtgtagcagtcgctggtcagcggtggaccttcagcccctcctgcctggtggcctaccggcccgaggaggatgccaacctggacgtggccgagcgcgcccgggagaacaaaagctcactgagcgtggccctggacaagcttcgggcccagaagagtgacccagagcacccgggaaggctggtggtggaggtggcgctgggtaacgcagcccgggctctggacctgctgcggaggcgcccagagcaggtggacaccaagaaccaaggcaggaccgctctgcaagtggctgcctacctgggccaggtggagttgatacggctgctgctacaagccagggcgggcgtggacctgccggacgacgagggcaacacggcactgcactacgcggccctggggaaccagcccgaggccaccagggtgctcctgagtgctgggtgccgggcggacgccatcaacagcacccagagcacagcactgcacgtggccgtgcagaggggcttcctggaggtggtgcgggccctgtgtgagcgcggctgtgacgtcaacctgcccgacgcccactcggacacgcccctgcactccgccatctcggcgggcactggagccagcggcattgtcgaggtcctcacggaggtgccaaacatcgatgttaccgccaccaacagccagggtttcaccctgctgcaccatgcctccctcaagggtcacgcgctagctgtgagaaagattctggctcgggcgcggcagctggtggacgccaagaaggaggacggcttcacggcgctgcatctggctgccctcaacaaccaccgcgaggtggcccagatcctcatccgggagggccgctgtgacgtgaacgtgcgcaaccggaagctgcagtccccgctgcatctcgccgtgcaacaggcccacgtggggctggtgccgctactggtggacgctgggtgcagtgtcaacgccgaggacgaggagggggacacagccctgcacgtggcgctgcagcgtcatcagctgctgcccctggtggctgatggggccgggggggacccagggcccttgcagctgctgtccaggctacaggcctcgggcctccccggcagcgcggagctgacggtgggcgcggcggtcgcctgcttcctggcgctggagggcgccgacgtgagctacaccaaccaccgcggtcggagcccgctggacctggccgccgagggtcgcgtgctcaaggcccttcagggctgcgcccagcgcttccgggagcggcaggcgggcgggggcgcggccccgggccccaggcaaacgctcgggacccccaacaccgtgacgaacctgcacgtgggcgccgcgccggggcccgaggccgctgagtgcctggtgtgctccgagctggcgctgctggtgctgttctcgccgtgccagcaccgcaccgtgtgtgaggagtgcgcgcgcaggatgaagaagtgcatcaggtgccaggtggtcgtcagcaagaaactgcgcccagacggctctgaggtggcgagcgccgcccccgcccccggcccgccgcgccagctggtggaggagctgcagagccgctaccggcagatggaggaacgcatcacctgccccatctgcatcgacagccacatccgcctcgtgttccagtgcggccacggcgcatgcgccccctgcggctccgcgctcagcgcctgccccatctgccgccagcccatccgcgaccgcatccagatcttcgtgtgagccgcgccgtccgccgcgcccgagctgccttcgcgtgcccccgccctgtgttttataaaaagaaagattctcgga

SEQ ID NO: 154099 - DNA, 3311 bp, Homo sapiens
  Payload ID: 10282
  Gene Symbol: MIB2
  Gene Name: mindbomb E3 ubiquitin protein ligase 2
  ENST ID: ENST00000504599
  CDS Start-End: 328-3237
cgcaattacgggcccggcgctggcggctcctgcgcgctcagaccccagggagcccatccgggcaggcggcggccctgagtgtcgcggccgtgggcccgagtggacctggagccggcgggcagccccgggggcagacaggcgaccgagccgcgggtcgaggtgctaactgtgcatcttggcatctcccctcggccacagggttggaagcccagcgaggctagaggccagtcccaaagtttccaggcatcagggctgcagcccaggagcctcaaggcggcccggcgggcgactggacggccggacaggtcccgagcagcccggcccaccatggacccctctgcccacaggtcccgagcagccccgcccaacatggacccagacccccaggcgggcgtgcaggtgggcatgcgggtggtgcgcggcgtggactggaagtggggccagcaggacggcggcgagggcggcgtgggcacggtggtggagcttggccgccacggcagcccctcgacacccgaccgcacagtggtcgtgcagtgggaccagggcacgcgcaccaactaccgcgccggctaccagggcgcgcacgacctgctgctgtacgacaacgcccagatcggcgtccggcaccccaacatcatctgtgactgctgcaagaagcacgggctgcgggggatgcgctggaagtgccgtgtgtgcctggactacgacctctgcacgcagtgctacatgcacaacaagcatgagctcgcccacgccttcgaccgctacgagaccgctcactcgcgccctgtcacactgagtccccgccagggcctcccgaggatcccactaaggggcatcttccagggagcgaaggtggtgcgaggccccgactgggagtggggctcacaggatggaggggaagggaaaccgggccgtgtggtggacatccgtggctgggatgtggagacaggccggagtgtggccagcgtgacgtgggctgatggtaccaccaatgtgtaccgtgtgggccacaagggcaaggtggacctcaagtgtgtgggcgaggcagcgggcggcttctactacaaggaccacctcccaaggctcggcaagccggcggagctgcagcgcagggtgagtgctgacagccagcccttccagcacggggacaaggtcaagtgtctgctggacactgatgtcctgcgggagatgcaggaaggccacggcggctggaaccccaggatggcggagtttatcggacagacgggcaccgtgcatcgtatcacggaccgcggggacgtgcgcgtgcagttcaaccacgagacgcgctggaccttccaccccggggcgctcaccaagcaccactccttctgggtgggcgacgtggtccgggtcatcggcgaccttgacacagtgaagcggctgcaggctgggcatggcgagtggacggacgacatggcccctgccctgggccgcgtcgggaaggtggtgaaagtgtttggagacgggaacctgcgtgtagcagtcgctggtcagcggtggaccttcagcccctcctgcctggtggcctaccggcccgaggaggatgccaacctggacgtggccgagcgcgcccgggagaacaaaagctcactgagcgtggccctggacaagcttcgggcccagaagagtgacccagagcacccgggaaggctggtggtggaggtggcgctgggtaacgcagcccgggctctggacctgctgcggaggcgcccagagcaggtggacaccaagaaccaaggcaggaccgctctgcaagtggctgcctacctgggccaggtggagttgatacggctgctgctacaagccagggcgggcgtggacctgccggacgacgagggcaacacggcactgcactacgcggccctggggaaccagcccgaggccaccagggtgctcctgagtgctgggtgccgggcggacgccatcaacagcacccagagcacagcactgcacgtggccgtgcagaggggcttcctggaggtggtgcgggccctgtgtgagcgcggctgtgacgtcaacctgcccgacgcccactcggacacgcccctgcactccgccatctcggcgggcactggagccagcggcattgtcgaggtcctcacggaggtgccaaacatcgatgttaccgccaccaacagccagggtttcaccctgctgcaccatgcctccctcaagggtcacgcgctagctgtgagaaagattctggctcgggcgcggcagctggtggacgccaagaaggaggacggcttcacggcgctgcatctggctgccctcaacaaccaccgcgaggtggcccagatcctcatccgggagggccgctgtgacgtgaacgtgcgcaaccggaagctgcagtccccgctgcatctcgccgtgcaacaggcccacgtggggctggtgccgctactggtggacgctgggtgcagtgtcaacgccgaggacgaggagggggacacagccctgcacgtggcgctgcagcgtcatcagctgctgcccctggtggctgatggggccgggggggacccagggcccttgcagctgctgtccaggctacaggcctcgggcctccccggcagcgcggagctgacggtgggcgcggcggtcgcctgcttcctggcgctggagggcgccgacgtgagctacaccaaccaccgcggtcggagcccgctggacctggccgccgagggtcgcgtgctcaaggcccttcagggctgcgcccagcgcttccgggagcggcaggcgggcgggggcgcggccccgggccccaggcaaacgctcgggacccccaacaccgtgacgaacctgcacgtgggcgccgcgccggggcccgaggccgctgagtgcctggtgtgctccgagctggcgctgctggtgctgttctcgccgtgccagcaccgcaccgtgtgtgaggagtgcgcgcgcaggatgaagaagtgcatcaggtgccaggtggtcgtcagcaagaaactgcgcccagacggctctgaggtggcgagcgccgcccccgcccccggcccgccgcgccagctggtggaggagctgcagagccgctaccggcagatggaggaacgcatcacctgccccatctgcatcgacagccacatccgcctcgtgttccagtgcggccacggcgcatgcgccccctgcggctccgcgctcagcgcctgccccatctgccgccagcccatccgcgaccgcatccagatcttcgtgtgagccgcgccgtccgccgcgcccgagctgccttcgcgtgcccccgccctgtgttttataaaaagaaagattctcgg

SEQ ID NO: 154100 - DNA, 576 bp, Homo sapiens
  Payload ID: 10282
  Gene Symbol: MIB2
  Gene Name: mindbomb E3 ubiquitin protein ligase 2
  ENST ID: ENST00000503789
  CDS Start-End: 131-576
tgatggttcggaagtcctcctgccctctgagagcttgcagtttcttgtgaaaaagagaaactaagcagcaatagaacagacccggtgtctgcttgcgtggttaagacggtcccgagcagccccgcccaacatggacccagacccccaggcgggcgtgcaggtgggcatgcgggtggtgcgcggcgtggactggaagtggggccagcaggacggcggcgagggcggcgtgggcacggtggtggagcttggccgccacggcagcccctcgacacccgaccgcacagtggtcgtgcagtgggaccagggcacgcgcaccaactaccgcgccggctaccagggcgcgcacgacctgctgctgtacgacaacgcccagatcggcgtccggcaccccaacatcatctgtgactgctgcaagaagcacgggctgcgggggatgcgctggaagtgccgtgtgtgcctggactacgacctctgcacgcagtgctacatgcacaacaagcatgagctcgcccacgccttcgaccgctacgagaccgctcactcgcgccctgtcacactgagtccccgccagggcct

SEQ ID NO: 154101 - DNA, 889 bp, Homo sapiens
  Payload ID: 10282
  Gene Symbol: MIB2
  Gene Name: mindbomb E3 ubiquitin protein ligase 2
  ENST ID: ENST00000510793
  CDS Start-End: 364-889
acgtctgcgagccgcggccgccagaccccgggcgcacgcaattacgggcccggcgctggcggctcctgcgcgctcagaccccagggagcccatccgggcaggcggcggccctgagtgtcgcggccgtgggcccgagtggacctggagccggcgggcagccccgggggcagacaggcgaccgagccgcgggtcgaggtgctaactgtgcatcttggcatctcccctcggccacagggttggaagcccagcgaggctagaggccagtcccaaagtttccaggcatcagggctgcagcccaggagcctcaaggcggcccggcgggcgactggacggccggacaggtcccgagcagccccgcccaacatggacccagacccccaggcgggcgtgcaggtgggcatgcgggtggtgcgcggcgtggactggaagtggggccagcaggacggcggcgagggcggcgtgggcacggtggtggagcttggccgccacggcagcccctcgacacccgaccgcacagtggtcgtgcagtgggaccagggcacgcgcaccaactaccgcgccggctaccagggcgcgcacgacctgctgctgtacgacaacgcccagatcggcgtccggcaccccaacatcatctgtgactgctgcaagaagcacgggctgcgggggatgcgctggaagtgccgtgtgtgcctggactacgacctctgcacgcagtgctacatgcacaacaagcatgagctcgcccacgccttcgaccgctacgagaccgctcactcgcgccctgtcacactgagtccccgccagggcctcccgaggatcccactaaggggcatcttccagggagcgaaggtggtgcgaggccccgactgggagtggggctcacaggatg

SEQ ID NO: 154102 - DNA, 2562 bp, Homo sapiens
  Payload ID: 10282
  Gene Symbol: MIB2
  Gene Name: mindbomb E3 ubiquitin protein ligase 2
  ENST ID: ENST00000514234
  CDS Start-End: 1-2488
ctgctgcaagaagcacgggctgcgggggatgcgctggaagtgccgtgtgtgcctggactacgacctctgcacgcagtgctacatgcacaacaagcatgagctcgcccacgccttcgaccgctacgagaccgctcactcgcgccctgtcacactgagtccccgccagggcctcccgaggatcccactaaggggcatcttccagggagcgaaggtggtgcgaggccccgactgggagtggggctcacaggatggaggggaagggaaaccgggccgtgtggtggacatccgtggctgggatgtggagacaggccggagtgtggccagcgtgacgtgggctgatggtaccaccaatgtgtaccgtgtgggccacaagggcaaggtggacctcaagtgtgtgggcgaggcagcgggcggcttctactacaaggaccacctcccaaggctcggcaagccggcggagctgcagcgcagggtgagtgctgacagccagcccttccagcacggggacaaggtcaagtgtctgctggacactgatgtcctgcgggagatgcaggaaggccacggcggctggaaccccaggatggcggagtttatcggacagacgggcaccgtgcatcgtatcacggaccgcggggacgtgcgcgtgcagttcaaccacgagacgcgctggaccttccaccccggggcgctcaccaaggccctgggccgcgtcgggaaggtggtgaaagtgtttggagacgggaacctgcgtgtagcagtcgctggtcagcggtggaccttcagcccctcctgcctggtggcctaccggcccgaggaggatgccaacctggacgtggccgagcgcgcccgggagaacaaaagctcactgagcgtggccctggacaagcttcgggcccagaagagtgacccagagcacccgggaaggctggtggtggaggtggcgctgggtaacgcagcccgggctctggacctgctgcggaggcgcccagagcaggtggacaccaagaaccaaggcaggaccgctctgcaagtggctgcctacctgggccaggtggagttgatacggctgctgctacaagccagggcgggcgtggacctgccggacgacgagggcaacacggcactgcactacgcggccctggggaaccagcccgaggccaccagggtgctcctgagtgctgggtgccgggcggacgccatcaacagcacccagagcacagcactgcacgtggccgtgcagaggggcttcctggaggtggtgcgggccctgtgtgagcgcggctgtgacgtcaacctgcccgacgcccactcggacacgcccctgcactccgccatctcggcgggcactggagccagcggcattgtcgaggtcctcacggaggtgccaaacatcgatgttaccgccaccaacagccagggtttcaccctgctgcaccatgcctccctcaagggtcacgcgctagctgtgagaaagattctggctcgggcgcggcagctggtggacgccaagaaggaggacggcttcacggcgctgcatctggctgccctcaacaaccaccgcgaggtggcccagatcctcatccgggagggccgctgtgacgtgaacgtgcgcaaccggaagctgcagtccccgctgcatctcgccgtgcaacaggcccacgtggggctggtgccgctactggtggacgctgggtgcagtgtcaacgccgaggacgaggagggggacacagccctgcacgtggcgctgcagcgtcatcagctgctgcccctggtggctgatggggccgggggggacccagggcccttgcagctgctgtccaggctacaggcctcgggcctccccggcagcgcggagctgacggtgggcgcggcggtcgcctgcttcctggcgctggagggcgccgacgtgagctacaccaaccaccgcggtcggagcccgctggacctggccgccgagggtcgcgtgctcaaggcccttcagggctgcgcccagcgcttccgggagcggcaggcgggcgggggcgcggccccgggccccaggcaaacgctcgggacccccaacaccgtgacgaacctgcacgtgggcgccgcgccggggcccgaggccgctgagtgcctggtgtgctccgagctggcgctgctggtgctgttctcgccgtgccagcaccgcaccgtgtgtgaggagtgcgcgcgcaggatgaagaagtgcatcaggtgccaggtggtcgtcagcaagaaactgcgcccagacggctctgaggtggcgagcgccgcccccgcccccggcccgccgcgccagctggtggaggagctgcagagccgctaccggcagatggaggaacgcatcacctgccccatctgcatcgacagccacatccgcctcgtgttccagtgcggccacggcgcatgcgccccctgcggctccgcgctcagcgcctgccccatctgccgccagcccatccgcgaccgcatccagatcttcgtgtgagccgcgccgtccgccgcgcccgagctgccttcgcgtgcccccgccctgtgttttataaaaagaaagattctcgg

SEQ ID NO: 154103 - DNA, 3116 bp, Homo sapiens
  Payload ID: 10282
  Gene Symbol: MIB2
  Gene Name: mindbomb E3 ubiquitin protein ligase 2
  Uniprot ID: Q96AX9
  ENST ID: ENST00000518681
  CDS Start-End: 24-3041
atccccgtggcgggggcgtggccatggcgggggcgctccggcgggggcgggccctgggctcccgcccttcgggtcccacagtttccagccgccgctctcctcagtgcccggtggcccaggagggcctgggagcccgaagccgtccccgagtcgctcctaggtcactggcgcgatgcgggccgtcctctcggctgatgggttggaagcccagcgaggctagaggccagtcccaaagtttccaggcatcagggctgcagcccaggagcctcaaggcggcccggcgggcgactggacggccggacaggtcccgagcagcccggcccaccatggacccctctgcccacaggtcccgagcagccccgcccaacatggacccagacccccaggcgggcgtgcaggtgggcatgcgggtggtgcgcggcgtggactggaagtggggccagcaggacggcggcgagggcggcgtgggcacggtggtggagcttggccgccacggcagcccctcgacacccgaccgcacagtggtcgtgcagtgggaccagggcacgcgcaccaactaccgcgccggctaccagggcgcgcacgacctgctgctgtacgacaacgcccagatcggcgtccggcaccccaacatcatctgtgactgctgcaagaagcacgggctgcgggggatgcgctggaagtgccgtgtgtgcctggactacgacctctgcacgcagtgctacatgcacaacaagcatgagctcgcccacgccttcgaccgctacgagaccgctcactcgcgccctgtcacactgagtccccgccagggcctcccgaggatcccactaaggggcatcttccagggagcgaaggtggtgcgaggccccgactgggagtggggctcacaggatggcaagccggcggagctgcagcgcagggtgagtgctgacagccagcccttccagcacggggacaaggtcaagtgtctgctggacactgatgtcctgcgggagatgcaggaaggccacggcggctggaaccccaggatggcggagtttatcggacagacgggcaccgtgcatcgtatcacggaccgcggggacgtgcgcgtgcagttcaaccacgagacgcgctggaccttccaccccggggcgctcaccaagcaccactccttctgggtgggcgacgtggtccgggtcatcggcgaccttgacacagtgaagcggctgcaggctgggcatggcgagtggacggacgacatggcccctgccctgggccgcgtcgggaaggtggtgaaagtgtttggagacgggaacctgcgtgtagcagtcgctggtcagcggtggaccttcagcccctcctgcctggtggcctaccggcccgaggaggatgccaacctggacgtggccgagcgcgcccgggagaacaaaagctcactgagcgtggccctggacaagcttcgggcccagaagagtgacccagagcacccgggaaggctggtggtggaggtggcgctgggtaacgcagcccgggctctggacctgctgcggaggcgcccagagcaggtggacaccaagaaccaaggcaggaccgctctgcaagtggctgcctacctgggccaggtggagttgatacggctgctgctacaagccagggcgggcgtggacctgccggacgacgagggcaacacggcactgcactacgcggccctggggaaccagcccgaggccaccagggtgctcctgagtgctgggtgccgggcggacgccatcaacagcacccagagcacagcactgcacgtggccgtgcagaggggcttcctggaggtggtgcgggccctgtgtgagcgcggctgtgacgtcaacctgcccgacgcccactcggacacgcccctgcactccgccatctcggcgggcactggagccagcggcattgtcgaggtcctcacggaggtgccaaacatcgatgttaccgccaccaacagccagggtttcaccctgctgcaccatgcctccctcaagggtcacgcgctagctgtgagaaagattctggctcgggcgcggcagctggtggacgccaagaaggaggacggcttcacggcgctgcatctggctgccctcaacaaccaccgcgaggtggcccagatcctcatccgggagggccgctgtgacgtgaacgtgcgcaaccggaagctgcagtccccgctgcatctcgccgtgcaacaggcccacgtggggctggtgccgctactggtggacgctgggtgcagtgtcaacgccgaggacgaggagggggacacagccctgcacgtggcgctgcagcgtcatcagctgctgcccctggtggctgatggggccgggggggacccagggcccttgcagctgctgtccaggctacaggcctcgggcctccccggcagcgcggagctgacggtgggcgcggcggtcgcctgcttcctggcgctggagggcgccgacgtgagctacaccaaccaccgcggtcggagcccgctggacctggccgccgagggtcgcgtgctcaaggcccttcagggctgcgcccagcgcttccgggagcggcaggcgggcgggggcgcggccccgggccccaggcaaacgctcgggacccccaacaccgtgacgaacctgcacgtgggcgccgcgccggggcccgaggccgctgagtgcctggtgtgctccgagctggcgctgctggtgctgttctcgccgtgccagcaccgcaccgtgtgtgaggagtgcgcgcgcaggatgaagaagtgcatcaggtgccaggtggtcgtcagcaagaaactgcgcccagacggctctgaggtggcgagcgccgcccccgcccccggcccgccgcgccagctggtggaggagctgcagagccgctaccggcagatggaggaacgcatcacctgccccatctgcatcgacagccacatccgcctcgtgttccagtgcggccacggcgcatgcgccccctgcggctccgcgctcagcgcctgccccatctgccgccagcccatccgcgaccgcatccagatcttcgtgtgagccgcgccgtccgccgcgcccgagctgccttcgcgtgcccccgccctgtgttttataaaaagaaagattctcgga

SEQ ID NO: 154104 - DNA, 3321 bp, Homo sapiens
  Payload ID: 10282
  Gene Symbol: MIB2
  Gene Name: mindbomb E3 ubiquitin protein ligase 2
  Uniprot ID: Q96AX9
  ENST ID: ENST00000520777
  CDS Start-End: 46-3246
acttccggtgcttgccctgcccatccccgtggcgggggcgtggccatggcgggggcgctccggcgggggcgggccctgggctcccgcccttcgggtcccacagtttccagccgccgctctcctcagtgcccggtggcccaggagggcctgggagcccgaagccgtccccgagtcgctcctaggtcactggcgcgatgcgggccgtcctctcggctgatgggttggaagcccagcgaggctagaggccagtcccaaagtttccaggcatcagggctgcagcccaggagcctcaaggcggcccggcgggcgactggacggccggacaggtcccgagcagcccggcccaccatggacccctctgcccacaggtcccgagcagccccgcccaacatggacccagacccccaggcgggcgtgcaggtgggcatgcgggtggtgcgcggcgtggactggaagtggggccagcaggacggcggcgagggcggcgtgggcacggtggtggagcttggccgccacggcagcccctcgacacccgaccgcacagtggtcgtgcagtgggaccagggcacgcgcaccaactaccgcgccggctaccagggcgcgcacgacctgctgctgtacgacaacgcccagatcggcgtccggcaccccaacatcatctgtgactgctgcaagaagcacgggctgcgggggatgcgctggaagtgccgtgtgtgcctggactacgacctctgcacgcagtgctacatgcacaacaagcatgagctcgcccacgccttcgaccgctacgagaccgctcactcgcgccctgtcacactgagtccccgccagggcctcccgaggatcccactaaggggcatcttccagggagcgaaggtggtgcgaggccccgactgggagtggggctcacaggatggaggggaagggaaaccgggccgtgtggtggacatccgtggctgggatgtggagacaggccggagtgtggccagcgtgacgtgggctgatggtaccaccaatgtgtaccgtgtgggccacaagggcaaggtggacctcaagtgtgtgggcgaggcagcgggcggcttctactacaaggaccacctcccaaggctcggcaagccggcggagctgcagcgcagggtgagtgctgacagccagcccttccagcacggggacaaggtcaagtgtctgctggacactgatgtcctgcgggagatgcaggaaggccacggcggctggaaccccaggatggcggagacgggcaccgtgcatcgtatcacggaccgcggggacgtgcgcgtgcagttcaaccacgagacgcgctggaccttccaccccggggcgctcaccaagcaccactccttctgggtgggcgacgtggtccgggtcatcggcgaccttgacacagtgaagcggctgcaggctgggcatggcgagtggacggacgacatggcccctgccctgggccgcgtcgggaaggtggtgaaagtgtttggagacgggaacctgcgtgtagcagtcgctggtcagcggtggaccttcagcccctcctgcctggtggcctaccggcccgaggaggatgccaacctggacgtggccgagcgcgcccgggagaacaaaagctcactgagcgtggccctggacaagcttcgggcccagaagagtgacccagagcacccgggaaggctggtggtggaggtggcgctgggtaacgcagcccgggctctggacctgctgcggaggcgcccagagcaggtggacaccaagaaccaaggcaggaccgctctgcaagtggctgcctacctgggccaggtggagttgatacggctgctgctacaagccagggcgggcgtggacctgccggacgacgagggcaacacggcactgcactacgcggccctggggaaccagcccgaggccaccagggtgctcctgagtgctgggtgccgggcggacgccatcaacagcacccagagcacagcactgcacgtggccgtgcagaggggcttcctggaggtggtgcgggccctgtgtgagcgcggctgtgacgtcaacctgcccgacgcccactcggacacgcccctgcactccgccatctcggcgggcactggagccagcggcattgtcgaggtcctcacggaggtgccaaacatcgatgttaccgccaccaacagccagggtttcaccctgctgcaccatgcctccctcaagggtcacgcgctagctgtgagaaagattctggctcgggcgcggcagctggtggacgccaagaaggaggacggcttcacggcgctgcatctggctgccctcaacaaccaccgcgaggtggcccagatcctcatccgggagggccgctgtgacgtgaacgtgcgcaaccggaagctgcagtccccgctgcatctcgccgtgcaacaggcccacgtggggctggtgccgctactggtggacgctgggtgcagtgtcaacgccgaggacgaggagggggacacagccctgcacgtggcgctgcagcgtcatcagctgctgcccctggtggctgatggggccgggggggacccagggcccttgcagctgctgtccaggctacaggcctcgggcctccccggcagcgcggagctgacggtgggcgcggcggtcgcctgcttcctggcgctggagggcgccgacgtgagctacaccaaccaccgcggtcggagcccgctggacctggccgccgagggtcgcgtgctcaaggcccttcagggctgcgcccagcgcttccgggagcggcaggcgggcgggggcgcggccccgggccccaggcaaacgctcgggacccccaacaccgtgacgaacctgcacgtgggcgccgcgccggggcccgaggccgctgagtgcctggtgtgctccgagctggcgctgctggtgctgttctcgccgtgccagcaccgcaccgtgtgtgaggagtgcgcgcgcaggatgaagaagtgcatcaggtgccaggtggtcgtcagcaagaaactgcgcccagacggctctgaggtggcgagcgccgcccccgcccccggcccgccgcgccagctggtggaggagctgcagagccgctaccggcagatggaggaacgcatcacctgccccatctgcatcgacagccacatccgcctcgtgttccagtgcggccacggcgcatgcgccccctgcggctccgcgctcagcgcctgccccatctgccgccagcccatccgcgaccgcatccagatcttcgtgtgagccgcgccgtccgccgcgcccgagctgccttcgcgtgcccccgccctgtgttttataaaaagaaagattctcgga

SEQ ID NO: 154105 - DNA, 568 bp, Homo sapiens
  Payload ID: 10282
  Gene Symbol: MIB2
  Gene Name: mindbomb E3 ubiquitin protein ligase 2
  ENST ID: ENST00000486072
  CDS Start-End: 1-174
gtgcatcgtatcacggaccgcggggacgtgcgcgtgcagttcaaccacgagacgcgctggaccttccaccccggggcgctcaccaagcttcccagggccagccacctcggcttcacacctgcccagagctggcttctgtctgcctggacactcctcccatggctctggggctagggacacccagggctgccttggacacctggggctctcgtccagccagagcctctggcagtgcctggggtcggggtcggggccggggccgagtcaggcctgcctgtctcgtggagctcagcaggttgccctcctgttgcatgagcctgggcagccacacacagctggggggcccctcacgcccctctttgtcgctcagcaccactccttctgggtgggcgacgtggtccgggtcatcggcgaccttgacacagtgaagcggctgcaggctgggcatggcgagtggacggacgacatggcccctgccctgggccgcgtcgggaaggtggtgaaagtgtttggagacgggaacctgcgtgtagcagtcgctggtcagcggtggaccttcagcccctcc

SEQ ID NO: 154106 - DNA, 1058 bp, Homo sapiens
  Payload ID: 10282
  Gene Symbol: MIB2
  Gene Name: mindbomb E3 ubiquitin protein ligase 2
  ENST ID: ENST00000483015
  CDS Start-End: 1-999
ggccgctgtgacgtgaacgtgcgcaaccggaagctgcagtccccgctgcatctcgccgtgcaacaggcccacgtggggctggtgccgctactggtggacgctgggtgcagtgtcaacgccgaggacgaggagggggacacagccctgcacgtggcgctgcagcgtcatcagctgctgcccctggtggctgatggggccgggggggacccagggcccttgcagctgctgtccaggacatggggcgccggctgctggggctgccaggtgccaggagacgcctccctcgggcctgccccggcgcccgccctcaccggcgtctgtcctgccgcccagctacaggcctcgggcctccccggcagcgcggagctgacggtgggcgcggcggtcgcctgcttcctggcgctggagggcgccgacgtgagctacaccaaccaccgcggtcggagcccgctggacctggccgccgagggtcgcgtgctcaaggcccttcagggctgcgcccagcgcttccgggagcggcaggcgggcgggggcgcggccccgggccccaggcaaacgctcgggacccccaacaccgtgacgaacctgcacgtgggcgccgcgccggggcccgaggccgctgagtgcctggtgtgctccgagctggcgctgctggtgctgttctcgccgtgccagcaccgcaccgtgtgtgaggagtgcgcgcgcaggatgaagaagtgcatcaggtgccaggtggtcgtcagcaagaaactgcgcccagacggctctgaggtggcgagcgccgcccccgcccccggcccgccgcgccagctggtggaggagctgcagagccgctaccggcagatggaggaacgcatcacctgccccatctgcatcgacagccacatccgcctcgtgttccagtgcggccacggcgcatgcgccccctgcggctccgcgctcagcgcctgccccatctgccgccagcccatccgcgaccgcatccagatcttcgtgtgagccgcgccgtccgccgcgcccgagctgccttcgcgtgcccccgccctgtgttttataaa

SEQ ID NO: 154107 - DNA, 4587 bp, Homo sapiens
  Payload ID: 10283
  Gene Symbol: MCM10
  Gene Name: minichromosome maintenance 10 replication initiation factor
  ENST ID: ENST00000378694
  CDS Start-End: 76-2643
ccaagattctacattgctcatctgggcatctgagcctccttcgaagtttcctgtcacaactgtcctcttgacagcatggatgaggaggaagacaatctgtctctgctgaccgcactgctggaagaaaatgagtcagccttggattgtaattcagaagaaaataacttcttgacgcgggaaaatggcgagcccgacgcatttgatgagctctttgatgccgacggcgacggtgaatcttatacagaagaggctgatgatggagaaacaggagagacaagagacgaaaaggaaaatctggccactctctttggagatatggaggacttaacagatgaagaagaagttcccgcatcacagtcaactgaaaatagggtcctccctgctcctgcccccaggcgagagaaaacgaatgaagagttgcaagaggaattaaggaatttgcaagagcaaatgaaggccttacaagagcagctaaaagtaacaacaattaaacagacagcaagcccagcccgtctgcaaaaatcccctgagaagtctccccggccacctcttaaggagaggagagttcagagaattcaggagtcaacatgcttttctgcggagcttgatgtccctgcgctaccaagaaccaagagggtggctcgaacaccaaaggcttcacctccagatcccaaaagctcatcttcaaggatgacaagtgcaccctcccaacccctacagacgatttctcggaacaaacctagtgggataactagaggtcaaattgtggggaccccaggaagttctggggaaacgactcaacccatctgtgtggaagccttctctggtctgcggctcaggcggcctcgagtatcctccacagaaatgaacaagaaaatgaccggccgaaaactgatcagactgtctcagatcaaggaaaagatggccagagagaagctggaagaaatagattgggtgacatttggggttatattgaagaaggttacgccacagagtgtgaatagtggaaaaaccttcagcatatggaaactgaatgatcttcgtgacctgacacaatgtgtgtccttgttcttatttggagaagttcacaaagcgctctggaagacggagcaggggactgtcgtagggatcctcaatgccaaccccatgaagcccaaggatggttcagaggaggtgtgtttatctatcgatcatcctcagaaggtcttaattatgggtgaagctcttgacctgggaacctgtaaagccaagaagaagaatggagagccgtgcacgcagactgtgaatttgcgtgactgtgagtactgtcagtaccatgtccaggctcagtacaagaagctcagcgcaaagcgtgcggatctgcagtccaccttctctggaggacgaattccaaagaagtttgcccgcagaggcaccagcctcaaagaacggctgtgccaagatggcttttactacggaggggtttcttctgcctcgtatgcagcttcaattgcagcagctgtggctcctaagaagaagattcaaaccactctgagtaatctggttgttaagggcacaaacttgatcatccaggaaacacggcaaaaactcggaataccccagaagagcctgtcttgctctgaggagttcaaggaactgatggacctgccgacgtgtggagccaggaacttaaaacaacatttagccaaagccacagcttcagggattatggggagcccaaaaccagccatcaagtccatctcggcctcagcactcttgaagcaacagaagcagcggatgttggagatgaggagaaggaaatcagaagaaatacagaagcgatttctgcagagctcaagtgaagttgagagcccagctgtgccatcttcatcaagacagccccctgctcagcctccacggacaggatccgagttccccaggctggagggagccccggccacaatgacgcccaagctggggcgaggtgtcttggaaggagatgatgttctcttttatgatgagtcaccaccaccaagaccaaaactgagtgctttagcagaagccaaaaagttagctgctatcaccaaattaagggcaaaaggccaggttcttacaaaaacaaacccaaacagcattaagaagaaacaaaaggaccctcaggacatcctggaggtgaaggaacgtgtagaaaaaaacaccatgttttcttctcaagctgaggatgaattggagcctgccaggaaaaaaaggagagaacaacttgcctatctggaatctgaggaatttcagaaaatcctaaaagcaaaatcaaaacacacaggcatcctgaaagaggccgaggctgagatgcaggagcgctactttgagccactggtgaaaaaagaacaaatggaagaaaagatgagaaacatcagagaagtgaagtgccgtgtcgtgacatgcaagacgtgcgcctatacccacttcaagctgctggagacctgcgtcagtgagcagcatgaataccactggcatgatggtgtgaagaggtttttcaaatgtccctgtggaaacagaagcatctccttggacagactcccgaacaagcactgcagtaactgtggcctctacaaatgggaacgggacggaatgctaaaggtatgccatttgcgtactaatttttgactccttttagtgacccatgctaataatgtggaaccatctcctattaaaatattttcatttttctaggaaaagactggtccaaagataggaggagaaactctgttaccaagaggagaagaacatgctaaatttctgaacagccttaaataacccgaacttcagacattttcccacagacttcctggcctcctgtgactctggaaagcaaaggattggctgtgtattgtccattgattcctgattgacgccgtcaaaaacaaatgcttgttaagcccataagctttgcctgcttactttctgccattgggttggtttgataccacatttaacattgacatttaagtggaaaaccaagttatcattgtcttttctaagctcagtgtggatgattgcattacttcattcactgaagtttttgcccaaaaattggaaggtaaacagagagctatgtttctgtatcttttggttatagagtgttcacttctttatcataacaaaattctagtgtttatacgaacacccagaggcaaaagaatttggcttaattctcactccaggtaagtagcttaacttctgggcttcagttttctcatctgtaaaatcaggaagattggactaagtgatcctgaaatgtattttttagcactggatttctacaaataataaaactttcccatctagataatgatgatcacatagtcttgatgtacggacattaaaagccagatttcttcattcaattctgttatctctgttttactctttgaaattgatcaagccactgaatcactttgcatttcagtttatatatatagagagaaagaaggtgtctgctcttacattattgtggagccctgtgatagaaatatgtaaaatctcatattattttttttttaatttttttattttttatgacagggtctcactatgtcaccctggctggagtgcagtagtgcgatcgcggcacactgcagccttggcttccctgggctcaagcagtcctcccacctcagtctcccaaatagctaggactacaggcgtgcgtgaccaagcccagctaatttttgcattttttgtagagatggggttttgccatgttgctcaggctggtctcaaactcctgagcactagcaatccacccacctctgtttccaaaaaaaaaaaaaaaatgaaaggtcaacccctatgcaaattaccacagcaaaggtttcattcaggagattcttccatctgggcaacctggttttccaaatatcatttgacctaagtgaatgttgatactagctaaagattgggtaaattggttgaattattgtattgaagcttgagctgtagctaaaagtaatttaggtttcccctaagatgttattatgttagggacataacacttttgggaggttgttgtgggagatggttgatttaggttttcaaaagctagaaataaaatttacatgccttagatttcataaaattctgctctaattgggtggaaggtgctgtatctaacttgtgttcctcctaaggttatgtcctaataactattcttttaggagtatacttctactttatagaaggttgcttttctttttaattttttctaacaaagaaaagaataaagtatttattaataagaaccagaaagcacttgaaactgatgtttttaatggctcatttagggtagatttatttatctcattaacttaaaacagctatgtgtatgaaataggtcacaacagaacttgaacaccaggttggtgtctgagcaatccctttcttatgggaaaaacaatgttcttgtttgaacagagggtatcattgcagtcagtattcacgtgtatattgttatataagttgtataatatgcttgtaaaggctgagggtgagctgtatctggatgcctttttacaatttgattttaacttttaaaataaatttaaaacataa

SEQ ID NO: 154108 - DNA, 4547 bp, Homo sapiens
  Payload ID: 10283
  Gene Symbol: MCM10
  Gene Name: minichromosome maintenance 10 replication initiation factor
  Uniprot ID: Q7L590
  ENST ID: ENST00000378714
  CDS Start-End: 129-2753
ggttggaattttggcgggttcagctgtgaacgaagaaggcgtcccggcatcggccaagattctacattgctcatctgggcatctgagcctccttcgaagtttcctgtcacaactgtcctcttgacagcatggatgaggaggaagacaatctgtctctgctgaccgcactgctggaagaaaatgagtcagccttggattgtaattcagaagaaaataacttcttgacgcgggaaaatggcgagcccgacgcatttgatgagctctttgatgccgacggcgacggtgaatcttatacagaagaggctgatgatggagaaacaggagagacaagagacgaaaaggaaaatctggccactctctttggagatatggaggacttaacagatgaagaagaagttcccgcatcacagtcaactgaaaatagggtcctccctgctcctgcccccaggcgagagaaaacgaatgaagagttgcaagaggaattaaggaatttgcaagagcaaatgaaggccttacaagagcagctaaaagtaacaacaattaaacagacagcaagcccagcccgtctgcaaaaatcccctgagaagtctccccggccacctcttaaggagaggagagttcagagaattcaggagtcaacatgcttttctgcggagcttgatgtccctgcgctaccaagaaccaagagggtggctcgaacaccaaaggcttcacctccagatcccaaaagctcatcttcaaggatgacaagtgcaccctcccaacccctacagacgatttctcggaacaaacctagtgggataactagaggtcaaattgtggggaccccaggaagttctggggaaacgactcaacccatctgtgtggaagccttctctggtctgcggctcaggcggcctcgagtatcctccacagaaatgaacaagaaaatgaccggccgaaaactgatcagactgtctcagatcaaggaaaagatggccagagagaagctggaagaaatagattgggtgacatttggggttatattgaagaaggttacgccacagagtgtgaatagtggaaaaaccttcagcatatggaaactgaatgatcttcgtgacctgacacaatgtgtgtccttgttcttatttggagaagttcacaaagcgctctggaagacggagcaggggactgtcgtagggatcctcaatgccaaccccatgaagcccaaggatggttcagaggaggtgtgtttatctatcgatcatcctcagaaggtcttaattatgggtgaagctcttgacctgggaacctgtaaagccaagaagaagaatggagagccgtgcacgcagactgtgaatttgcgtgactgtgagtactgtcagtaccatgtccaggctcagtacaagaagctcagcgcaaagcgtgcggatctgcagtccaccttctctggaggacgaattccaaagaagtttgcccgcagaggcaccagcctcaaagaacggctgtgccaagatggcttttactacggaggggtttcttctgcctcgtatgcagcttcaattgcagcagctgtggctcctaagaagaagattcaaaccactctgagtaatctggttgttaagggcacaaacttgatcatccaggaaacacggcaaaaactcggaataccccagaagagcctgtcttgctctgaggagttcaaggaactgatggacctgccgacgtgtggagccaggaacttaaaacaacatttagccaaagccacagcttcagggattatggggagcccaaaaccagccatcaagtccatctcggcctcagcactcttgaagcaacagaagcagcggatgttggagatgaggagaaggaaatcagaagaaatacagaagcgatttctgcagagctcaagtgaagttgagagcccagctgtgccatcttcatcaagacagccccctgctcagcctccacggacaggatccgagttccccaggctggagggagccccggccacaatgacgcccaagctggggcgaggtgtcttggaaggagatgatgttctcttttatgatgagtcaccaccaccaagaccaaaactgagtgctttagcagaagccaaaaagttagctgctatcaccaaattaagggcaaaaggccaggttcttacaaaaacaaacccaaacagcattaagaagaaacaaaaggaccctcaggacatcctggaggtgaaggaacgtgtagaaaaaaacaccatgttttcttctcaagctgaggatgaattggagcctgccaggaaaaaaaggagagaacaacttgcctatctggaatctgaggaatttcagaaaatcctaaaagcaaaatcaaaacacacaggcatcctgaaagaggccgaggctgagatgcaggagcgctactttgagccactggtgaaaaaagaacaaatggaagaaaagatgagaaacatcagagaagtgaagtgccgtgtcgtgacatgcaagacgtgcgcctatacccacttcaagctgctggagacctgcgtcagtgagcagcatgaataccactggcatgatggtgtgaagaggtttttcaaatgtccctgtggaaacagaagcatctccttggacagactcccgaacaagcactgcagtaactgtggcctctacaaatgggaacgggacggaatgctaaaggaaaagactggtccaaagataggaggagaaactctgttaccaagaggagaagaacatgctaaatttctgaacagccttaaataacccgaacttcagacattttcccacagacttcctggcctcctgtgactctggaaagcaaaggattggctgtgtattgtccattgattcctgattgacgccgtcaaaaacaaatgcttgttaagcccataagctttgcctgcttactttctgccattgggttggtttgataccacatttaacattgacatttaagtggaaaaccaagttatcattgtcttttctaagctcagtgtggatgattgcattacttcattcactgaagtttttgcccaaaaattggaaggtaaacagagagctatgtttctgtatcttttggttatagagtgttcacttctttatcataacaaaattctagtgtttatacgaacacccagaggcaaaagaatttggcttaattctcactccaggtaagtagcttaacttctgggcttcagttttctcatctgtaaaatcaggaagattggactaagtgatcctgaaatgtattttttagcactggatttctacaaataataaaactttcccatctagataatgatgatcacatagtcttgatgtacggacattaaaagccagatttcttcattcaattctgttatctctgttttactctttgaaattgatcaagccactgaatcactttgcatttcagtttatatatatagagagaaagaaggtgtctgctcttacattattgtggagccctgtgatagaaatatgtaaaatctcatattattttttttttaatttttttattttttatgacagggtctcactatgtcaccctggctggagtgcagtagtgcgatcgcggcacactgcagccttggcttccctgggctcaagcagtcctcccacctcagtctcccaaatagctaggactacaggcgtgcgtgaccaagcccagctaatttttgcattttttgtagagatggggttttgccatgttgctcaggctggtctcaaactcctgagcactagcaatccacccacctctgtttccaaaaaaaaaaaaaaaatgaaaggtcaacccctatgcaaattaccacagcaaaggtttcattcaggagattcttccatctgggcaacctggttttccaaatatcatttgacctaagtgaatgttgatactagctaaagattgggtaaattggttgaattattgtattgaagcttgagctgtagctaaaagtaatttaggtttcccctaagatgttattatgttagggacataacacttttgggaggttgttgtgggagatggttgatttaggttttcaaaagctagaaataaaatttacatgccttagatttcataaaattctgctctaattgggtggaaggtgctgtatctaacttgtgttcctcctaaggttatgtcctaataactattcttttaggagtatacttctactttatagaaggttgcttttctttttaattttttctaacaaagaaaagaataaagtatttattaataagaaccagaaagcacttgaaactgatgtttttaatggctcatttagggtagatttatttatctcattaacttaaaacagctatgtgtatgaaataggtcacaacagaacttgaacaccaggttggtgtctgagcaatccctttcttatgggaaaaacaatgttcttgtttgaacagagggtatcattgcagtcagtattcacgtgtatattgttatataagttgtataatatgcttgtaaaggctgagggtgagctgtatctggatgcctttttacaatttgattttaacttttaaaataaatttaaaacataa

SEQ ID NO: 154109 - DNA, 469 bp, Homo sapiens
  Payload ID: 10283
  Gene Symbol: MCM10
  Gene Name: minichromosome maintenance 10 replication initiation factor
  ENST ID: ENST00000479669
  CDS Start-End: 262-469
gtgaacgaagaaggcgtcccggcatcggaggaggaagacaatctgtctctgctgaccgcactgctggaagaaaatgagtcagccttggattgtaattcagaagaaaataacttcttgacgcgggaaaatggcgagcccgacgcatttgatgagctctttgatgccgacggcgacggtgaatcttatacagaagaggctgatgatggagaaacaggagagacaagagacgaaaaggaaaatctggccactctctttggagatatggaggacttaacagatgaagaagaagttcccgcatcacagtcaactgaaaatagggtcctccctgctcctgcccccaggcgagagaaaacgaatgaagagttgcaagaggaattaaggaatttgcaagagcaaatgaaggccttacaagagcagctaaaagtaacaacaattaaacagacagcaagcccagcccgtctgcaaaaat

SEQ ID NO: 154110 - DNA, 3157 bp, Homo sapiens
  Payload ID: 10283
  Gene Symbol: MCM10
  Gene Name: minichromosome maintenance 10 replication initiation factor
  Uniprot ID: Q7L590
  ENST ID: ENST00000484800
  CDS Start-End: 104-2731
gtgaacgaagaaggcgtcccggcatcggccaagattctacattgctcatctgggcatctgagcctccttcgaagtttcctgtcacaactgtcctcttgacagcatggatgaggaggaagacaatctgtctctgctgaccgcactgctggaagaaaatgagtcagccttggattgtaattcagaagaaaataacttcttgacgcgggaaaatggcgagcccgacgcatttgatgagctctttgatgccgacggcgacggtgaatcttatacagaagaggctgatgatggagaaacaggagagacaagagacgaaaaggaaaatctggccactctctttggagatatggaggacttaacagatgaagaagaagttcccgcatcacagtcaactgaaaatagggtcctccctgctcctgcccccaggcgagagaaaacgaatgaagagttgcaagaggaattaaggaatttgcaagagcaaatgaaggccttacaagagcagctaaaagtaacaacaattaaacagacagcaagcccagcccgtctgcaaaaatcccctgtagagaagtctccccggccacctcttaaggagaggagagttcagagaattcaggagtcaacatgcttttctgcggagcttgatgtccctgcgctaccaagaaccaagagggtggctcgaacaccaaaggcttcacctccagatcccaaaagctcatcttcaaggatgacaagtgcaccctcccaacccctacagacgatttctcggaacaaacctagtgggataactagaggtcaaattgtggggaccccaggaagttctggggaaacgactcaacccatctgtgtggaagccttctctggtctgcggctcaggcggcctcgagtatcctccacagaaatgaacaagaaaatgaccggccgaaaactgatcagactgtctcagatcaaggaaaagatggccagagagaagctggaagaaatagattgggtgacatttggggttatattgaagaaggttacgccacagagtgtgaatagtggaaaaaccttcagcatatggaaactgaatgatcttcgtgacctgacacaatgtgtgtccttgttcttatttggagaagttcacaaagcgctctggaagacggagcaggggactgtcgtagggatcctcaatgccaaccccatgaagcccaaggatggttcagaggaggtgtgtttatctatcgatcatcctcagaaggtcttaattatgggtgaagctcttgacctgggaacctgtaaagccaagaagaagaatggagagccgtgcacgcagactgtgaatttgcgtgactgtgagtactgtcagtaccatgtccaggctcagtacaagaagctcagcgcaaagcgtgcggatctgcagtccaccttctctggaggacgaattccaaagaagtttgcccgcagaggcaccagcctcaaagaacggctgtgccaagatggcttttactacggaggggtttcttctgcctcgtatgcagcttcaattgcagcagctgtggctcctaagaagaagattcaaaccactctgagtaatctggttgttaagggcacaaacttgatcatccaggaaacacggcaaaaactcggaataccccagaagagcctgtcttgctctgaggagttcaaggaactgatggacctgccgacgtgtggagccaggaacttaaaacaacatttagccaaagccacagcttcagggattatggggagcccaaaaccagccatcaagtccatctcggcctcagcactcttgaagcaacagaagcagcggatgttggagatgaggagaaggaaatcagaagaaatacagaagcgatttctgcagagctcaagtgaagttgagagcccagctgtgccatcttcatcaagacagccccctgctcagcctccacggacaggatccgagttccccaggctggagggagccccggccacaatgacgcccaagctggggcgaggtgtcttggaaggagatgatgttctcttttatgatgagtcaccaccaccaagaccaaaactgagtgctttagcagaagccaaaaagttagctgctatcaccaaattaagggcaaaaggccaggttcttacaaaaacaaacccaaacagcattaagaagaaacaaaaggaccctcaggacatcctggaggtgaaggaacgtgtagaaaaaaacaccatgttttcttctcaagctgaggatgaattggagcctgccaggaaaaaaaggagagaacaacttgcctatctggaatctgaggaatttcagaaaatcctaaaagcaaaatcaaaacacacaggcatcctgaaagaggccgaggctgagatgcaggagcgctactttgagccactggtgaaaaaagaacaaatggaagaaaagatgagaaacatcagagaagtgaagtgccgtgtcgtgacatgcaagacgtgcgcctatacccacttcaagctgctggagacctgcgtcagtgagcagcatgaataccactggcatgatggtgtgaagaggtttttcaaatgtccctgtggaaacagaagcatctccttggacagactcccgaacaagcactgcagtaactgtggcctctacaaatgggaacgggacggaatgctaaaggaaaagactggtccaaagataggaggagaaactctgttaccaagaggagaagaacatgctaaatttctgaacagccttaaataacccgaacttcagacattttcccacagacttcctggcctcctgtgactctggaaagcaaaggattggctgtgtattgtccattgattcctgattgacgccgtcaaaaacaaatgcttgttaagcccataagctttgcctgcttactttctgccattgggttggtttgataccacatttaacattgacatttaagtggaaaaccaagttatcattgtcttttctaagctcagtgtggatgattgcattacttcattcactgaagtttttgcccaaaaattggaaggtaaacagagagctatgtttctgtatcttttggttatagagtgttcacttctttatcataacaaaattctagtgtttatacgaacacccagaggcaaaagaatttggcttaattctcactccaggtaagtagcttaacttctg

SEQ ID NO: 154111 - DNA, 3442 bp, Homo sapiens
  Payload ID: 10284
  Gene Symbol: MCM8
  Gene Name: minichromosome maintenance 8 homologous recombination repair factor
  Uniprot ID: Q9UJA3
  ENST ID: ENST00000265187
  CDS Start-End: 153-2627
agggagggagaatccggccggacagatctgcgcgtatcctggagccggcccagttgtgaactaggagagctttgggacctctgtcccaagcaagtaagaactttagccttaggagatgtaaataaagtagtatttgaagaagcacaggagagatgaatggagagtatagaggcagaggatttggacgaggaagatttcaaagctggaaaaggggaagaggtggtgggaacttctcaggaaaatggagagaaagagaacacagacctgatctgagtaaaaccacaggaaaacgtacttctgaacaaaccccacagtttttgctttcaacaaagaccccacagtcaatgcagtcaacattggatcgattcataccatataaaggctggaagctttatttctctgaagtttacagcgatagctctcctttgattgagaagattcaagcatttgaaaaatttttcacaaggcatattgatttgtatgacaaggatgaaatagaaagaaagggaagtattttggtagattttaaagaactgacagaaggtggtgaagtaactaacttgataccagatatagcaactgaactaagagatgcacctgagaaaaccttggcttgcatgggtttggcaatacatcaggtgttaactaaggaccttgaaaggcatgcagctgagttacaagcccaggaaggattgtctaatgatggagaaacaatggtaaatgtgccacatattcatgcaagggtgtacaactatgagcctttgacacagctcaagaatgtcagagcaaattactatggaaaatacattgctctaagagggacagtggttcgtgtcagtaatataaagcctctttgcaccaagatggcttttctttgtgctgcatgtggagaaattcagagctttcctcttccagatggaaaatacagtcttcccacaaagtgtcctgtgcctgtgtgtcgaggcaggtcatttactgctctccgcagctctcctctcacagttacgatggactggcagtcaatcaaaatccaggaattgatgtctgatgatcagagagaagcaggtcggattccacgaacaatagaatgtgagcttgttcatgatcttgtggatagctgtgtcccgggagacacagtgactattactggaattgtcaaagtctcaaatgcggaagaagcaaattctattagtaatagcaaaggacagaaaacaaagagttctgaggatgggtgtaagcatggaatgttgatggagttctcacttaaagacctttatgccatccaagagattcaagctgaagaaaacctgtttaaactcattgtcaactcgctttgccctgtcatttttggtcatgaacttgttaaagcaggtttggcattagcactctttggaggaagccagaaatacgcagatgacaaaaacagaattccaattcggggagacccccacatccttgttgttggagatccaggcctaggaaaaagtcaaatgctacaggcagcgtgcaatgttgccccacgtggcgtgtatgtttgtggtaacaccacgaccacctctggtctgacggtaactctttcaaaagatagttcctctggagattttgctttggaagctggtgccctggtacttggtgatcaaggtatttgtggaatcgatgaatttgataagatggggaatcaacatcaagccttgttggaagccatggagcagcaaagtattagtcttgctaaggctggtgtggtttgtagccttcctgcaagaacttccattattgctgctgcaaatccagttggaggacattacaataaagccaaaacagtttctgagaatttaaaaatggggagtgcactactatccagatttgatttggtctttatcctgttagatactccaaatgagcatcatgatcacttactctctgaacatgtgattgcaataagagctggaaagcagagaaccattagcagtgccacagtagctcgtatgaatagtcaagattcaaatacttccgtacttgaagtagtttctgagaagccattatcagaaagactaaaggtggttcctggagaaacaatagatcccattccccaccagctattgagaaagtacattggctatgctcggcagtatgtgtacccaaggctatccacagaagctgctcgagttcttcaagatttttaccttgagctccggaaacagagccagaggttaaatagctcaccaatcactaccaggcagctggaatctttgattcgtctgacagaggcacgagcaaggttggaattgagagaggaagcaaccaaagaagacgctgaggatatagtggaaattatgaaatatagcatgctaggaacttactctgatgaatttgggaacctagattttgagcgatcccagcatggttctggaatgagcaacaggtcaacagcgaaaagatttatttctgctctcaacaacgttgctgaaagaacttataataatatatttcaatttcatcaacttcggcagattgccaaagaactaaacattcaggttgctgattttgaaaattttattggatcactaaatgaccagggttacctcttgaaaaaaggcccaaaagtttaccagcttcaaactatgtaaaaggacttcaccaagttagggcctcctgggtttattgcagattaaagccatctcagtgaagatatgcgtgcacgcacagacagacagacacacacacacacacacacacacacacacacacacacacacacagtcaaatactgttctctgaaaaatgatgtcccaaaagtattataataggaaaaaagcattaaatataataaactaatttaagaagtgataaagtctccagatgcagtagctcacactgtaatcacagtgactcaggaggctgaggtgagaggattccttgaggccagggttcgagaccaaccttgggcaacatagcaagaccccatttcttaaaaaaaaaaaaaaaaaatttaaacttagctgggtatggtggcacatgcctatagtctcagctacttgtgaggctgaggcaggaggattctttgagcccaggagtttgaggttacagtgagccacaatcacaccaatcactgcactccagcctgggcaataaagtaactcttgactcaaaaaaataaaaaaaattgtagtggtagccatgtgttaattgttaaataaattctccaaagggctaaaagtaaattacttataaattttttatagttgtatttttgacctgccttttatatgtatgaatatttcatagttttgcatatcagatgtaggcatacagacaaatacataaaccaatgaatatattacatattctgtgttccaataaaactttatttatggacactaaaatttgaatttcataaaattttcccatgtcaagaatacaaaatacttgagttttgttttta

SEQ ID NO: 154112 - DNA, 3574 bp, Homo sapiens
  Payload ID: 10284
  Gene Symbol: MCM8
  Gene Name: minichromosome maintenance 8 homologous recombination repair factor
  Uniprot ID: Q9UJA3
  ENST ID: ENST00000378883
  CDS Start-End: 378-2759
ctttgagcggaagttggatcactgaagcgccaaaaaagaatttaggggaagacctgattttcgcttgaggcatttttgcggcgctgtgcgctacagacaccttctggaagctgcggtggggaaactgagtttcccgagccgttgagacagatggggttcagcaccgcgcggggacgacaggaaagctgcggctgaagagaactgcggacttggcaggagtcgcctgaggagctaagatcccggagactcttagccccgtggtgcttctctacgggagggagggagggagaatccggccggacagatctgcgcgtatcctggagccggcccagttgtgaactaggagagctttgggacctctgtcccaagcaagagagatgaatggagagtatagaggcagaggatttggacgaggaagatttcaaagctggaaaaggggaagaggtggtgggaacttctcaggaaaatggagagaaagagaacacagacctgatctgagtaaaaccacaggaaaacgtacttctgaacaaaccccacagtttttgctttcaacaaagaccccacagtcaatgcagtcaacattggatcgattcataccatataaaggctggaagctttatttctctgaagtttacagcgatagctctcctttgattgagaagattcaagcatttgaaaaatttttcacaaggcatattgatttgtatgacaaggatgaaatagaaagaaagggaagtattttggtagattttaaagaactgacagaaggtggtgaagtaactaacttgataccagatatagcaactgaactaagagatgcacctgagaaaaccttggcttgcatgggtttggcaatacatcaggtgttaactaaggaccttgaaaggcatgcagctgagttacaagcccaggaaggattgtctaatgatggagaaacaatggtaaatgtgccacatattcatgcaagggtgtacaactatgagcctttgacacagctcaagaatgtcagagcaaattactatggaaaatacattgctctaagagggacagtggttcgtgtcagtaatataaagcctctttgcaccaagatggcttttctttgtgctgcatgtggagaaattcagagctttcctcttccagatggaaaatacagtcttcccacaaagtgtcctgtgcctgtgtgtcgaggcaggtcatttactgctctccgcagctctcctctcacagttacgatggactggcagtcaatcaaaatccaggaattgatgtctgatgatcagagagaagcaggtcggattccacgaacaatagaatgtgagcttgttcatgatcttgtggatagctgtgtcccgggagacacagtgactattactggaattgtcaaagtctcaaatgcggaagaaggttctcgaaataagaatgacaagtgtatgttccttttgtatattgaagcaaattctattagtaatagcaaaggacagaaaacaaagagttctgaggatgggtgtaagcatggaatgttgatggagttctcacttaaagacctttatgccatccaagagattcaagctgaagaaaacctgtttaaactcattgtcaactcgctttgccctgtcatttttggtcatgaagcagcgtgcaatgttgccccacgtggcgtgtatgtttgtggtaacaccacgaccacctctggtctgacggtaactctttcaaaagatagttcctctggagattttgctttggaagctggtgccctggtacttggtgatcaaggtatttgtggaatcgatgaatttgataagatggggaatcaacatcaagccttgttggaagccatggagcagcaaagtattagtcttgctaaggctggtgtggtttgtagccttcctgcaagaacttccattattgctgctgcaaatccagttggaggacattacaataaagccaaaacagtttctgagaatttaaaaatggggagtgcactactatccagatttgatttggtctttatcctgttagatactccaaatgagcatcatgatcacttactctctgaacatgtgattgcaataagagctggaaagcagagaaccattagcagtgccacagtagctcgtatgaatagtcaagattcaaatacttccgtacttgaagtagtttctgagaagccattatcagaaagactaaaggtggttcctggagaaacaatagatcccattccccaccagctattgagaaagtacattggctatgctcggcagtatgtgtacccaaggctatccacagaagctgctcgagttcttcaagatttttaccttgagctccggaaacagagccagaggttaaatagctcaccaatcactaccaggcagctggaatctttgattcgtctgacagaggcacgagcaaggttggaattgagagaggaagcaaccaaagaagacgctgaggatatagtggaaattatgaaatatagcatgctaggaacttactctgatgaatttgggaacctagattttgagcgatcccagcatggttctggaatgagcaacaggtcaacagcgaaaagatttatttctgctctcaacaacgttgctgaaagaacttataataatatatttcaatttcatcaacttcggcagattgccaaagaactaaacattcaggttgctgattttgaaaattttattggatcactaaatgaccagggttacctcttgaaaaaaggcccaaaagtttaccagcttcaaactatgtaaaaggacttcaccaagttagggcctcctgggtttattgcagattaaagccatctcagtgaagatatgcgtgcacgcacagacagacagacacacacacacacacacacacacacacacacacacacacacacagtcaaatactgttctctgaaaaatgatgtcccaaaagtattataataggaaaaaagcattaaatataataaactaatttaagaagtgataaagtctccagatgcagtagctcacactgtaatcacagtgactcaggaggctgaggtgagaggattccttgaggccagggttcgagaccaaccttgggcaacatagcaagaccccatttcttaaaaaaaaaaaaaaaaaatttaaacttagctgggtatggtggcacatgcctatagtctcagctacttgtgaggctgaggcaggaggattctttgagcccaggagtttgaggttacagtgagccacaatcacaccaatcactgcactccagcctgggcaataaagtaactcttgactcaaaaaaataaaaaaaattgtagtggtagccatgtgttaattgttaaataaattctccaaagggctaaaagtaaattacttataaattttttatagttgtatttttgacctgccttttatatgtatgaatatttcatagttttgcatatcagatgtaggcatacagacaaatacataaaccaatgaatatattacatattctgtgttccaataaaactttatttatggacactaaaatttgaatttcataaaattttcccatgtcaagaatacaaaatacttgagttttgttttta

SEQ ID NO: 154113 - DNA, 3835 bp, Homo sapiens
  Payload ID: 10284
  Gene Symbol: MCM8
  Gene Name: minichromosome maintenance 8 homologous recombination repair factor
  Uniprot ID: Q9UJA3
  ENST ID: ENST00000378886
  CDS Start-End: 378-3020
ctttgagcggaagttggatcactgaagcgccaaaaaagaatttaggggaagacctgattttcgcttgaggcatttttgcggcgctgtgcgctacagacaccttctggaagctgcggtggggaaactgagtttcccgagccgttgagacagatggggttcagcaccgcgcggggacgacaggaaagctgcggctgaagagaactgcggacttggcaggagtcgcctgaggagctaagatcccggagactcttagccccgtggtgcttctctacgggagggagggagggagaatccggccggacagatctgcgcgtatcctggagccggcccagttgtgaactaggagagctttgggacctctgtcccaagcaagagagatgaatggagagtatagaggcagaggatttggacgaggaagatttcaaagctggaaaaggggaagaggtggtgggaacttctcaggaaaatggagagaaagagaacacagacctgatctgagtaaaaccacaggaaaacgtacttctgaacaaaccccacagtttttgctttcaacaaagaccccacagtcaatgcagtcaacattggatcgattcataccatataaaggctggaagctttatttctctgaagtttacagcgatagctctcctttgattgagaagattcaagcatttgaaaaatttttcacaaggcatattgatttgtatgacaaggatgaaatagaaagaaagggaagtattttggtagattttaaagaactgacagaaggtggtgaagtaactaacttgataccagatatagcaactgaactaagagatgcacctgagaaaaccttggcttgcatgggtttggcaatacatcaggtgttaactaaggaccttgaaaggcatgcagctgagttacaagcccaggaaggattgtctaatgatggagaaacaatggtaaatgtgccacatattcatgcaagggtgtacaactatgagcctttgacacagctcaagaatgtcagagcaaattactatggaaaatacattgctctaagagggacagtggttcgtgtcagtaatataaagcctctttgcaccaagatggcttttctttgtgctgcatgtggagaaattcagagctttcctcttccagatggaaaatacagtcttcccacaaagtgtcctgtgcctgtgtgtcgaggcaggtcatttactgctctccgcagctctcctctcacagttacgatggactggcagtcaatcaaaatccaggaattgatgtctgatgatcagagagaagcaggtcggattccacgaacaatagaatgtgagcttgttcatgatcttgtggatagctgtgtcccgggagacacagtgactattactggaattgtcaaagtctcaaatgcggaagaaggttctcgaaataagaatgacaagtgtatgttccttttgtatattgaagcaaattctattagtaatagcaaaggacagaaaacaaagagttctgaggatgggtgtaagcatggaatgttgatggagttctcacttaaagacctttatgccatccaagagattcaagctgaagaaaacctgtttaaactcattgtcaaatggagtcttgctctgtcgcccaggctagagtacagtggtgcgatctcagctcactgcaacctccacctcccaagttcaaacagttctcccacctcagcctgccgagtagctgggactacaggcatgcgccaccagacccagctacttttgcttgttaaagcaggtttggcattagcactctttggaggaagccagaaatacgcagatgacaaaaacagaattccaattcggggagacccccacatccttgttgttggagatccaggcctaggaaaaagtcaaatgctacaggcagcgtgcaatgttgccccacgtggcgtgtatgtttgtggtaacaccacgaccacctctggtctgacggtaactctttcaaaagatagttcctctggagattttgctttggaagctggtgccctggtacttggtgatcaaggtatttgtggaatcgatgaatttgataagatggggaatcaacatcaagccttgttggaagccatggagcagcaaagtattagtcttgctaaggctggtgtggtttgtagccttcctgcaagaacttccattattgctgctgcaaatccagttggaggacattacaataaagccaaaacagtttctgagaatttaaaaatggggagtgcactactatccagatttgatttggtctttatcctgttagatactccaaatgagcatcatgatcacttactctctgaacatgtgattgcaataagagctggaaagcagagaaccattagcagtgccacagtagctcgtatgaatagtcaagattcaaatacttccgtacttgaagtagtttctgagaagccattatcagaaagactaaaggtggttcctggagaaacaatagatcccattccccaccagctattgagaaagtacattggctatgctcggcagtatgtgtacccaaggctatccacagaagctgctcgagttcttcaagatttttaccttgagctccggaaacagagccagaggttaaatagctcaccaatcactaccaggcagctggaatctttgattcgtctgacagaggcacgagcaaggttggaattgagagaggaagcaaccaaagaagacgctgaggatatagtggaaattatgaaatatagcatgctaggaacttactctgatgaatttgggaacctagattttgagcgatcccagcatggttctggaatgagcaacaggtcaacagcgaaaagatttatttctgctctcaacaacgttgctgaaagaacttataataatatatttcaatttcatcaacttcggcagattgccaaagaactaaacattcaggttgctgattttgaaaattttattggatcactaaatgaccagggttacctcttgaaaaaaggcccaaaagtttaccagcttcaaactatgtaaaaggacttcaccaagttagggcctcctgggtttattgcagattaaagccatctcagtgaagatatgcgtgcacgcacagacagacagacacacacacacacacacacacacacacacacacacacacacacagtcaaatactgttctctgaaaaatgatgtcccaaaagtattataataggaaaaaagcattaaatataataaactaatttaagaagtgataaagtctccagatgcagtagctcacactgtaatcacagtgactcaggaggctgaggtgagaggattccttgaggccagggttcgagaccaaccttgggcaacatagcaagaccccatttcttaaaaaaaaaaaaaaaaaatttaaacttagctgggtatggtggcacatgcctatagtctcagctacttgtgaggctgaggcaggaggattctttgagcccaggagtttgaggttacagtgagccacaatcacaccaatcactgcactccagcctgggcaataaagtaactcttgactcaaaaaaataaaaaaaattgtagtggtagccatgtgttaattgttaaataaattctccaaagggctaaaagtaaattacttataaattttttatagttgtatttttgacctgccttttatatgtatgaatatttcatagttttgcatatcagatgtaggcatacagacaaatacataaaccaatgaatatattacatattctgtgttccaataaaactttatttatggacactaaaatttgaatttcataaaattttcccatgtcaagaatacaaaatacttgagttttgttttta

SEQ ID NO: 154114 - DNA, 3769 bp, Homo sapiens
  Payload ID: 10284
  Gene Symbol: MCM8
  Gene Name: minichromosome maintenance 8 homologous recombination repair factor
  Uniprot ID: Q9UJA3
  ENST ID: ENST00000378896
  CDS Start-End: 432-2954
ctttgagcggaagttggatcactgaagcgccaaaaaagaatttaggggaagacctgattttcgcttgaggcatttttgcggcgctgtgcgctacagacaccttctggaagctgcggtggggaaactgagtttcccgagccgttgagacagatggggttcagcaccgcgcggggacgacaggaaagctgcggctgaagagaactgcggacttggcaggagtcgcctgaggagctaagatcccggagactcttagccccgtggtgcttctctacgggagggagggagggagaatccggccggacagatctgcgcgtatcctggagccggcccagttgtgaactaggagagctttgggacctctgtcccaagcaagtaagaactttagccttaggagatgtaaataaagtagtatttgaagaagcacaggagagatgaatggagagtatagaggcagaggatttggacgaggaagatttcaaagctggaaaaggggaagaggtggtgggaacttctcaggaaaatggagagaaagagaacacagacctgatctgagtaaaaccacaggaaaacgtacttctgaacaaaccccacagtttttgctttcaacaaagaccccacagtcaatgcagtcaacattggatcgattcataccatataaaggctggaagctttatttctctgaagtttacagcgatagctctcctttgattgagaagattcaagcatttgaaaaatttttcacaaggcatattgatttgtatgacaaggatgaaatagaaagaaagggaagtattttggtagattttaaagaactgacagaaggtggtgaagtaactaacttgataccagatatagcaactgaactaagagatgcacctgagaaaaccttggcttgcatgggtttggcaatacatcaggtgttaactaaggaccttgaaaggcatgcagctgagttacaagcccaggaaggattgtctaatgatggagaaacaatggtaaatgtgccacatattcatgcaagggtgtacaactatgagcctttgacacagctcaagaatgtcagagcaaattactatggaaaatacattgctctaagagggacagtggttcgtgtcagtaatataaagcctctttgcaccaagatggcttttctttgtgctgcatgtggagaaattcagagctttcctcttccagatggaaaatacagtcttcccacaaagtgtcctgtgcctgtgtgtcgaggcaggtcatttactgctctccgcagctctcctctcacagttacgatggactggcagtcaatcaaaatccaggaattgatgtctgatgatcagagagaagcaggtcggattccacgaacaatagaatgtgagcttgttcatgatcttgtggatagctgtgtcccgggagacacagtgactattactggaattgtcaaagtctcaaatgcggaagaaggttctcgaaataagaatgacaagtgtatgttccttttgtatattgaagcaaattctattagtaatagcaaaggacagaaaacaaagagttctgaggatgggtgtaagcatggaatgttgatggagttctcacttaaagacctttatgccatccaagagattcaagctgaagaaaacctgtttaaactcattgtcaactcgctttgccctgtcatttttggtcatgaacttgttaaagcaggtttggcattagcactctttggaggaagccagaaatacgcagatgacaaaaacagaattccaattcggggagacccccacatccttgttgttggagatccaggcctaggaaaaagtcaaatgctacaggcagcgtgcaatgttgccccacgtggcgtgtatgtttgtggtaacaccacgaccacctctggtctgacggtaactctttcaaaagatagttcctctggagattttgctttggaagctggtgccctggtacttggtgatcaaggtatttgtggaatcgatgaatttgataagatggggaatcaacatcaagccttgttggaagccatggagcagcaaagtattagtcttgctaaggctggtgtggtttgtagccttcctgcaagaacttccattattgctgctgcaaatccagttggaggacattacaataaagccaaaacagtttctgagaatttaaaaatggggagtgcactactatccagatttgatttggtctttatcctgttagatactccaaatgagcatcatgatcacttactctctgaacatgtgattgcaataagagctggaaagcagagaaccattagcagtgccacagtagctcgtatgaatagtcaagattcaaatacttccgtacttgaagtagtttctgagaagccattatcagaaagactaaaggtggttcctggagaaacaatagatcccattccccaccagctattgagaaagtacattggctatgctcggcagtatgtgtacccaaggctatccacagaagctgctcgagttcttcaagatttttaccttgagctccggaaacagagccagaggttaaatagctcaccaatcactaccaggcagctggaatctttgattcgtctgacagaggcacgagcaaggttggaattgagagaggaagcaaccaaagaagacgctgaggatatagtggaaattatgaaatatagcatgctaggaacttactctgatgaatttgggaacctagattttgagcgatcccagcatggttctggaatgagcaacaggtcaacagcgaaaagatttatttctgctctcaacaacgttgctgaaagaacttataataatatatttcaatttcatcaacttcggcagattgccaaagaactaaacattcaggttgctgattttgaaaattttattggatcactaaatgaccagggttacctcttgaaaaaaggcccaaaagtttaccagcttcaaactatgtaaaaggacttcaccaagttagggcctcctgggtttattgcagattaaagccatctcagtgaagatatgcgtgcacgcacagacagacagacacacacacacacacacacacacacacacacacacacacacacagtcaaatactgttctctgaaaaatgatgtcccaaaagtattataataggaaaaaagcattaaatataataaactaatttaagaagtgataaagtctccagatgcagtagctcacactgtaatcacagtgactcaggaggctgaggtgagaggattccttgaggccagggttcgagaccaaccttgggcaacatagcaagaccccatttcttaaaaaaaaaaaaaaaaaatttaaacttagctgggtatggtggcacatgcctatagtctcagctacttgtgaggctgaggcaggaggattctttgagcccaggagtttgaggttacagtgagccacaatcacaccaatcactgcactccagcctgggcaataaagtaactcttgactcaaaaaaataaaaaaaattgtagtggtagccatgtgttaattgttaaataaattctccaaagggctaaaagtaaattacttataaattttttatagttgtatttttgacctgccttttatatgtatgaatatttcatagttttgcatatcagatgtaggcatacagacaaatacataaaccaatgaatatattacatattctgtgttccaataaaactttatttatggacactaaaatttgaatttcataaaattttcccatgtcaagaatacaaaatacttgagttttgttttta

SEQ ID NO: 154115 - DNA, 7486 bp, Homo sapiens
  Payload ID: 10284
  Gene Symbol: MCM8
  Gene Name: minichromosome maintenance 8 homologous recombination repair factor
  Uniprot ID: Q9UJA3
  ENST ID: ENST00000610722
  CDS Start-End: 378-2900
ctttgagcggaagttggatcactgaagcgccaaaaaagaatttaggggaagacctgattttcgcttgaggcatttttgcggcgctgtgcgctacagacaccttctggaagctgcggtggggaaactgagtttcccgagccgttgagacagatggggttcagcaccgcgcggggacgacaggaaagctgcggctgaagagaactgcggacttggcaggagtcgcctgaggagctaagatcccggagactcttagccccgtggtgcttctctacgggagggagggagggagaatccggccggacagatctgcgcgtatcctggagccggcccagttgtgaactaggagagctttgggacctctgtcccaagcaagagagatgaatggagagtatagaggcagaggatttggacgaggaagatttcaaagctggaaaaggggaagaggtggtgggaacttctcaggaaaatggagagaaagagaacacagacctgatctgagtaaaaccacaggaaaacgtacttctgaacaaaccccacagtttttgctttcaacaaagaccccacagtcaatgcagtcaacattggatcgattcataccatataaaggctggaagctttatttctctgaagtttacagcgatagctctcctttgattgagaagattcaagcatttgaaaaatttttcacaaggcatattgatttgtatgacaaggatgaaatagaaagaaagggaagtattttggtagattttaaagaactgacagaaggtggtgaagtaactaacttgataccagatatagcaactgaactaagagatgcacctgagaaaaccttggcttgcatgggtttggcaatacatcaggtgttaactaaggaccttgaaaggcatgcagctgagttacaagcccaggaaggattgtctaatgatggagaaacaatggtaaatgtgccacatattcatgcaagggtgtacaactatgagcctttgacacagctcaagaatgtcagagcaaattactatggaaaatacattgctctaagagggacagtggttcgtgtcagtaatataaagcctctttgcaccaagatggcttttctttgtgctgcatgtggagaaattcagagctttcctcttccagatggaaaatacagtcttcccacaaagtgtcctgtgcctgtgtgtcgaggcaggtcatttactgctctccgcagctctcctctcacagttacgatggactggcagtcaatcaaaatccaggaattgatgtctgatgatcagagagaagcaggtcggattccacgaacaatagaatgtgagcttgttcatgatcttgtggatagctgtgtcccgggagacacagtgactattactggaattgtcaaagtctcaaatgcggaagaaggttctcgaaataagaatgacaagtgtatgttccttttgtatattgaagcaaattctattagtaatagcaaaggacagaaaacaaagagttctgaggatgggtgtaagcatggaatgttgatggagttctcacttaaagacctttatgccatccaagagattcaagctgaagaaaacctgtttaaactcattgtcaactcgctttgccctgtcatttttggtcatgaacttgttaaagcaggtttggcattagcactctttggaggaagccagaaatacgcagatgacaaaaacagaattccaattcggggagacccccacatccttgttgttggagatccaggcctaggaaaaagtcaaatgctacaggcagcgtgcaatgttgccccacgtggcgtgtatgtttgtggtaacaccacgaccacctctggtctgacggtaactctttcaaaagatagttcctctggagattttgctttggaagctggtgccctggtacttggtgatcaaggtatttgtggaatcgatgaatttgataagatggggaatcaacatcaagccttgttggaagccatggagcagcaaagtattagtcttgctaaggctggtgtggtttgtagccttcctgcaagaacttccattattgctgctgcaaatccagttggaggacattacaataaagccaaaacagtttctgagaatttaaaaatggggagtgcactactatccagatttgatttggtctttatcctgttagatactccaaatgagcatcatgatcacttactctctgaacatgtgattgcaataagagctggaaagcagagaaccattagcagtgccacagtagctcgtatgaatagtcaagattcaaatacttccgtacttgaagtagtttctgagaagccattatcagaaagactaaaggtggttcctggagaaacaatagatcccattccccaccagctattgagaaagtacattggctatgctcggcagtatgtgtacccaaggctatccacagaagctgctcgagttcttcaagatttttaccttgagctccggaaacagagccagaggttaaatagctcaccaatcactaccaggcagctggaatctttgattcgtctgacagaggcacgagcaaggttggaattgagagaggaagcaaccaaagaagacgctgaggatatagtggaaattatgaaatatagcatgctaggaacttactctgatgaatttgggaacctagattttgagcgatcccagcatggttctggaatgagcaacaggtcaacagcgaaaagatttatttctgctctcaacaacgttgctgaaagaacttataataatatatttcaatttcatcaacttcggcagattgccaaagaactaaacattcaggttgctgattttgaaaattttattggatcactaaatgaccagggttacctcttgaaaaaaggcccaaaagtttaccagcttcaaactatgtaaaaggacttcaccaagttagggcctcctgggtttattgcagattaaagccatctcagtgaagatatgcgtgcacgcacagacagacagacacacacacacacacacacacacacacacacacacacacacacagtcaaatactgttctctgaaaaatgatgtcccaaaagtattataataggaaaaaagcattaaatataataaactaatttaagaagtgataaagtctccagatgcagtagctcacactgtaatcacagtgactcaggaggctgaggtgagaggattccttgaggccagggttcgagaccaaccttgggcaacatagcaagaccccatttcttaaaaaaaaaaaaaaaaaatttaaacttagctgggtatggtggcacatgcctatagtctcagctacttgtgaggctgaggcaggaggattctttgagcccaggagtttgaggttacagtgagccacaatcacaccaatcactgcactccagcctgggcaataaagtaactcttgactcaaaaaaataaaaaaaattgtagtggtagccatgtgttaattgttaaataaattctccaaagggctaaaagtaaattacttataaattttttatagttgtatttttgacctgccttttatatgtatgaatatttcatagttttgcatatcagatgtaggcatacagacaaatacataaaccaatgaatatattacatattctgtgttccaataaaactttatttatggacactaaaatttgaatttcataaaattttcccatgtcaagaatacaaaatacttgagttttgtttttagctatttaataataggtctcatttattccacaggctgtagtttgtagtcttgcttgaaacaatagaaacagactgattaagcaggagaagttttttgaaagaattttgtttggctcacggaattattagaaggcaggtgaaccaggagggtaagcttccagcagcaatttgtaaaaccatgccttagaattggactaaggaagaagctgctgacactccactgccacacagggcactggaagaaagtgctgctgcctccctgccccacctttgccacttctgcagcaggaataggtagaagaatgcccccacccgcaccggaacagcaacaaaaggattctgcatgagatgcctccctaaattgctgaattcaaaaaagaagttgcatacaaagacatctgattgaaaaagggtatgttatatgcccctttcataggctgctagggagttttcctggttctactttcaggtggtgggatcaataagaccagaatttctcatatgttgtgagaggattcaaatgttacagggttgccagccaaactatcaatcatgtataaatccaacaaacactttgtaacatacaagaactcaggaaatgtgaaccattgttggagaatctactaaaatacggcttcccgcaaacgaagatgaatggaaaatgtaaataaaaagaactggcagtgtatatcagatgtttaactataggaccagaactaagatgtggagactattgccatagaccacaatgtaaatttttaagtgaggaaggaaaaatcaggaatcaaaaggggccaggtgcagtggctcacatctataatcccagagctttgggagttcgaggcaggaggatcacttgaagccagttttgagaccagcctatgcaacacattgagaccctatctctacaaaaaatagattagctgggcacggtggtgcatgcctattgtcctacctactgtggaggctgaagtaggaaatcacttgagcccgagagtttgaggttacagtgagctatgattataccactgcactccagcctgggcaagagagcaagaccttgtctcttaaagaaaaaaaaaaaaaatggagaaagtagatagtagtataaatatagtgaagtctttaaaagctaggagttaaaagatatttaaagcaaataactcaggcatggtggtgtgtgcctgtagtcccagccactaaggaggctgaggcaggagaatcacttgaacccgggaggcagaggttgcagtgagccaagatcgtaccactgcactccagcctgggcaacagagtgagactctttctccaaactaaataagagatatttaaagctgaaaaaaaatctattaatagaatttaaaacatttcacaaaagtcaacacataaataatatcaaccaaaataaagtggtagacagaagagaaaatatactaatttattgttcaaagaggaaaataagtctcaaaggttaaggctattatataaatttatttttaaaaagacataaacctacattttcagaagaagaagttccatgtttccttagattatgtatttagcatccattaatcacagggccaaactaacaacaaaagttgtttagctttcccttacaatccagcttttatgggtgtgcaaacatcacattacagtccctccaaccacaaaccccaacatatagtatttcacttcctgcccaatagtgggtgtccccacacctttcaaccactgtagcaacaaagctctggcctaggcttttcacttgcttctttactgcctgactgactttggtgtttcctcatgtggcctggtgtggcatggcacgccctcttgggagatgaaagtaatcttccataggcaattgtttctgtgtcaccattgctgattaaaacaaatcctaagtacaaatgtcagaacagaaacatgcaaagcaagaaaacattacatcatgaaagtttctttttttttcttttttcttttttttttttttttgagacagagttttgctctttttgctcaggctggagtacagtggcgcgatcttggttcaccgcaacctccgcctcctgggttcaagcgtttctcctgcctcagcctcccaagtagctgggattataggcatgtgccaccatggctaattttgtatttttagtagagacggggtttctccatgttggtgaggctggtttttaactcccgaactcaggtgattgcctgcctcggtctcccaaaaagtgccgggattacaggcgtgagccattgtgcccagccaaaagtttctttttcaagagatggtggtcttgccatgttgtccagtatggacttgaactactcagctcaagcagtcctcccacctcagcctcctgaatagctgagactacaggcatgcaccactacacctggctgcgagatgaaattttaagagatgggggtcttgttctgtcgcccaggctggagtgcagtgacatgatcaagccgtgatctcctgggctcaagcaatcctcctacctcagcctcctgagtagctggaactacaggaatgcaacaccatgcccagctaattttgatttttagtagagatgaggtcttcctttgttgcccaagctggtctcaaactccagggcttcctgagtagctgagactacaggtgtgagccaccatgcccagcctcctctcttttccaatattgtgttaagtaaattgtattggtggtaatcaacttgatcatttcatttttaggatagagatatcaaggtgagggtataactgaacgagaagaggaataaacaccaccctgtgattgatggatctttatagctctcctttgataaagaagggaaatatcgtacttacattagcatgttatagttgctgttgttatacagaagaatattaaacaatattcatatattgtttatgaatgcattgaattcataaacaatggtatggatattgactagccaaagaggtggataaatgtagatacaatgatacggtgatttggtattcagtgtccattctgctctcctagtgtgccttcctataatgcaggggctggaaggtgagaaaataaccacatttcccagactccctttgcaggtagatttccagatgtgaattgggttccactgatcagacacccatgtgtgagatttggaatgcagaactgaggagagagccatcttcctcttgcttgtgttctggtggcatgtgtggttgaggagacatttaatttccctgcagcagaattcttgcagtcagttgttgaggcaagtggcgtggtggatgcaaccctgattcttcacctttctcattattgtggggtagcagcgcctctggcaagccagacagacctgcagtgtttttctgggagttaattctggagacccagtatggaacccactcctagcccttgtgacaatattgcaagcatccagttccctgttttacagtccttttaaatgtggctagctacagtagtttgtgtttcctgcaactaatcactcatacatctgtatctaaagcactccacctgggtcatgtactatacttaaaattataaggcaatattaattcacaaaactacctactcgttttatttaaccctcagaagaactgaaaacaaaagctataccaggcttgctctagagcgtgggcttgggaatggaaaggcagagtgcacctattgaattccatcatcagtttttctataccatggagttacttaccatgtgtatacataacactgattaaaaattttaaaaaaaa

SEQ ID NO: 154116 - DNA, 2442 bp, Homo sapiens
  Payload ID: 10285
  Gene Symbol: MCM9
  Gene Name: minichromosome maintenance 9 homologous recombination repair factor
  Uniprot ID: Q9NXL9
  ENST ID: ENST00000316068
  CDS Start-End: 240-1415
ccggcgtcggtcgagagcgcaggcccggcagagccgcaggcgctaggccgcccgacacagcccgcgcgtccccgcggccggtggcgcctcgagcggccacgtgcacgcgcgcactccgcctcaccagccttcttgcgccggagacgaacccgctgcctggctggagctctctgggcccttcggcctcgggagcaacgcgttcccggcgacttctgacacagccattacctagattcaagatgaatagcgatcaagttacactggttggtcaagtgtttgagtcatatgtttcggaataccataagaatgatattcttctaatcttgaaggaaagggatgaagatgctcattacccagttgtggttaatgccatgactctgtttgagaccaacatggaaatcggggaatatttcaacatgttccccagtgaagtgcttacaatttttgatagtgcactgcgaaggtcagccttgacaattctccagtccctttctcagcctgaggctgtttccatgaaacagaatcttcatgccaggatatcaggtttgcctgtctgtcctgagctggtgagggaacacatacctaaaaccaaggatgtgggacactttttatctgtcactgggacagtgattcgaacaagtctggtgaaggttctggagtttgagcgggattacatgtgtaacaaatgcaagcatgtgtttgtgatcaaggctgactttgagcagtattacaccttttgccggccatcctcgtgtcccagcttggagagctgtgattcctctaaattcacttgcctctcaggcttgtcttcgtctccaaccaggtgtagagattaccaggaaatcaaaattcaggaacaggttcaaaggctatctgttggaagtattccacgatctatgaaggttattctggaagatgacttagtggatagttgcaaatctggtgatgacctcactatttacgggattgtaatgcaacggtggaagccctttcagcaagatgtgcgctgtgaagtggagatagtcctgaaagcaaattacatccaagtaaataatgagcagtcctcagggatcatcatggatgaggaggtccaaaaggaattcgaagatttttgggaatactataagagcgatccctttgcaggaaggaatgtaatattggctagcttgtgccctcaagtgtttggaatgtatctagtaaagcttgctgtggccatggtgctggctggtgggattcaaaggactgatgctacaggaacacgggtcagaggagaatctcatcttttattggttggggatcctggcacagggaaatctcagttcctcaaatatgcagcaaagattacaccaagatctgtgctgaccacaggaattggatctactagtgcaggtattgtatgtgacaatttcaagtaatttaacattacttcagaagttaacacaatggttttttctaatgaaaaactacctataataggataaatttcaagctaatttttgagttaccactaaaaatggaaggaaatatgcaatgttattttggtagctctaagaaaatatcttgcaagctccaccttcactttgcatcttagttttgaacaatcctattcaattttctcattctctagtgattaccttcatacttttatgcaggaaaaagtccgtatcatctggcattttatcaagactcagcaactggaatgttaaactaaagagggggatatttcactttaccaagtagatagatggtatagagcttaaggcattttcatgctcataaatctgataggcaacagtagctcctactgaaatttcttaggtagggaatgtttattaatatttggaaaatatacttccatcattgcaatgtggagcttcattcataagttgtaatgattctttagcaagtacacttaaaagcctttgcaggtagaatgtcaagatttgattataaataaagtgacccagggaatttagaaaaaaattattttaaaaaatatgtttgatgctattttgtatttttacagttttgattgggtaatgtttctgttcttctgaaaacagacccttggcttcacacattttaaaaatgtttgctacttgttaagggagtcagattaacttccattgggctaatgaatgctcaaatttctaatgagaaactaacactttaaaatttatcatacaacagaaaatggccaattaatggtcctgtataagtggaaaactgttaaggaggtctcaggttttgaaatataactcaacagtatattaaccattgacaagaatggatttttggaattgagaagggtagacaaacttcaggatactaggcaagaatatataaagaatatttcccatgcgttttaaatccgtatgacccagtgttctagagttctgtataaaatgataccaacaacaaataaagatgcttcccaagtaa

SEQ ID NO: 154117 - DNA, 5101 bp, Homo sapiens
  Payload ID: 10285
  Gene Symbol: MCM9
  Gene Name: minichromosome maintenance 9 homologous recombination repair factor
  Uniprot ID: Q9NXL9
  ENST ID: ENST00000316316
  CDS Start-End: 288-3719
tccatccggaagagccgccggggcagggaagttgaggcggtgcgcggcccggcgtcggtcgagagcgcaggcccggcagagccgcaggcgctaggccgcccgacacagcccgcgcgtccccgcggccggtggcgcctcgagcggccacgtgcacgcgcgcactccgcctcaccagccttcttgcgccggagacgaacccgctgcctggctggagctctctgggcccttcggcctcgggagcaacgcgttcccggcgacttctgacacagccattacctagattcaagatgaatagcgatcaagttacactggttggtcaagtgtttgagtcatatgtttcggaataccataagaatgatattcttctaatcttgaaggaaagggatgaagatgctcattacccagttgtggttaatgccatgactctgtttgagaccaacatggaaatcggggaatatttcaacatgttccccagtgaagtgcttacaatttttgatagtgcactgcgaaggtcagccttgacaattctccagtccctttctcagcctgaggctgtttccatgaaacagaatcttcatgccaggatatcaggtttgcctgtctgtcctgagctggtgagggaacacatacctaaaaccaaggatgtgggacactttttatctgtcactgggacagtgattcgaacaagtctggtgaaggttctggagtttgagcgggattacatgtgtaacaaatgcaagcatgtgtttgtgatcaaggctgactttgagcagtattacaccttttgccggccatcctcgtgtcccagcttggagagctgtgattcctctaaattcacttgcctctcaggcttgtcttcgtctccaaccaggtgtagagattaccaggaaatcaaaattcaggaacaggttcaaaggctatctgttggaagtattccacgatctatgaaggttattctggaagatgacttagtggatagttgcaaatctggtgatgacctcactatttacgggattgtaatgcaacggtggaagccctttcagcaagatgtgcgctgtgaagtggagatagtcctgaaagcaaattacatccaagtaaataatgagcagtcctcagggatcatcatggatgaggaggtccaaaaggaattcgaagatttttgggaatactataagagcgatccctttgcaggaaggaatgtaatattggctagcttgtgccctcaagtgtttggaatgtatctagtaaagcttgctgtggccatggtgctggctggtgggattcaaaggactgatgctacaggaacacgggtcagaggagaatctcatcttttattggttggggatcctggcacagggaaatctcagttcctcaaatatgcagcaaagattacaccaagatctgtgctgaccacaggaattggatctactagtgcaggtctgacggtaactgctgtaaaagactcaggagaatggaatttggaggctggggcattagttcttgcagatgcgggcctttgctgtattgatgagttcaatagcctcaaagagcatgataggaccagtatccatgaagcaatggagcaacaaaccataagtgttgctaaggctggcctcgtgtgcaagctgaacacaaggaccaccatcctggcagcaacgaaccccaaaggccagtacgacccccaggagtccgtgtctgtgaacattgccctcggcagcccactcttaagtcgatttgacctgatcctggttttgcttgataccaagaatgaagactgggatcgtatcatttcctcctttatcttagaaaataaaggttacccaagcaaatcagagaagctctggagcatggaaaagatgaaaacctatttctgcctcataaggaatctgcagcccacactgtctgatgtgggcaatcaggttcttctccggtactaccagatgcaaaggcagagtgattgccggaacgctgcccggaccaccattcggctgttggaaagcttgatacgattagcagaagctcatgctcgcctgatgtttcgtgatactgtaactctggaagacgctattacggtggtgtcagtcatggagtcctcaatgcagggaggtgcactgctaggaggtgtgaatgccctccacacttcctttcctgaaaaccctggagagcagtaccagagacagtgtgaacttattctggaaaagctagagctgcagagcctcttgagtgaagagcttagaagacttgaaaggttacagaatcagagtgtgcaccaatcccaaccacgggtattggaggtagagactactccaggatccttgagaaatggtccaggggaagaatcaaacttcagaacttcatcacagcaggaaatcaactatagcacacatatcttctctcctggaggcagccccgagggaagcccagttctagatcccccaccgcatctggagcctaatagatcaacaagtaggaaacattcagctcagcacaaaaataacagagatgacagtttagattggtttgatttcatggcaactcatcagagtgaacctaaaaacactgttgttgtgtctcctcatcccaaaacatctggagaaaatatggcttcgaagatctctaacagcacatctcagggtaaggagaagagtgagccaggccaaaggagcaaagtggacattgggttgcttccatcaccaggagagacaggtgttccatggagggcagacaatgtggaaagtaacaagaaaaaaaggctagcactagattctgaagcagcagtctctgctgataaaccagactcagtactgactcatcatgtccccaggaacctgcagaagctgtgcaaagagagggcccagaagttgtgcagaaatagcaccagggtgcctgcacagtgcacagtcccttcccatcctcagtccactcctgtacatagcccagacagaatgctggactcacccaaaagaaagagaccgaaatcccttgcgcaagtggaagagcctgcaattgaaaatgttaagcctccaggttcccctgtggccaaactggcaaaatttactttcaagcagaagtcaaaactgatccactcctttgaagatcacagccatgtgtcacctggtgcaactaaaatagcagttcatagtcctaaaatttcccagcgtagaacaagaagagacgcagccttgccggtgaagcgtccaggaaagttaacatctaccccaggaaaccagatctccagtcagccacagggtgagacaaaggaggtgtcgcagcagccaccagagaaacacggaccaagagagaaggtgatgtgtgcccctgagaagaggattattcagcctgaattagagcttgggaacgagactgggtgtgctcatcttacttgtgagggagacaaaaaggaagaggtttcaggcagtaataaaagcggcaaggttcatgcctgcacattagccagattggcaaacttctgctttactcccccatcggaatccaaatcaaaatcccctcctcctgaaaggaagaaccgaggtgagagaggcccaagctcccctcctacaaccacagctccaatgcgtgtcagtaaaaggaaatcttttcagctccgtgggtccaccgagaaactgattgtttccaaagaatccctcttcactttaccagaactaggtgatgaagcatttgattgtgactgggatgaagagatgagaaaaaagtcatagttgggaaaagctttctggtcaaatctcaccttcttcaactccacagaggaccttcaggatatcaatatggtatttataaatgtatagaacaattggccatattgaggatcactctgaatactggctcccccttaaggctttctaatttcaggttaatcttcatgacttaaaaagttgtataatcagttgaggtcagtgtgataccagcagctgagctgaattaattatgttgtgcttaattttacaaatggagtacttgtattcctgttcctgaagctgtttctgttttttgttttgttttgtttttaagggggagaggttcttccctagattaatttcttctttcattcactcaggaacaaatgtcaagaaggtagcactcataaatctaacaaggcagatgaactcttttctactttttttttttttttttgtattttcacctggaatgggctaagtacagtgaatataatcacttggatgatttgccaaaatcagactatttttctagtattatttttgtattgatttgtgtggatcaggttaaatgtgactaatgcttttctttctttgagaggtatccttacaattccatgatgttcttagagatctggccactggtcaaacagtacctttctgaagtactgaccttctgagttgtcctttctttcttgagccaacattttgtacttcagattcttttttctcttgggggcctaccttcaaccaagtaaaatactgtgattagaagaagagagagtatgagccaggcacagtgactcactcctgtagtcctagctactcggggaggctgaggcaggatgattgcttaagcccaggagttcggggttacagtgagctgtggtcacaccactgtattccagcctgggtgacagagtgagatcctgtctctaaaaataaaataaatgaagaagagagactatgtggtagtctcaatcaaacatcatgtctcatctacccagctggttaatatggaaatgtgattcctactaagttgtgattcacttgtctttaaaaccaaggaaattatatactgtttttggtcagaatagataacctcaagctttgtctttctatgtgcttttaaaatcacttattcctttggattctaataagggttattaggattcagtaattatggactttctcttctgaagtgtgaatttgtaaactgattgtttaattgtcagagggacttttggacatagaatactcaaaactatatgtattttgtttaattttcacttcattcaattcacgcattgaaaacaaatttagaaaatccaatttttcttaagcatttaaacgttctaaaattcactaataaaattttctgaaaaaatttaaactgtgagtacaaa

SEQ ID NO: 154118 - DNA, 752 bp, Homo sapiens
  Payload ID: 10285
  Gene Symbol: MCM9
  Gene Name: minichromosome maintenance 9 homologous recombination repair factor
  ENST ID: ENST00000425154
  CDS Start-End: 284-752
gagcggccacgtgcacgcgcgcactccgcctcaccagccttcttgcgccggagacgaacccgctgcctggctggagctctctgggcccttcggcctcgggagcaacgcgttcccggcgacttctgacacagccactgtttctgcagaacccagtagatttcctacggtaagaaagagaaagaaggaaacaaattcacttccaagtatgaatttctaaggacagtctgttaattattcatgtcagaactggctgtcagtctgattaatgttacctagattcaagatgaatagcgatcaagttacactggttggtcaagtgtttgagtcatatgtttcggaataccataagaatgatattcttctaatcttgaaggaaagggatgaagatgctcattacccagttgtggttaatgccatgactctgtttgagaccaacatggaaatcggggaatatttcaacatgttccccagtgaagtgcttacaatttttgatagtgcactgcgaaggtcagccttgacaattctccagtccctttctcagcctgaggctgtttccatgaaacagaatcttcatgccaggatatcaggtttgcctgtctgtcctgagctggtgagggaacacatacctaaaaccaaggatgtgggacactttttatctgtcactgggacagtgattcgaacaagtctggtgaaggttctggagtttgagcgggattacatgtgtaacaaatgcaagcatgtgtttgtgatca

SEQ ID NO: 154119 - DNA, 549 bp, Homo sapiens
  Payload ID: 10285
  Gene Symbol: MCM9
  Gene Name: minichromosome maintenance 9 homologous recombination repair factor
  ENST ID: ENST00000458674
  CDS Start-End: 1-549
cagcctcgtgtgcaagctgaacacaaggaccaccatcctggcagcaacgaaccccaaaggccagtacgacccccaggagtccgtgtctgtgaacattgccctcggcagcccactcttaagtcgatttgacctgatcctggttttgcttgataccaagaatgaagactgggatcgtatcatttcctcctttatcttagaaaataaagctcatgctcgcctgatgtttcgtgatactgtaactctggaagacgctattacggtggtgtcagtcatggagtcctcaatgcagggaggtgcactgctaggaggtgtgaatgccctccacacttcctttcctgaaaaccctggagagcagtaccagagacagtgtgaacttattctggaaaagctagagctgcagagcctcttgagtgaagagcttagaagacttgaaaggttacagaatcagagtgtgcaccaatcccaaccacgggtattggaggtagagactactccaggatccttgagaaatggtccaggggaagaatcaaacttcagaacttcatcaca

SEQ ID NO: 154120 - DNA, 470 bp, Homo sapiens
  Payload ID: 10285
  Gene Symbol: MCM9
  Gene Name: minichromosome maintenance 9 homologous recombination repair factor
  ENST ID: ENST00000505446
  CDS Start-End: 237-470
gattcccggagacagctgggggatgccagtgcagttaggcactctcctgtcttcttttcgacgcttcgctgtggtcaagaggacaaactgtttctgcagaacccagtagatttcctacggtaagaaagagaaagaaggaaacaaattcacttccaagtatgaatttctaaggacagtctgttaattattcatgtcagaactggctgtcagtctgattaatgttacctagattcaagatgaatagcgatcaagttacactggttggtcaagtgtttgagtcatatgtttcggaataccataagaatgatattcttctaatcttgaaggaaagggatgaagatgctcattacccagttgtggttaatgccatgactctgtttgagaccaacatggaaatcggggaatatttcaacatgttccccagtgaagtgcttacaatttttgatagtgcactgcgaaggtcagccttg

SEQ ID NO: 154121 - DNA, 4822 bp, Homo sapiens
  Payload ID: 10285
  Gene Symbol: MCM9
  Gene Name: minichromosome maintenance 9 homologous recombination repair factor
  Uniprot ID: Q9NXL9
  ENST ID: ENST00000619706
  CDS Start-End: 16-3447
ttacctagattcaagatgaatagcgatcaagttacactggttggtcaagtgtttgagtcatatgtttcggaataccataagaatgatattcttctaatcttgaaggaaagggatgaagatgctcattacccagttgtggttaatgccatgactctgtttgagaccaacatggaaatcggggaatatttcaacatgttccccagtgaagtgcttacaatttttgatagtgcactgcgaaggtcagccttgacaattctccagtccctttctcagcctgaggctgtttccatgaaacagaatcttcatgccaggatatcaggtttgcctgtctgtcctgagctggtgagggaacacatacctaaaaccaaggatgtgggacactttttatctgtcactgggacagtgattcgaacaagtctggtgaaggttctggagtttgagcgggattacatgtgtaacaaatgcaagcatgtgtttgtgatcaaggctgactttgagcagtattacaccttttgccggccatcctcgtgtcccagcttggagagctgtgattcctctaaattcacttgcctctcaggcttgtcttcgtctccaaccaggtgtagagattaccaggaaatcaaaattcaggaacaggttcaaaggctatctgttggaagtattccacgatctatgaaggttattctggaagatgacttagtggatagttgcaaatctggtgatgacctcactatttacgggattgtaatgcaacggtggaagccctttcagcaagatgtgcgctgtgaagtggagatagtcctgaaagcaaattacatccaagtaaataatgagcagtcctcagggatcatcatggatgaggaggtccaaaaggaattcgaagatttttgggaatactataagagcgatccctttgcaggaaggaatgtaatattggctagcttgtgccctcaagtgtttggaatgtatctagtaaagcttgctgtggccatggtgctggctggtgggattcaaaggactgatgctacaggaacacgggtcagaggagaatctcatcttttattggttggggatcctggcacagggaaatctcagttcctcaaatatgcagcaaagattacaccaagatctgtgctgaccacaggaattggatctactagtgcaggtctgacggtaactgctgtaaaagactcaggagaatggaatttggaggctggggcattagttcttgcagatgcgggcctttgctgtattgatgagttcaatagcctcaaagagcatgataggaccagtatccatgaagcaatggagcaacaaaccataagtgttgctaaggctggcctcgtgtgcaagctgaacacaaggaccaccatcctggcagcaacgaaccccaaaggccagtacgacccccaggagtccgtgtctgtgaacattgccctcggcagcccactcttaagtcgatttgacctgatcctggttttgcttgataccaagaatgaagactgggatcgtatcatttcctcctttatcttagaaaataaaggttacccaagcaaatcagagaagctctggagcatggaaaagatgaaaacctatttctgcctcataaggaatctgcagcccacactgtctgatgtgggcaatcaggttcttctccggtactaccagatgcaaaggcagagtgattgccggaacgctgcccggaccaccattcggctgttggaaagcttgatacgattagcagaagctcatgctcgcctgatgtttcgtgatactgtaactctggaagacgctattacggtggtgtcagtcatggagtcctcaatgcagggaggtgcactgctaggaggtgtgaatgccctccacacttcctttcctgaaaaccctggagagcagtaccagagacagtgtgaacttattctggaaaagctagagctgcagagcctcttgagtgaagagcttagaagacttgaaaggttacagaatcagagtgtgcaccaatcccaaccacgggtattggaggtagagactactccaggatccttgagaaatggtccaggggaagaatcaaacttcagaacttcatcacagcaggaaatcaactatagcacacatatcttctctcctggaggcagccccgagggaagcccagttctagatcccccaccgcatctggagcctaatagatcaacaagtaggaaacattcagctcagcacaaaaataacagagatgacagtttagattggtttgatttcatggcaactcatcagagtgaacctaaaaacactgttgttgtgtctcctcatcccaaaacatctggagaaaatatggcttcgaagatctctaacagcacatctcagggtaaggagaagagtgagccaggccaaaggagcaaagtggacattgggttgcttccatcaccaggagagacaggtgttccatggagggcagacaatgtggaaagtaacaagaaaaaaaggctagcactagattctgaagcagcagtctctgctgataaaccagactcagtactgactcatcatgtccccaggaacctgcagaagctgtgcaaagagagggcccagaagttgtgcagaaatagcaccagggtgcctgcacagtgcacagtcccttcccatcctcagtccactcctgtacatagcccagacagaatgctggactcacccaaaagaaagagaccgaaatcccttgcgcaagtggaagagcctgcaattgaaaatgttaagcctccaggttcccctgtggccaaactggcaaaatttactttcaagcagaagtcaaaactgatccactcctttgaagatcacagccatgtgtcacctggtgcaactaaaatagcagttcatagtcctaaaatttcccagcgtagaacaagaagagacgcagccttgccggtgaagcgtccaggaaagttaacatctaccccaggaaaccagatctccagtcagccacagggtgagacaaaggaggtgtcgcagcagccaccagagaaacacggaccaagagagaaggtgatgtgtgcccctgagaagaggattattcagcctgaattagagcttgggaacgagactgggtgtgctcatcttacttgtgagggagacaaaaaggaagaggtttcaggcagtaataaaagcggcaaggttcatgcctgcacattagccagattggcaaacttctgctttactcccccatcggaatccaaatcaaaatcccctcctcctgaaaggaagaaccgaggtgagagaggcccaagctcccctcctacaaccacagctccaatgcgtgtcagtaaaaggaaatcttttcagctccgtgggtccaccgagaaactgattgtttccaaagaatccctcttcactttaccagaactaggtgatgaagcatttgattgtgactgggatgaagagatgagaaaaaagtcatagttgggaaaagctttctggtcaaatctcaccttcttcaactccacagaggaccttcaggatatcaatatggtatttataaatgtatagaacaattggccatattgaggatcactctgaatactggctcccccttaaggctttctaatttcaggttaatcttcatgacttaaaaagttgtataatcagttgaggtcagtgtgataccagcagctgagctgaattaattatgttgtgcttaattttacaaatggagtacttgtattcctgttcctgaagctgtttctgttttttgttttgttttgtttttaagggggagaggttcttccctagattaatttcttctttcattcactcaggaacaaatgtcaagaaggtagcactcataaatctaacaaggcagatgaactcttttctactttttttttttttttttgtattttcacctggaatgggctaagtacagtgaatataatcacttggatgatttgccaaaatcagactatttttctagtattatttttgtattgatttgtgtggatcaggttaaatgtgactaatgcttttctttctttgagaggtatccttacaattccatgatgttcttagagatctggccactggtcaaacagtacctttctgaagtactgaccttctgagttgtcctttctttcttgagccaacattttgtacttcagattcttttttctcttgggggcctaccttcaaccaagtaaaatactgtgattagaagaagagagagtatgagccaggcacagtgactcactcctgtagtcctagctactcggggaggctgaggcaggatgattgcttaagcccaggagttcggggttacagtgagctgtggtcacaccactgtattccagcctgggtgacagagtgagatcctgtctctaaaaataaaataaatgaagaagagagactatgtggtagtctcaatcaaacatcatgtctcatctacccagctggttaatatggaaatgtgattcctactaagttgtgattcacttgtctttaaaaccaaggaaattatatactgtttttggtcagaatagataacctcaagctttgtctttctatgtgcttttaaaatcacttattcctttggattctaataagggttattaggattcagtaattatggactttctcttctgaagtgtgaatttgtaaactgattgtttaattgtcagagggacttttggacatagaatactcaaaactatatgtattttgtttaattttcacttcattcaattcacgcattgaaaacaaatttagaaaatccaatttttcttaagcatttaaacgttctaaaattcactaataaaattttctgaaaaaatttaaactgtga

SEQ ID NO: 154122 - DNA, 4169 bp, Homo sapiens
  Payload ID: 10286
  Gene Symbol: MCMBP
  Gene Name: minichromosome maintenance complex binding protein
  Uniprot ID: Q9BTE3
  ENST ID: ENST00000360003
  CDS Start-End: 171-2099
tgaggcgcgggaggcccgcgccccgcggctcgctgtgcgtgggagggcgcgagcgaacgcgggcgaggagcggccgagccgctgaagaggagctgggcgccggccgcccggccgcgctcggcccgcggatcgcctccgcccggtcttcgccggccccggcccctggcgagatgccgtgtggggaggattggctcagccacccgctgggaatcgtgcagggattcttcgcccaaaatggagttaatcctgactgggagaagaaagtaattgagtattttaaggaaaagctgaaggaaaataatgctcctaagtgggtaccatcactgaacgaagttccccttcattatttgaaacctaatagttttgtgaaatttcgttgcatgattcaggatatgtttgaccctgagttttacatgggagtttatgaaacggttaaccaaaacacaaaagcacatgttcttcattttggaaaatatagagatgtagcagagtgtgggcctcaacaagaacttgatttaaactctccacgaaataccactttggaaagacagactttctattgtgttccggtgcctggggaatctacgtgggtaaaagaagcctatgttaatgcaaaccaagctcgagtcagtccctcaacatcctacactcctagtcgccacaagaggagttatgaagatgatgacgatatggacctacagcccaataagcagaaagaccaacatgcaggtgccagacaagcagggagtgttggtggtcttcaatggtgtggagagccaaaacgtttagaaactgaagcttctactgggcaacagctgaactctctgaacttgtcttctccttttgatttgaattttccattgccaggagagaagggccctgcatgccttgtgaaggtttatgaagattgggattgtttcaaagtaaatgacattcttgagctatatggcatactgtctgtggatcctgtgctgagtatactgaataatgatgaaagggatgcctctgcactgctggatccgatggagtgcacagacacagcagaggagcagagagtacacagtcctcctgcttcattagtgccgagaattcatgtgatcttagcccagaagttgcaacacatcaacccattattgcctgcctgccttaacaaagaggagagcaaaacctgtaagtttgtttcaagtttcatgtccgaattgtctccagtcagagcagaacttcttgggttccttactcatgcccttctgggggatagtttggctgctgaataccttatattacatctcatctccacagtatatacaagaagagatgtccttccactaggaaaatttacagttaacttgagtggttgcccacggaatagtaccttcacagaacacttgtatcgaattattcaacatcttgttccagcatcttttcgtctgcagatgactatagagaacatgaaccatttgaaattcattccccacaaagactacacagccaatcgcttggtcagtgggctcctccagctgcccagcaatacttcccttgtaatcgatgagactctcctggaacaggggcagctggataccccaggtgttcataatgtgacagccctgagcaacctcataacgtggcagaaggtggattatgacttcagctaccatcagatggaattcccctgcaatattaacgttttcattacttcggaggggaggtcactcctcccggcagactgccagattcacttacagccccagctaattccaccaaacatggaggagtacatgaacagccttctctcagcggtgctgccttccgtgctgaacaaattccgcatttatctaactcttttgagattcttggaatatagcatatctgatgaaataaccaaggcagttgaagatgactttgtggaaatgcggaagaacgaccctcagagcatcactgctgatgatcttcaccagctgctcgtggtggctcggtgtctgtctctcagtgctggtcagacaacgctgtcaagagaacgatggctgagagcaaagcagctagagtctttaagaagaacgaggcttcagcagcaaaaatgtgtgaatggaaatgaactttaaagatgtaatacctatgaagagtaatgggcaaactgtagccacataattgtaaaattcagatattcatttataccacattgttttataggtaatttctatcacaaaccagtgacatttcctgaaatcaagcctggtaacacctgatgtttatatgatattcagtaaggacttttaccttactgatttcatggagcttttgaagtttgttttataataattatataaattagtaatgatgtaaaaaaagtatttgatattaaaagtttaatattgataatgttgctgattgtaccatttccttagcttcagctgagtcataggccagactgttgaaatgctgaaatgaagaaggttgttgcagtttcaaagtcagaggaatcgtgcttcggatttcttatgttttctagttctctgtttttccagttcacagtgggttggggtgcattcagtagtccatctttggggaacggaggcgtacttgccattgattcacatgactacatgaaattctgtactgtcatttcccagatgtttggccacagaaactttttcccacttaacatttgttaacagcctgcaaaactaaacttgtacatggcagtggttcccagacttttgtattttatggaccggtagtaatatttccaaaaatctggggtactataaggttgccaatttaccttgccaagtaatccgaataaatcactgtattatcaccatttttttcataaaaggaaaggacaatctatctctgaataagaggagtcctttaaacggaatgaatgtggcttttgggggcaaaagaaaccaagacactacattgtctttattttctcctatcccagtgcatttgagaaccatgcataagggaatgctgtgctacaaagctgtgcccaaatatgaaaacaaaataggaaacttaaaaagcaataccccctttagaaagtttttattttcttaaatgtcattgagttgctttgattctattggatttttggcattttttatgggatcatcagttggttccaagtatgttagatcagctaacatctgctactccagtaacagcctcgtacaactgcaggtaggttttctccagaccaattagttttaatagagcaaactaacaacagactgtagtagcatggttatggcaaccagaatcttcagaaaggttaggacattactttttaagctgtcagtggtatcaaataacttacctagttggaggcagataaaggatcccttacgttttttcctataaggcctaaattgaaattgttaaccaaggaaacagggtcagccttgaaaaatcaaggaattcattgtacctaataactgaagtaaaaataactagttgttcaacttttcctaaactcaaatctatttttataaacaaatgtaaataatgtttatattagagttgaactggttttcatttttataactggtagactagaccttccttaaacttttagaaataaaatgaaggcttcactggatttgtgaggataaaatacattttctttaattgtcctagagcaaagtacattagtcaccatgtgttttttgtgccaatgtaaattgtaatttaccaaagaaaaatacatacattgcttggtcttgcagaaaagttcccttgaaagaacctttccaataaataaaacgtcccaaattagcagtaccttgggctgtttttcatgagtaagaagattcaccatcccatgtgatctgtgtggaaaaagaccatgtcctcttggtggaagacatgagagagctgaactgaagtggaggaggtggtgcaagagggaccttcctgctcaaggcccgcccaggcagcggaatggagtgcagtgcttggctgcagaaaccctttgtccctcacctatatatacacggacagtcaagtttgttgctctaacgtaaggcacagcgttaatcctgtatggccaggaaactgagtagactcctgtgtaaccctgtttggaactttgccttcttaaaatgatttttcaaagatctctttcgaactaatttctgtagagtttaaacgtgtattttatcacctaa

SEQ ID NO: 154123 - DNA, 2465 bp, Homo sapiens
  Payload ID: 10286
  Gene Symbol: MCMBP
  Gene Name: minichromosome maintenance complex binding protein
  Uniprot ID: Q9BTE3
  ENST ID: ENST00000369077
  CDS Start-End: 266-2188
cccgccattgtgcgaagtgaaggctaggggcccgtacgcgcccgcctgactgtcgccagcagctcctcggcggccccaccgcagccgccgctccctgaggcgcgggaggcccgcgccccgcggctcgctgtgcgtgggagggcgcgagcgaacgcgggcgaggagcggccgagccgctgaagaggagctgggcgccggccgcccggccgcgctcggcccgcggatcgcctccgcccggtcttcgccggccccggcccctggcgagatgccgtgtggggaggattggctcagccacccgctgggaatcgtgcagggattcttcgcccaaaatggagttaatcctgactgggagaagaaagtaattgagtattttaaggaaaagctgaaggaaaataatgctcctaagtgggtaccatcactgaacgaagttccccttcattatttgaaacctaatagttttgtgaaatttcgttgcatgattcaggatatgtttgaccctgagttttacatgggagtttatgaaacggttaaccaaaacacaaaagcacatgttcttcattttggaaaatatagagatgtagcagagtgtgggcctcaacaagaacttgatttaaactctccacgaaataccactttggaaagacagactttctattgtgttccggtgcctggggaatctacgtgggtaaaagaagcctatgttaatgcaaaccaagctcgagtcagtccctcaacatcctacactcctagtcgccacaagaggagttatgaagatgatgacgatatggacctacagcccaataagcagaaagaccaacatgcaggtgccagacaagcagggagtgttggtggtcttcaatggtgtggagagccaaaacgtttagaaactgaagcttctactgggcaacagctgaactctctgaacttgtcttctccttttgatttgaattttccattgccaggagagaagggccctgcatgccttgtgaaggtttatgaagattgggattgtttcaaagtaaatgacattcttgagctatatggcatactgtctgtggatcctgtgctgagtatactgaataatgatgaaagggatgcctctgcactgctggatccgatggagtgcacagacacagcagaggagcagagagtacacagtcctcctgcttcattagtgccgagaattcatgtgatcttagcccagaagttgcaacacatcaacccattattgcctgcctgccttaacaaagaggagagcaaaacctttgtttcaagtttcatgtccgaattgtctccagtcagagcagaacttcttgggttccttactcatgcccttctgggggatagtttggctgctgaataccttatattacatctcatctccacagtatatacaagaagagatgtccttccactaggaaaatttacagttaacttgagtggttgcccacggaatagtaccttcacagaacacttgtatcgaattattcaacatcttgttccagcatcttttcgtctgcagatgactatagagaacatgaaccatttgaaattcattccccacaaagactacacagccaatcgcttggtcagtgggctcctccagctgcccagcaatacttcccttgtaatcgatgagactctcctggaacaggggcagctggataccccaggtgttcataatgtgacagccctgagcaacctcataacgtggcagaaggtggattatgacttcagctaccatcagatggaattcccctgcaatattaacgttttcattacttcggaggggaggtcactcctcccggcagactgccagattcacttacagccccagctaattccaccaaacatggaggagtacatgaacagccttctctcagcggtgctgccttccgtgctgaacaaattccgcatttatctaactcttttgagattcttggaatatagcatatctgatgaaataaccaaggcagttgaagatgactttgtggaaatgcggaagaacgaccctcagagcatcactgctgatgatcttcaccagctgctcgtggtggctcggtgtctgtctctcagtgctggtcagacaacgctgtcaagagaacgatggctgagagcaaagcagctagagtctttaagaagaacgaggcttcagcagcaaaaatgtgtgaatggaaatgaactttaaagatgtaatacctatgaagagtaatgggcaaactgtagccacataattgtaaaattcagatattcatttataccacattgttttataggtaatttctatcacaaaccagtgacatttcctgaaatcaagcctggtaacacctgatgtttatatgatattcagtaaggacttttaccttactgatttcatggagcttttgaagtttgttttataataattatataaattagtaatgatgtaaaaaaagtatttgatattaaaagtttaatattgataa

SEQ ID NO: 154124 - DNA, 3622 bp, Homo sapiens
  Payload ID: 10287
  Gene Symbol: MCM2
  Gene Name: minichromosome maintenance complex component 2
  Uniprot ID: P49736
  ENST ID: ENST00000265056
  CDS Start-End: 245-2959
ggcgagcgcacgcgcacagcgccgggccgcacacctccgggctctgggcggagcgcctcgggcgttgtaggcgggaccggaccctctggcccgcccctccgtgtcccttctggtcgccagtggacgccgacgtcatgacgtcgcgttccgtagggctcttcccgggctttggtgggtcacgtgaaccacttttcgcgcgaaacctggttgttgctgtagtggcggagaggatcgtggtactgctatggcggaatcatcggaatccttcaccatggcatccagcccggcccagcgtcggcgaggcaatgatcctctcacctccagccctggccgaagctcccggcgtactgatgccctcacctccagccctggccgtgaccttccaccatttgaggatgagtccgaggggctcctaggcacagaggggcccctggaggaagaagaggatggagaggagctcattggagatggcatggaaagggactaccgcgccatcccagagctggacgcctatgaggccgagggactggctctggatgatgaggacgtagaggagctgacggccagtcagagggaggcagcagagcgggccatgcggcagcgtgaccgggaggctggccggggcctgggccgcatgcgccgtgggctcctgtatgacagcgatgaggaggacgaggagcgccctgcccgcaagcgccgccaggtggagcgggccacggaggacggcgaggaggacgaggagatgatcgagagcatcgagaacctggaggatctcaaaggccactctgtgcgcgagtgggtgagcatggcgggcccccggctggagatccaccaccgcttcaagaacttcctgcgcactcacgtcgacagccacggccacaacgtcttcaaggagcgcatcagcgacatgtgcaaagagaaccgtgagagcctggtggtgaactatgaggacttggcagccagggagcacgtgctggcctacttcctgcctgaggcaccggcggagctgctgcagatctttgatgaggctgccctggaggtggtactggccatgtaccccaagtacgaccgcatcaccaaccacatccatgtccgcatctcccacctgcctctggtggaggagctgcgctcgctgaggcagctgcatctgaaccagctgatccgcaccagtggggtggtgaccagctgcactggcgtcctgccccagctcagcatggtcaagtacaactgcaacaagtgcaatttcgtcctgggtcctttctgccagtcccagaaccaggaggtgaaaccaggctcctgtcctgagtgccagtcggccggcccctttgaggtcaacatggaggagaccatctatcagaactaccagcgtatccgaatccaggagagtccaggcaaagtggcggctggccggctgccccgctccaaggacgccattctcctcgcagatctggtggacagctgcaagccaggagacgagatagagctgactggcatctatcacaacaactatgatggctccctcaacactgccaatggcttccctgtctttgccactgtcatcctagccaaccacgtggccaagaaggacaacaaggttgctgtaggggaactgaccgatgaagatgtgaagatgatcactagcctctccaaggatcagcagatcggagagaagatctttgccagcattgctccttccatctatggtcatgaagacatcaagagaggcctggctctggccctgttcggaggggagcccaaaaacccaggtggcaagcacaaggtacgtggtgatatcaacgtgctcttgtgcggagaccctggcacagcgaagtcgcagtttctcaagtatattgagaaagtgtccagccgagccatcttcaccactggccagggggcgtcggctgtgggcctcacggcgtatgtccagcggcaccctgtcagcagggagtggaccttggaggctggggccctggttctggctgaccgaggagtgtgtctcattgatgaatttgacaagatgaatgaccaggacagaaccagcatccatgaggccatggagcaacagagcatctccatctcgaaggctggcatcgtcacctccctgcaggctcgctgcacggtcattgctgccgccaaccccataggagggcgctacgacccctcgctgactttctctgagaacgtggacctcacagagcccatcatctcacgctttgacatcctgtgtgtggtgagggacaccgtggacccagtccaggacgagatgctggcccgcttcgtggtgggcagccacgtcagacaccaccccagcaacaaggaggaggaggggctggccaatggcagcgctgctgagcccgccatgcccaacacgtatggcgtggagcccctgccccaggaggtcctgaagaagtacatcatctacgccaaggagagggtccacccgaagctcaaccagatggaccaggacaaggtggccaagatgtacagtgacctgaggaaagaatctatggcgacaggcagcatccccattacggtgcggcacatcgagtccatgatccgcatggcggaggcccacgcgcgcatccatctgcgggactatgtgatcgaagacgacgtcaacatggccatccgcgtgatgctggagagcttcatagacacacagaagttcagcgtcatgcgcagcatgcgcaagacttttgcccgctacctttcattccggcgtgacaacaatgagctgttgctcttcatactgaagcagttagtggcagagcaggtgacatatcagcgcaaccgctttggggcccagcaggacactattgaggtccctgagaaggacttggtggataaggctcgtcagatcaacatccacaacctctctgcattttatgacagtgagctcttcaggatgaacaagttcagccacgacctgaaaaggaaaatgatcctgcagcagttctgaggccctatgccatccataaggattccttgggattctggtttggggtggtcagtgccctctgtgctttatggacacaaaaccagagcacttgatgaactcggggtactagggtcagggcttatagcaggatgtctggctgcacctggcatgactgtttgtttctccaagcctgctttgtgcttctcacctttgggtgggatgccttgccagtgtgtcttacttggttgctgaacatcttgccacctccgagtgctttgtctccactcagtaccttggatcagagctgctgagttcaggatgcctgcgtgtggtttaggtgttagccttcttacatggatgtcaggagagctgctgccctcttggcgtgagttgcgtattcaggctgcttttgctgcctttggccagagagctggttgaagatgtttgtaatcgttttcagtctcctgcaggtttctgtgcccctgtggtggaagagggcacgacagtgccagcgcagcgttctgggctcctcagtcgcaggggtgggatgtgagtcatgcggattatccactcgccacagttatcagctgccattgctccctgtctgtttccccactctcttatttgtgcattcggtttggtttctgtagttttaatttttaataaagttgaataaaatataaa

SEQ ID NO: 154125 - DNA, 2510 bp, Homo sapiens
  Payload ID: 10287
  Gene Symbol: MCM2
  Gene Name: minichromosome maintenance complex component 2
  ENST ID: ENST00000477668
  CDS Start-End: 1-274
cctaggcacagaggggcccctggaggaagaagaggatggagaggagctcattggagatggcatggaaagggactaccgcgccatcccagagctggacgcctatgaggccgagggactggctctggatgatgaggacgtagaggagctgacggccagtcagagggaggcagcagagcgggccatgcggcagcgtgaccgggaggctggccggggcctgggccgcatgcgccgtgggctcctgtatggtgtctcttgcctccccagacagcgatgaggaggacgaggagcgccctgcccgcaagcgccgccaggtggagcgggccacggaggacggcgaggaggacgaggagatgatcgagagcatcgagaacctggaggatctcaaaggccactctgtgcgcgagtgggtgagcatggcgggcccccggctggagatccaccaccgcttcaagaacttcctgcgcactcacgtcgacagccacggccacaacgtcttcaaggagcgcatcagcgacatgtgcaaagagaaccgtgagagcctggtggtgaactatgaggacttggcagccagggagcacgtgctggcctacttcctgcctgaggcaccggcggagctgctgcagatctttgatgaggctgccctggaggtggtactggccatgtaccccaagtacgaccgcatcaccaaccacatccatgtccgcatctcccacctgcctctggtggaggagctgcgctcgctgaggcagctgcatctgaaccagctgatccgcaccagtggggtggtgaccagctgcactggcgtcctgccccagctcagcatggtcaagtacaactgcaacaagtgcaatttcgtcctgggtcctttctgccagtcccagaaccaggaggtgaaaccaggctcctgtcctgagtgccagtcggccggcccctttgaggtcaacatggaggagaccatctatcagaactaccagcgtatccgaatccaggagagtccaggcaaagtggcggctggccggctgccccgctccaaggacgccattctcctcgcagatctggtggacagctgcaagccaggagacgagatagagctgactggcatctatcacaacaactatgatggctccctcaacactgccaatggcttccctgtctttgccactgtcatcctagccaaccacgtggccaagaaggacaacaaggttgctgtaggggaactgaccgatgaagatgtgaagatgatcactagcctctccaaggatcagcagatcggagagaagatctttgccagcattgctccttccatctatggtcatgaagacatcaagagaggcctggctctggccctgttcggaggggagcccaaaaacccaggtggcaagcacaaggtacgtggtgatatcaacgtgctcttgtgcggagaccctggcacagcgaagtcgcagtttctcaagtatattgagaaagtgtccagccgagccatcttcaccactggccagggggcgtcggctgtgggcctcacggcgtatgtccagcggcaccctgtcagcagggagtggaccttggaggctggggccctggttctggctgaccgaggagtgtgtctcattgatgaatttgacaagatgaatgaccaggacagaaccagcatccatgaggccatggagcaacagagcatctccatctcgaaggctggcatcgtcacctccctgcaggctcgctgcacggtcattgctgccgccaaccccataggacgagatgctggcccgcttcgtggtgggcagccacgtcagacaccaccccagcaacaaggaggaggaggggctggccaatggcagcgctgctgagcccgccatgcccaacacgtatggcgtggagcccctgccccaggaggtcctgaagaagtacatcatctacgccaaggagagggtccacccgaagctcaaccagatggaccaggacaaggtggccaagatgtacagtgacctgaggaaagaatctatggcgacaggcagcatccccattacggtgcggcacatcgagtccatgatccgcatggcggaggcccacgcgcgcatccatctgcgggactatgtgatcgaagacgacgtcaacatggccatccgcgtgatgctggagagcttcatagacacacagaagttcagcgtcatgcgcagcatgcgcaagacttttgcccgctacctttcattccggcgtgacaacaatgagctgttgctcttcatactgaagcagttagtggcagagcaggtgacatatcagcgcaaccgctttggggcccagcaggacactattgaggtccctgagaaggacttggtggataaggctcgtcagatcaacatccacaacctctctgcattttatgacagtgagctcttcaggatgaacaagttcagccacgacctgaaaaggaaaatgatcctgcagcagttctgaggccctatgccatccataaggattccttgggattctggtttggggtggtcagtgcc

SEQ ID NO: 154126 - DNA, 547 bp, Homo sapiens
  Payload ID: 10287
  Gene Symbol: MCM2
  Gene Name: minichromosome maintenance complex component 2
  ENST ID: ENST00000472731
  CDS Start-End: 238-547
ttgtttggaagccactgactcagattgctcagctgagagcattccaggtgagagaacagcaagggcaaagatctggaggctggaaggggtttggtgtgttggaggacaagagtcacaggtggagagaaagaagggaaggcccctgatggtaaaaaggaagctgtatcatgcctcaccagcttcctaggtttctgacaaccgcaccttctcttgcaggaatcatcggaatccttcaccatggcatccagcccggcccagcgtcggcgaggcaatgatcctctcacctccagccctggccgaagctcccggcgtactgatgccctcacctccagccctggccgtgaccttccaccatttgaggatgagtccgaggggctcctaggcacagaggggcccctggaggaagaagaggatggagaggagctcattggagatggcatggaaagggactaccgcgccatcccagagctggacgcctatgaggccgagggactggctctggatgatgaggacgtagaggagctgacggccagtcagagggaggcag

SEQ ID NO: 154127 - DNA, 693 bp, Homo sapiens
  Payload ID: 10287
  Gene Symbol: MCM2
  Gene Name: minichromosome maintenance complex component 2
  ENST ID: ENST00000480910
  CDS Start-End: 309-693
gtccctttgtcttgtatactgtctgttccacatctgagttccagacctcttgttttggtggctcttctatgccatctctatcacaataccttgcgcactgtgtgtgctgaaataggtctaatgcttaaggggagataatagacagtaaacaggtaaataggcaaatgacataacctcagtggtttttcatggagaaagcacggtgatgtgggtgaccccgatatttgagctggcttctatttgtttggaagccactgactcagattgctcagctgagagcattccaggaatcatcggaatccttcaccatggcatccagcccggcccagcgtcggcgaggcaatgatcctctcacctccagccctggccgaagctcccggcgtactgatgccctcacctccagccctggccgtgaccttccaccatttgaggatgagtccgaggggctcctaggcacagaggggcccctggaggaagaagaggatggagaggagctcattggagatggcatggaaagggactaccgcgccatcccagagctggacgcctatgaggccgagggactggctctggatgatgaggacgtagaggagctgacggccagtcagagggaggcagcagagcgggccatgcggcagcgtgaccgggaggctggccggggcctgggccgcatgcgccgtgggctcctgtatg

SEQ ID NO: 154128 - DNA, 2847 bp, Homo sapiens
  Payload ID: 10287
  Gene Symbol: MCM2
  Gene Name: minichromosome maintenance complex component 2
  ENST ID: ENST00000474964
  CDS Start-End: 58-498
acttttcgcgcgaaacctggttgttgctgtagtggcggagaggatcgtggtactgctatggcggaatcatcggaatccttcaccatggcatccagcccggcccagcgtcggcgaggcaatgatcctctcacctccagccctggccgaagctcccggcgtactgatgccctcacctccagccctggccgtgaccttccaccatttgaggatgagtccgaggggctcctaggcacagaggggcccctggaggaagaagaggatggagaggagctcattggagatggcatggaaagggactaccgcgccatcccagagctggacgcctatgaggccgagggactggctctggatgatgaggacgtagaggagctgacggccagtcagagggaggcagcagagcgggccatgcggcagcgtgaccgggaggctggccggggcctgggccgcatgcgccgtgggctcctgtatggtgtctcttgcctccccagacagcgatgaggaggacgaggagcgccctgcccgcaagcgccgccaggtggagcgggccacggaggacggcgaggaggacgaggagatgatcgagagcatcgagaacctggaggatctcaaaggccactctgtgcgcgagtgggtgagcatggcgggcccccggctggagatccaccaccgcttcaagaacttcctgcgcactcacgtcgacagccacggccacaacgtcttcaaggagcgcatcagcgacatgtgcaaagagaaccgtgagagcctggtggtgaactatgaggacttggcagccagggagcacgtgctggcctacttcctgcctgaggcaccggcggagctgctgcagatctttgatgaggctgccctggaggtggtactggccatgtaccccaagtacgaccgcatcaccaaccacatccatgtccgcatctcccacctgcctctggtggaggagctgcgctcgctgaggcagctgcatctgaaccagctgatccgcaccagtggggtggtgaccagctgcactggcgtcctgccccagctcagcatggtcaagtacaactgcaacaagtgcaatttcgtcctgggtcctttctgccagtcccagaaccaggaggtgaaaccaggctcctgtcctgagtgccagtcggccggcccctttgaggtcaacatggaggagaccatctatcagaactaccagcgtatccgaatccaggagagtccaggcaaagtggcggctggccggctgccccgctccaaggacgccattctcctcgcagatctggtggacagctgcaagccaggagacgagatagagctgactggcatctatcacaacaactatgatggctccctcaacactgccaatggcttccctgtctttgccactgtcatcctagccaaccacgtggccaagaaggacaacaaggttgctgtaggggaactgaccgatgaagatgtgaagatgatcactagcctctccaaggatcagcagatcggagagaagatctttgccagcattgctccttccatctatggtcatgaagacatcaagagaggcctggctctggccctgttcggaggggagcccaaaaacccaggtggcaagcacaaggtacgtggtgatatcaacgtgctcttgtgcggagaccctggcacagcgaagtcgcagtttctcaagtatattgagaaagtgtccagccgagccatcttcaccactggccagggggcgtcggctgtgggcctcacggcgtatgtccagcggcaccctgtcagcagggagtggaccttggaggctggggccctggttctggctgaccgaggagtgtgtctcattgatgaatttgacaagatgaatgaccaggacagaaccagcatccatgaggccatggagcaacagagcatctccatctcgaaggctggcatcgtcacctccctgcaggctcgctgcacggtcattgctgccgccaaccccataggagggcgctacgacccctcgctgactttctctgagaacgtggacctcacagagcccatcatctcacgctttgacatcctgtgtgtggtgagggacaccgtggacccagtccaggacgagatgctggcccgcttcgtggtgggcagccacgtcagacaccaccccagcaacaaggaggaggaggggctggccaatggcagcgctgctgagcccgccatgcccaacacgtatggcgtggagcccctgccccaggaggtcctgaagaagtacatcatctacgccaaggagagggtccacccgaagctcaaccagatggaccaggacaaggtggccaagatgtacagtgacctgaggaaagaatctatggcgacaggcagcatccccattacggtgcggcacatcgagtccatgatccgcatggcggaggcccacgcgcgcatccatctgcgggactatgtgatcgaagacgacgtcaacatggccatccgcgtgatgctggagagcttcatagacacacagaagttcagcgtcatgcgcagcatgcgcaagacttttgcccgctacctttcattccggcgtgacaacaatgagctgttgctcttcatactgaagcagttagtggcagagcaggtgacatatcagcgcaaccgctttggggcccagcaggacactattgaggtccctgagaaggacttggtggataaggctcgtcagatcaacatccacaacctctctgcattttatgacagtgagctcttcaggatgaacaagttcagccacgacctgaaaaggaaaatgatcctgcagcagttctgaggccctatgccatccataaggattccttgggattctggtttggggtggtcagtgcc

SEQ ID NO: 154129 - DNA, 2844 bp, Homo sapiens
  Payload ID: 10287
  Gene Symbol: MCM2
  Gene Name: minichromosome maintenance complex component 2
  ENST ID: ENST00000491422
  CDS Start-End: 1-2510
acagcgatgaggaggacgaggagcgccctgcccgcaagcgccgccaggtggagcgggccacggaggacggcgaggaggacgaggagatgatcgagagcatcgagaacctggaggatctcaaaggccactctgtgcgcgagtgggtgagcatggcgggcccccggctggagatccaccaccgcttcaagaacttcctgcgcactcacgtcgacagccacggccacaacgtcttcaaggagcgcatcagcgacatgtgcaaagagaaccgtgagagcctggtggtgaactatgaggacttggcagccagggagcacgtgctggcctacttcctgcctgaggcaccggcggagctgctgcagatctttgatgaggctgccctggaggtggtactggccatgtaccccaagtacgaccgcatcaccaaccacatccatgtccgcatctcccacctgcctctggtggaggagctgcgctcgctgaggcagctgcatctgaaccagctgatccgcaccagtggggtggtgaccagctgcactggcgtcctgccccagctcagcatggtcaagtacaactgcaacaagtgcaatttcgtcctgggtcctttctgccagtcccagaaccaggaggtgaaaccaggctcctgtcctgagtgccagtcggccggcccctttgaggtcaacatggaggagaccatctatcagaactaccagcgtatccgaatccaggagagtccaggcaaagtggcggctggccggctgccccgctccaaggacgccattctcctcgcagatctggtggacagctgcaagccaggagacgagatagagctgactggcatctatcacaacaactatgatggctccctcaacactgccaatggcttccctgtctttgccactgtcatcctagccaaccacgtggccaagaaggacaacaaggttgctgtaggggaactgaccgatgaagatgtgaagatgatcactagcctctccaaggatcagcagatcggagagaaggaaagctccagaaatgcatccctggcagaggctggtattggtgccattccttcccagctcttggccatcgaacctagtctgcgaagatctggggttcccataggagaggtgggtgtttctcagcgtcaggaagccaggagcttcagttcagccaacacacattggttcctggaagacctcctagggccaagttgtagggatacaatgatctttgccagcattgctccttccatctatggtcatgaagacatcaagagaggcctggctctggccctgttcggaggggagcccaaaaacccaggtggcaagcacaaggtacgtggtgatatcaacgtgctcttgtgcggagaccctggcacagcgaagtcgcagtttctcaagtatattgagaaagtgtccagccgagccatcttcaccactggccagggggcgtcggctgtgggcctcacggcgtatgtccagcggcaccctgtcagcagggagtggaccttggaggctggggccctggttctggctgaccgaggagtgtgtctcattgatgaatttgacaagatgaatgaccaggacagaaccagcatccatgaggccatggagcaacagagcatctccatctcgaaggctggcatcgtcacctccctgcaggctcgctgcacggtcattgctgccgccaaccccataggagggcgctacgacccctcgctgactttctctgagaacgtggacctcacagagcccatcatctcacgctttgacatcctgtgtgtggtgagggacaccgtggacccagtccaggacgagatgctggcccgcttcgtggtgggcagccacgtcagacaccaccccagcaacaaggaggaggaggggctggccaatggcagcgctgctgagcccgccatgcccaacacgtatggcgtggagcccctgccccaggaggtcctgaagaagtacatcatctacgccaaggagagggtccacccgaagctcaaccagatggaccaggacaaggtggccaagatgtacagtgacctgaggaaagaatctatggcgacaggcagcatccccattacggtgcggcacatcgagtccatgatccgcatggcggaggcccacgcgcgcatccatctgcgggactatgtgatcgaagacgacgtcaacatggccatccgcgtgatgctggagagcttcatagacacacagaagttcagcgtcatgcgcagcatgcgcaagacttttgcccgctacctttcattccggcgtgacaacaatgagctgttgctcttcatactgaagcagttagtggcagagcaggtgacatatcagcgcaaccgctttggggcccagcaggacactattgaggtccctgagaaggacttggtggataaggctcgtcagatcaacatccacaacctctctgcattttatgacagtgagctcttcaggatgaacaagttcagccacgacctgaaaaggaaaatgatcctgcagcagttctgaggccctatgccatccataaggattccttgggattctggtttggggtggtcagtgccctctgtgctttatggacacaaaaccagagcacttgatgaactcggggtactagggtcagggcttatagcaggatgtctggctgcacctggcatgactgtttgtttctccaagcctgctttgtgcttctcacctttgggtgggatgccttgccagtgtgtcttacttggttgctgaacatcttgccacctccgagtgctttgtctccactcagtaccttggatcagagctgctgagttcaggatgcctgcgtgtggtttaggtgttagccttcttacat

SEQ ID NO: 154130 - DNA, 3083 bp, Homo sapiens
  Payload ID: 10288
  Gene Symbol: MCM3
  Gene Name: minichromosome maintenance complex component 3
  Uniprot ID: P25205
  ENST ID: ENST00000229854
  CDS Start-End: 78-2504
gaagttttcgcgccggggtggagtcatcctgggaacctccacgcgactttggtggaggtagttctttggcagcgggcatggcgggtaccgtggtgctggacgatgtggagctgcgggaggctcagagagattacctggacttcctggacgacgaggaagaccagggaatttatcagagcaaagttcgggagctgatcagtgacaaccaataccggctgattgtcaatgtgaatgacctgcgcaggaaaaacgagaagagggctaaccggcttctgaacaatgcctttgaggagctggttgccttccagcgggccttaaaggattttgtggcctccattgatgctacctatgccaagcagtatgaggagttctacgtaggactggaaggcagctttggctccaagcacgtctccccgcggactcttacctcctgcttcctcagctgtgtggtctgtgtggagggcattgtcactaaatgttctctagttcgtcccaaagtcgtccgcagtgtccactactgtcctgctactaagaagaccatagagcgacgttattctgatctcaccaccctggtggcctttccctccagctctgtctatcctaccaaggatgaggagaacaatccccttgagacagaatatggcctttctgtctacaaggatcaccagaccatcaccatccaggagatgccggagaaggccccagccggccagctcccccgctctgtggacgtcattctggatgatgacttggtggataaagcgaagcctggtgaccgggttcaggtggtgggaacctaccgttgccttcctggaaagaagggaggctacacctctgggaccttcaggactgtcctgattgcctgtaatgttaagcagatgagcaaggatgctcagccctctttctctgctgaggatatagccaagatcaagaagttcagtaaaacccgatccaaggatatctttgaccagctggccaagtcattggccccaagtatccatgggcatgactatgtcaagaaagcaatcctctgcttgctcttgggaggggtggaacgagacctagaaaatggcagccacatccgtggggacatcaatattcttctaataggagacccatccgttgccaagtctcagcttctgcggtatgtgctttgcactgcaccccgagctatccccaccactggccggggctcctctggagtgggtctgacggctgctgtcaccacagaccaggaaacaggagagcgccgtctggaagcaggggccatggtcctggctgaccgaggcgtggtttgcattgatgaatttgacaaaatgtctgacatggatcgcacagccatccatgaagtgatggagcagggtcgagtgaccattgccaaggctggcatccatgctcggctgaatgcccgctgcagtgttttggcagctgccaaccctgtctacggcaggtatgaccagtataagactccaatggagaacattgggctacaggactcactgctgtcacgatttgacttgctcttcatcatgctggatcagatggatcctgagcaggatcgggagatctcagaccatgtccttcggatgcaccgttacagagcacctggggagcaggatggcgatgctatgcccttgggtagtgctgtggatatcctggccacagatgatcccaactttagccaggaagatcagcaggacacccagatttatgagaagcatgacaaccttctacatgggaccaagaagaaaaaggagaagatggtgagtgcagcattcatgaagaagtacatccatgtggccaaaatcatcaagcctgtcctgacacaggagtcggccacctacattgcagaagagtattcacgcctgcgcagccaggatagcatgagctcagacaccgccaggacatctccagttacagcccgaacactggaaactctgattcgactggccacagcccatgcgaaggcccgcatgagcaagactgtggacctgcaggatgcagaggaagctgtggagttggtccagtatgcttactttaagaaggttctggagaaggagaagaaacgtaagaagcgaagtgaggatgaatcagagacagaagatgaagaggagaaaagccaagaggaccaggagcagaagaggaagagaaggaagactcgccagccagatgccaaagatggggattcatacgacccctatgacttcagtgacacagaggaggaaatgcctcaagtacacactccaaagacggcagactcacaggagaccaaggaatcccagaaagtggagttgagtgaatccaggttgaaggcattcaaggtggccctcttggatgtgttccgggaagctcatgcgcagtcaatcggcatgaatcgcctcacagaatccatcaaccgggacagcgaagagcccttctcttcagttgagatccaggctgctctgagcaagatgcaggatgacaatcaggtcatggtgtctgagggcatcatcttcctcatctgaggaggcctcgtctctgaacttgggttgtgccgagagagtttgttctgtgtttcccaccctctccctgacccaagtctttgcctctactcccttaacagtgttgaattcaactgaaggcgaggaatgttggtgatgaagctgagttcaggactcggtggaccctttgggaatgggtcatgaaagctgccatggggtgaggaaagaggagacagtgggagaggacaatgactattgcatcttcattgcaaaagcactggctcatccgccctacttcccatcccacacaaacccaattgtaaataacatatgacttctgagtacttttgggggcacaactgttttctgtttgctgtttttttgttttgttttttttctccagagcactttggtctagactaggctttgggtggttccaattggtggagagaagctctgaggcacgtcatgcaggtcaagaaagctttctttgcagtagcaccagttaaggtgaatatgtattgtatcacaaaacaaacccaatatccagatgaatatccgagatgttgaataaacttagccatttcgtacacatggtcttaa

SEQ ID NO: 154131 - DNA, 3095 bp, Homo sapiens
  Payload ID: 10288
  Gene Symbol: MCM3
  Gene Name: minichromosome maintenance complex component 3
  ENST ID: ENST00000419835
  CDS Start-End: 65-2521
gaagaagaagaagcttttgattggacagtcgctagtccgacctcagagaactcagccaatcataatgcttatatgctcccaaggtccccgcctcttcctcgaggtaacctttggtggcgggaagagttcggaagttttcgcgccggggtggagtcatcctgggaacctccacgcgactttggtggaggtagttctttggcagcgggcatggcgggtaccgtggtgctggacgatgtggagctgcgggaggctcagagagattacctggacttcctggacgacgaggcttctgaacaatgcctttgaggagctggttgccttccagcgggccttaaaggattttgtggcctccattgatgctacctatgccaagcagtatgaggagttctacgtaggactggaaggcagctttggctccaagcacgtctccccgcggactcttacctcctgcttcctcagctgtgtggtctgtgtggagggcattgtcactaaatgttctctagttcgtcccaaagtcgtccgcagtgtccactactgtcctgctactaagaagaccatagagcgacgttattctgatctcaccaccctggtggcctttccctccagctctgtctatcctaccaaggatgaggagaacaatccccttgagacagaatatggcctttctgtctacaaggatcaccagaccatcaccatccaggagatgccggagaaggccccagccggccagctcccccgctctgtggacgtcattctggatgatgacttggtggataaagcgaagcctggtgaccgggttcaggtggtgggaacctaccgttgccttcctggaaagaagggaggctacacctctgggaccttcaggactgtcctgattgcctgtaatgttaagcagatgagcaaggatgctcagccctctttctctgctgaggatatagccaagatcaagaagttcagtaaaacccgatccaaggatatctttgaccagctggccaagtcattggccccaagtatccatgggcatgactatgtcaagaaagcaatcctctgcttgctcttgggaggggtggaacgagacctagaaaatggcagccacatccgtggggacatcaatattcttctaataggagacccatccgttgccaagtctcagcttctgcggtatgtgctttgcactgcaccccgagctatccccaccactggccggggctcctctggagtgggtctgacggctgctgtcaccacagaccaggaaacaggagagcgccgtctggaagcaggggccatggtcctggctgaccgaggcgtggtttgcattgatgaatttgacaaaatgtctgacatggatcgcacagccatccatgaagtgatggagcagggtcgagtgaccattgccaaggctggcatccatgctcggctgaatgcccgctgcagtgttttggcagctgccaaccctgtctacggcaggtatgaccagtataagactccaatggagaacattgggctacaggactcactgctgtcacgatttgacttgctcttcatcatgctggatcagatggatcctgagcaggatcgggagatctcagaccatgtccttcggatgcaccgttacagagcacctggggagcaggatggcgatgctatgcccttgggtagtgctgtggatatcctggccacagatgatcccaactttagccaggaagatcagcaggacacccagatttatgagaagcatgacaaccttctacatgggaccaagaagaaaaaggagaagatggtgagtgcagcattcatgaagaagtacatccatgtggccaaaatcatcaagcctgtcctgacacaggagtcggccacctacattgcagaagagtattcacgcctgcgcagccaggatagcatgagctcagacaccgccaggacatctccagttacagcccgaacactggaaactctgattcgactggccacagcccatgcgaaggcccgcatgagcaagactgtggacctgcaggatgcagaggaagctgtggagttggtccagtatgcttactttaagaaggttctggagaaggagaagaaacgtaagaagcgaagtgaggatgaatcagagacagaagatgaagaggagaaaagccaagaggaccaggagcagaagaggaagagaaggaagactcgccagccagatgccaaagatggggattcatacgacccctatgacttcagtgacacagaggaggaaatgcctcaagtacacactccaaagacggcagactcacaggagaccaaggaatcccagaaagtggagttgagtgaatccaggttgaaggcattcaaggtggccctcttggatgtgttccgggaagctcatgcgcagtcaatcggcatgaatcgcctcacagaatccatcaaccgggacagcgaagagcccttctcttcagttgagatccaggctgctctgagcaagatgcaggatgacaatcaggtcatggtgtctgagggcatcatcttcctcatctgaggaggcctcgtctctgaacttgggttgtgccgagagagtttgttctgtgtttcccaccctctccctgacccaagtctttgcctctactcccttaacagtgttgaattcaactgaaggcgaggaatgttggtgatgaagctgagttcaggactcggtggaccctttgggaatgggtcatgaaagctgccatggggtgaggaaagaggagacagtgggagaggacaatgactattgcatcttcattgcaaaagcactggctcatccgccctacttcccatcccacacaaacccaattgtaaataacatatgacttctgagtacttttgggggcacaactgttttctgtttgctgtttttttgttttgttttttttctccagagcactttggtctagactaggctttgggtggttccaattggtggagagaagctctgaggcacgtcatgcaggtcaagaaagctttctttgcagtagcaccagttaaggtgaatatgtattgtatcacaaaacaaacccaatatccagatgaatatccgagatgttgaataaacttagccatttcgtacacatggt

SEQ ID NO: 154132 - DNA, 1030 bp, Homo sapiens
  Payload ID: 10288
  Gene Symbol: MCM3
  Gene Name: minichromosome maintenance complex component 3
  ENST ID: ENST00000421471
  CDS Start-End: 1-987
cgttacagagcacctggggagcaggatggcgatgctatgcccttgggtagtgctgtggatatcctggccacagatgatcccaactttagccaggaagatcagcaggacacccagatttatgagaagcatgacaaccttctacatgggaccaagaagaaaaaggagaagatggtgagtgcagcattcatgaagaagtacatccatgtggccaaaatcatcaagcctgtcctgacacaggagtcggccacctacattgcagaagagtattcacgcctgcgcagccaggatagcatgagctcagacaccgccaggacatctccagttacagcccgaacactggaaactctgattcgactggccacagcccatgcgaaggcccgcatgagcaagactgtggacctgcaggatgcagaggaagctgtggagttggtccagtatgcttactttaagaaggttctggagaaggagaagaaacgtaagaagcgaagtgaggatgaatcagagacagaagatgaagaggagaaaagccaagaggaccaggagcagaagaggaagagaaggaagactcgccagccagatgccaaagatggggattcatacgacccctatgacttcagtgacacagaggaggaaatgcctcaagtacacactccaaagacggcagactcacaggagaccaaggaatcccagaaagtggagttgagtgaatccagagacgggatctcaccatgttgcccaggctggtcttggactcctggcctcaagcagtccttctacctgagcctcccaaaaggctgggattacaggcataagccactgtgcttgtttgatctcattctttttaatgactgcagggtttccatggttgaaggcattcaaggtggccctcttggatgtgttccgggaagctcatgcgcagtcaatcggcatgaatcgcctcacagaatccatcaaccgggacagcgaagagcccttctcttcagttgagatccaggctgctctgagcaagatgcaggatgacaatcaggtc

SEQ ID NO: 154133 - DNA, 559 bp, Homo sapiens
  Payload ID: 10288
  Gene Symbol: MCM3
  Gene Name: minichromosome maintenance complex component 3
  ENST ID: ENST00000596983
  CDS Start-End: 73-306
gaagaagaagaagcttttgattggacagtcgctagtccgacctcagagaactcagccaatcataatgcttatatgctcccaaggtccccgcctcttcctcgaggtaacctttggtggcgggaagagttcggaagttttcgcgccggggtggagtcatcctgggaacctccacgcgactttggtggaggtagttctttggcagcgggcatggcgggtaccgtggtgctggacgatgtggagctgcgggaggctcagagagattacctggacttcctggacgacgaggcttctgaacaatgcctttgaggagctggttgccttccagcgggccttaaaggattttgtggcctccattgatgctacctatgccaagcagtatgaggagttctacgtaggactggaaggcagctttggctccaagcacgtctccccgcggactcttacctcctgcttcctcagctgtgtggtctgtgtggagggcattgtcactaaatgttctctagttcgtcccaaagtcgtccgcagtgtccactactgtcctgctactaagaagaccata

SEQ ID NO: 154134 - DNA, 3169 bp, Homo sapiens
  Payload ID: 10288
  Gene Symbol: MCM3
  Gene Name: minichromosome maintenance complex component 3
  Uniprot ID: P25205
  ENST ID: ENST00000596288
  CDS Start-End: 29-2590
agagaactcagccaatcataatgcttatatgctcccaaggtccccgcctcttcctcgaggtaacctttggtggcgggaagagttcggaagttttcgcgccggggtggagtcatcctgggaacctccacgcgactttggtggaggtagttctttggcagcgggcatggcgggtaccgtggtgctggacgatgtggagctgcgggaggctcagagagattacctggacttcctggacgacgaggaagaccagggaatttatcagagcaaagttcgggagctgatcagtgacaaccaataccggctgattgtcaatgtgaatgacctgcgcaggaaaaacgagaagagggctaaccggcttctgaacaatgcctttgaggagctggttgccttccagcgggccttaaaggattttgtggcctccattgatgctacctatgccaagcagtatgaggagttctacgtaggactggaaggcagctttggctccaagcacgtctccccgcggactcttacctcctgcttcctcagctgtgtggtctgtgtggagggcattgtcactaaatgttctctagttcgtcccaaagtcgtccgcagtgtccactactgtcctgctactaagaagaccatagagcgacgttattctgatctcaccaccctggtggcctttccctccagctctgtctatcctaccaaggatgaggagaacaatccccttgagacagaatatggcctttctgtctacaaggatcaccagaccatcaccatccaggagatgccggagaaggccccagccggccagctcccccgctctgtggacgtcattctggatgatgacttggtggataaagcgaagcctggtgaccgggttcaggtggtgggaacctaccgttgccttcctggaaagaagggaggctacacctctgggaccttcaggactgtcctgattgcctgtaatgttaagcagatgagcaaggatgctcagccctctttctctgctgaggatatagccaagatcaagaagttcagtaaaacccgatccaaggatatctttgaccagctggccaagtcattggccccaagtatccatgggcatgactatgtcaagaaagcaatcctctgcttgctcttgggaggggtggaacgagacctagaaaatggcagccacatccgtggggacatcaatattcttctaataggagacccatccgttgccaagtctcagcttctgcggtatgtgctttgcactgcaccccgagctatccccaccactggccggggctcctctggagtgggtctgacggctgctgtcaccacagaccaggaaacaggagagcgccgtctggaagcaggggccatggtcctggctgaccgaggcgtggtttgcattgatgaatttgacaaaatgtctgacatggatcgcacagccatccatgaagtgatggagcagggtcgagtgaccattgccaaggctggcatccatgctcggctgaatgcccgctgcagtgttttggcagctgccaaccctgtctacggcaggtatgaccagtataagactccaatggagaacattgggctacaggactcactgctgtcacgatttgacttgctcttcatcatgctggatcagatggatcctgagcaggatcgggagatctcagaccatgtccttcggatgcaccgttacagagcacctggggagcaggatggcgatgctatgcccttgggtagtgctgtggatatcctggccacagatgatcccaactttagccaggaagatcagcaggacacccagatttatgagaagcatgacaaccttctacatgggaccaagaagaaaaaggagaagatggtgagtgcagcattcatgaagaagtacatccatgtggccaaaatcatcaagcctgtcctgacacaggagtcggccacctacattgcagaagagtattcacgcctgcgcagccaggatagcatgagctcagacaccgccaggacatctccagttacagcccgaacactggaaactctgattcgactggccacagcccatgcgaaggcccgcatgagcaagactgtggacctgcaggatgcagaggaagctgtggagttggtccagtatgcttactttaagaaggttctggagaaggagaagaaacgtaagaagcgaagtgaggatgaatcagagacagaagatgaagaggagaaaagccaagaggaccaggagcagaagaggaagagaaggaagactcgccagccagatgccaaagatggggattcatacgacccctatgacttcagtgacacagaggaggaaatgcctcaagtacacactccaaagacggcagactcacaggagaccaaggaatcccagaaagtggagttgagtgaatccaggttgaaggcattcaaggtggccctcttggatgtgttccgggaagctcatgcgcagtcaatcggcatgaatcgcctcacagaatccatcaaccgggacagcgaagagcccttctcttcagttgagatccaggctgctctgagcaagatgcaggatgacaatcaggtcatggtgtctgagggcatcatcttcctcatctgaggaggcctcgtctctgaacttgggttgtgccgagagagtttgttctgtgtttcccaccctctccctgacccaagtctttgcctctactcccttaacagtgttgaattcaactgaaggcgaggaatgttggtgatgaagctgagttcaggactcggtggaccctttgggaatgggtcatgaaagctgccatggggtgaggaaagaggagacagtgggagaggacaatgactattgcatcttcattgcaaaagcactggctcatccgccctacttcccatcccacacaaacccaattgtaaataacatatgacttctgagtacttttgggggcacaactgttttctgtttgctgtttttttgttttgttttttttctccagagcactttggtctagactaggctttgggtggttccaattggtggagagaagctctgaggcacgtcatgcaggtcaagaaagctttctttgcagtagcaccagttaaggtgaatatgtattgtatcacaaaacaaacccaatatccagatgaatatccgagatgttgaataaacttagccatttcgtacacatggtcttaa

SEQ ID NO: 154135 - DNA, 3208 bp, Homo sapiens
  Payload ID: 10288
  Gene Symbol: MCM3
  Gene Name: minichromosome maintenance complex component 3
  Uniprot ID: P25205
  ENST ID: ENST00000616552
  CDS Start-End: 73-2634
gaagaagaagaagcttttgattggacagtcgctagtccgacctcagagaactcagccaatcataatgcttatatgctcccaaggtccccgcctcttcctcgaggtaacctttggtggcgggaagagttcggaagttttcgcgccggggtggagtcatcctgggaacctccacgcgactttggtggaggtagttctttggcagcgggcatggcgggtaccgtggtgctggacgatgtggagctgcgggaggctcagagagattacctggacttcctggacgacgaggaagaccagggaatttatcagagcaaagttcgggagctgatcagtgacaaccaataccggctgattgtcaatgtgaatgacctgcgcaggaaaaacgagaagagggctaaccggcttctgaacaatgcctttgaggagctggttgccttccagcgggccttaaaggattttgtggcctccattgatgctacctatgccaagcagtatgaggagttctacgtaggactggaaggcagctttggctccaagcacgtctccccgcggactcttacctcctgcttcctcagctgtgtggtctgtgtggagggcattgtcactaaatgttctctagttcgtcccaaagtcgtccgcagtgtccactactgtcctgctactaagaagaccatagagcgacgttattctgatctcaccaccctggtggcctttccctccagctctgtctatcctaccaaggatgaggagaacaatccccttgagacagaatatggcctttctgtctacaaggatcaccagaccatcaccatccaggagatgccggagaaggccccagccggccagctcccccgctctgtggacgtcattctggatgatgacttggtggataaagcgaagcctggtgaccgggttcaggtggtgggaacctaccgttgccttcctggaaagaagggaggctacacctctgggaccttcaggactgtcctgattgcctgtaatgttaagcagatgagcaaggatgctcagccctctttctctgctgaggatatagccaagatcaagaagttcagtaaaacccgatccaaggatatctttgaccagctggccaagtcattggccccaagtatccatgggcatgactatgtcaagaaagcaatcctctgcttgctcttgggaggggtggaacgagacctagaaaatggcagccacatccgtggggacatcaatattcttctaataggagacccatccgttgccaagtctcagcttctgcggtatgtgctttgcactgcaccccgagctatccccaccactggccggggctcctctggagtgggtctgacggctgctgtcaccacagaccaggaaacaggagagcgccgtctggaagcaggggccatggtcctggctgaccgaggcgtggtttgcattgatgaatttgacaaaatgtctgacatggatcgcacagccatccatgaagtgatggagcagggtcgagtgaccattgccaaggctggcatccatgctcggctgaatgcccgctgcagtgttttggcagctgccaaccctgtctacggcaggtatgaccagtataagactccaatggagaacattgggctacaggactcactgctgtcacgatttgacttgctcttcatcatgctggatcagatggatcctgagcaggatcgggagatctcagaccatgtccttcggatgcaccgttacagagcacctggggagcaggatggcgatgctatgcccttgggtagtgctgtggatatcctggccacagatgatcccaactttagccaggaagatcagcaggacacccagatttatgagaagcatgacaaccttctacatgggaccaagaagaaaaaggagaagatggtgagtgcagcattcatgaagaagtacatccatgtggccaaaatcatcaagcctgtcctgacacaggagtcggccacctacattgcagaagagtattcacgcctgcgcagccaggatagcatgagctcagacaccgccaggacatctccagttacagcccgaacactggaaactctgattcgactggccacagcccatgcgaaggcccgcatgagcaagactgtggacctgcaggatgcagaggaagctgtggagttggtccagtatgcttactttaagaaggttctggagaaggagaagaaacgtaagaagcgaagtgaggatgaatcagagacagaagatgaagaggagaaaagccaagaggaccaggagcagaagaggaagagaaggaagactcgccagccagatgccaaagatggggattcatacgacccctatgacttcagtgacacagaggaggaaatgcctcaagtacacactccaaagacggcagactcacaggagaccaaggaatcccagaaagtggagttgagtgaatccaggttgaaggcattcaaggtggccctcttggatgtgttccgggaagctcatgcgcagtcaatcggcatgaatcgcctcacagaatccatcaaccgggacagcgaagagcccttctcttcagttgagatccaggctgctctgagcaagatgcaggatgacaatcaggtcatggtgtctgagggcatcatcttcctcatctgaggaggcctcgtctctgaacttgggttgtgccgagagagtttgttctgtgtttcccaccctctccctgacccaagtctttgcctctactcccttaacagtgttgaattcaactgaaggcgaggaatgttggtgatgaagctgagttcaggactcggtggaccctttgggaatgggtcatgaaagctgccatggggtgaggaaagaggagacagtgggagaggacaatgactattgcatcttcattgcaaaagcactggctcatccgccctacttcccatcccacacaaacccaattgtaaataacatatgacttctgagtacttttgggggcacaactgttttctgtttgctgtttttttgttttgttttttttctccagagcactttggtctagactaggctttgggtggttccaattggtggagagaagctctgaggcacgtcatgcaggtcaagaaagctttctttgcagtagcaccagttaaggtgaatatgtattgtatcacaaaacaaacccaatatccagatgaatatccgagatgttgaataaacttagccatttcgtacacatggt

SEQ ID NO: 154136 - DNA, 6193 bp, Homo sapiens
  Payload ID: 10289
  Gene Symbol: MCM3AP
  Gene Name: minichromosome maintenance complex component 3 associated protein
  Uniprot ID: O60318
  ENST ID: ENST00000291688
  CDS Start-End: 109-6051
cttgttctaaagacgaaggggaactccctagtgctacaggctgtttcaggaagccaattaattttgtacacataatacttaattaccttctaataattggagcagaagatgaacccaactaatcctttcagtgggcagcagcctagtgctttttcggcgtcttctagtaatgtaggaacacttccatctaagccgccatttcgatttggtcaaccttctctttttggacaaaacagtaccttatctgggaagagctcgggattttcacaggtatccagctttccagcgtcttctggagtaagtcattcctcttcagtgcaaacattagggttcacccaaacctcaagtgttggacccttttctggacttgagcacacttccacctttgtggctacctctgggccttcaagttcatctgtgctgggaaacacaggatttagttttaaatcacccaccagtgttggggctttcccaagcacttctgcttttggacaagaagctggagaaatagtgaactctggttttgggaaaacagaattcagctttaaacctctggaaaatgcagtgttcaaaccaatactgggggctgaatctgagccagagaaaacccagagccaaattgcttctgggttttttacattttcccacccaattagtagtgcacctggaggcctggcccctttctcttttcctcaagtaacaagtagttcagctaccacttcaaattttaccttttcaaaacctgttagtagtaataattcattatctgcctttacccctgctttgtcaaaccaaaatgtagaggaagagaagagaggacctaagtcaatatttggaagttctaataatagcttcagtagcttccctgtatcatctgcggttttgggcgaacctttccaggctagcaaagcaggtgtcaggcaggggtgtgaagaagctgtttcccaggtggaaccacttcccagcctaatgaaaggactgaaaaggaaggaggaccaggatcgctccccaaggagacatggccacgagccagcagaagattcggatcctctgtcccggggcgatcatcctccagacaaacgacctgtccgcctgaatcgaccccggggaggtactttatttggtcggacgatacaggatgttttcaaaagcaataaggaagtaggtcgtctgggcaacaaggaggccaaaaaggaaactggctttgttgagtctgcagaaagtgaccacatggctatcccaggagggaatcagtctgtcctggcaccttcccggattccaggtgtgaataaagaggaagaaactgaaagtagagagaagaaagaagattctctaagaggaactccggcgcgtcagagtaacagaagcgagagcacagacagtcttgggggcttgtctccctctgaagtcacagccatccagtgcaagaacatccctgactacctcaacgacaggaccattctggagaaccattttggcaaaattgctaaagtgcagcgcatctttaccaggcgcagcaaaaagcttgcagtggtacatttctttgatcatgcatctgcagccctggctagaaagaaggggaaaagtttgcataaagacatggctatcttttggcacaggaagaaaataagccccaataagaaacccttttccctgaaggagaagaaaccaggtgacggtgaagtcagcccgagcacagaggatgcaccctttcagcactctcctcttggcaaggccgcagggaggactggtgctagcagcctcctgaataaaagctctccagtgaagaagccaagtcttctaaaggcccaccaattcgagggagactcttttgactcagcctccgagggctccgagggcctcgggccatgtgtgctctccctcagtaccctgataggcactgtggctgagacatccaaggagaagtaccgcctgcttgaccagagagacaggatcatgcggcaagctcgggtgaagagaaccgatctggacaaagcgaggacttttgttggcacctgcctggatatgtgtcctgagaaggagaggtacatgcgggagacccgtagccagctgagcgtgttcgaagtggtcccagggactgaccaggtggaccacgcagcagctgtgaaagagtacagtcggtcctcggcggatcaggaggagcccctgccccacgagctgcggcccttgccagtgctcagcaggaccatggactacctggtgacccagatcatggaccagaaggagggcagcctgcgggattggtatgacttcgtgtggaaccgcacgcgtggcatacggaaggatatcacgcagcagcacctctgtgaccccctgacggtgtccctgattgagaagtgcacccggtttcacatccactgtgcccacttcatgtgtgaggagcccatgtcctcctttgatgccaagatcaataatgagaacatgaccaagtgcctgcagagcctgaaggagatgtaccaggacctgagaaacaagggtgtcttctgtgccagcgaagcggagttccagggctacaatgttctgctcagtctcaacaagggagacatcctaagagaagtacaacagttccatcctgctgttagaaactcatctgaggtgaaatttgctgttcaggcttttgctgcattgaacagtaataattttgtgagatttttcaaactggtccagtcagcttcttacctgaacgcttgtcttttacactgttacttcagtcagatccgcaaggatgctctccgggcgctcaactttgcgtacacggtgagcacacagcgatctaccatctttcccctggatggtgtggtgcgcatgctgctgttcagagactgtgaagaggccaccgacttcctcacctgccacggcctcaccgtttccgacggctgtgtggagctgaaccggtctgcattcctggaaccagagggattatccaagaccaggaagtcggtgtttattactaggaagctgacggtgtcagtcggggaaattgtgaacggagggccattgccccccgtccctcgtcatacccctgtgtgcagcttcaactcccagaacaagtacatcggggagagcctggccgcggagctgcccgtcagcacccagagacccggctccgacacagtgggcggagggagaggagaggagtgtggtgtagagccggatgcacccctgtccagtctcccacagtctctaccagcccctgcgccctcaccagtgcctctgcctcctgtcctggcactgaccccgtctgtggcgcccagcctcttccagctgtctgtgcagcctgaaccaccgcctccagagcccgtgcccatgtactctgacgaggacctggcgcaggtggtggacgagctcatccaggaggccctgcagagggactgtgaggaagttggctctgcgggtgctgcctacgcagctgccgccctgggtgtttctaatgctgctatggaggatttgttaacagctgcaaccacgggcattttgaggcacattgcagctgaagaagtgtctaaggaaagagagcgaagggagcaggagaggcagcgggctgaagaggaaaggttgaaacaagagagagagctggtgttaagtgagctgagccagggcctggccgtggagctgatggaacgcgtgatgatggagtttgtgagggaaacctgctcccaggagttgaagaatgcagtagagacagaccagagggtccgtgtggcccgttgctgtgaggatgtctgtgcccacttagtggacttgtttctcgtggaggaaatcttccagactgcaaaggagaccctccaggagcttcagtgcttctgcaagtatctacagcggtggagggaagctgtcacagcccgcaagaaactgaggcgccaaatgcgggctttccctgctgcgccctgctgcgtggacgtgagcgaccggctgagggcgctggcgcccagcgcagagtgccccattgctgaagagaacctggccaggggcctcctggacctgggccatgcagggagattgggcatctcctgcaccaggttaaggcggctcagaaacaagacagctcaccagatgaaggttcagcacttctaccagcagctgctgagtgatgtggcatgggcgtctctggacctgccatccctcgtggctgagcacctccctgggaggcaggagcatgtgttttggaagctggtgctggtgttgccggatgtagaggagcagtccccagagagttgtggcagaattctagcaaattggttaaaagtcaagttcatgggagatgaaggctcagtggatgacacatccagcgatgctggtgggattcagacgctttcgcttttcaactcacttagcagcaaaggggatcagatgatttctgttaacgtgtgtataaaggtggcccatggcgccctcagtgatggtgccattgatgctgtggagacacagaaggacctcctgggagccagtgggctcatgctgctgcttccccccaaaatgaagagtgaggacatggcagaggaggacgtgtactggctgtcggccttgctgcagctcaagcagctcctgcaggctaagcccttccagcctgcgcttcctctggtggttcttgtgcctagcccaggaggggacgccgttgagaaggaagtagaagatggtctgatgctacaggacttggtttcagctaagctgatttcagattacactgttaccgagatccctgataccattaatgatctacaaggttcaactaaggttttgcaagcagtgcagtggctggtttcccactgcccccattcccttgacctctgctgccagactctcattcagtacgtcgaagacgggattggccatgagtttagtggccgctttttccatgacagaagagagaggcgtctgggcggtcttgcttctcaggagcctggcgccatcattgagctgtttaacagtgtgctgcagttcctggcttctgtggtgtcctctgaacagctgtgtgacctgtcctggcctgtcactgagtttgctgaggcagggggcagccggctgcttcctcacctgcactggaatgccccagagcacctggcctggctgaagcaggctgtgctcgggttccagcttccgcagatggaccttccacccctgggggccccctggctccccgtgtgctccatggttgtccagtacgcctcccagatccccagctcacgccagacacagcctgtcctccagtcccaggtggagaacctgctccacagaacctactgtaggtggaagagcaagagtccctccccagtccatggggcaggcccctcggtcatggagatcccatgggatgatcttatcgccttgtgtatcaaccacaagctgagagactggacgcccccccggcttcctgttacatcagaggcgctgagtgaagatggtcagatatgtgtgtatttttttaaaaacgatttgaaaaaatatgatgttcctttgtcgtgggaacaagccaggttgcagacgcagaaggagctacagctgagagagggacgtttggcaataaagccttttcatccttctgcaaacaattttcccataccattgcttcacatgcaccgtaactggaagaggagcacagagtgtgctcaagaggggaggattcccagcacagaggatctgatgcgaggagcttctgctgaggagctcttggcgcagtgtttgtcgagcagtctgctgctggagaaagaagagaacaagaggtttgaagatcagcttcagcaatggttgtctgaagactcaggagcatttacggatttaacttcccttcccctctatcttcctcagactctagtgtctctttctcacactattgaacctgtgatgaaaacatctgtaactactagcccacagagtgacatgatgagggagcaactgcagctgtcagaggcgacaggaacgtgtctaggcgaacgactaaagcacctggaaaggctgatccggagttcaagggaagaggaagttgcctctgagctccatctctctgcgctgctagacatggtggacatttgagcagcctgacctgtggggagggggtctctcccgaagagtttctgtttttactcaaaataatgttattctcagatgcttgatgcactgttggaaatgtgattaatttaatcatgcagataaaccatttaaatgtcagtctccc

SEQ ID NO: 154137 - DNA, 6333 bp, Homo sapiens
  Payload ID: 10289
  Gene Symbol: MCM3AP
  Gene Name: minichromosome maintenance complex component 3 associated protein
  Uniprot ID: O60318
  ENST ID: ENST00000397708
  CDS Start-End: 256-6198
agtgctgagcgaaccggaagtcggtccgcggcgttttctgcccgcggtgcgcagcgctgagtgtcgcggcagcagcctgtgcttgcgcctcaagtctttccgaggggccagtgggcagcgcgggcctcggggtcctggggcgagacgcttgttctaaagacgaaggggaactccctagtgctacaggctgtttcaggaagccaattaattttgtacacataatacttaattaccttctaataattggagcagaagatgaacccaactaatcctttcagtgggcagcagcctagtgctttttcggcgtcttctagtaatgtaggaacacttccatctaagccgccatttcgatttggtcaaccttctctttttggacaaaacagtaccttatctgggaagagctcgggattttcacaggtatccagctttccagcgtcttctggagtaagtcattcctcttcagtgcaaacattagggttcacccaaacctcaagtgttggacccttttctggacttgagcacacttccacctttgtggctacctctgggccttcaagttcatctgtgctgggaaacacaggatttagttttaaatcacccaccagtgttggggctttcccaagcacttctgcttttggacaagaagctggagaaatagtgaactctggttttgggaaaacagaattcagctttaaacctctggaaaatgcagtgttcaaaccaatactgggggctgaatctgagccagagaaaacccagagccaaattgcttctgggttttttacattttcccacccaattagtagtgcacctggaggcctggcccctttctcttttcctcaagtaacaagtagttcagctaccacttcaaattttaccttttcaaaacctgttagtagtaataattcattatctgcctttacccctgctttgtcaaaccaaaatgtagaggaagagaagagaggacctaagtcaatatttggaagttctaataatagcttcagtagcttccctgtatcatctgcggttttgggcgaacctttccaggctagcaaagcaggtgtcaggcaggggtgtgaagaagctgtttcccaggtggaaccacttcccagcctaatgaaaggactgaaaaggaaggaggaccaggatcgctccccaaggagacatggccacgagccagcagaagattcggatcctctgtcccggggcgatcatcctccagacaaacgacctgtccgcctgaatcgaccccggggaggtactttatttggtcggacgatacaggatgttttcaaaagcaataaggaagtaggtcgtctgggcaacaaggaggccaaaaaggaaactggctttgttgagtctgcagaaagtgaccacatggctatcccaggagggaatcagtctgtcctggcaccttcccggattccaggtgtgaataaagaggaagaaactgaaagtagagagaagaaagaagattctctaagaggaactccggcgcgtcagagtaacagaagcgagagcacagacagtcttgggggcttgtctccctctgaagtcacagccatccagtgcaagaacatccctgactacctcaacgacaggaccattctggagaaccattttggcaaaattgctaaagtgcagcgcatctttaccaggcgcagcaaaaagcttgcagtggtacatttctttgatcatgcatctgcagccctggctagaaagaaggggaaaagtttgcataaagacatggctatcttttggcacaggaagaaaataagccccaataagaaacccttttccctgaaggagaagaaaccaggtgacggtgaagtcagcccgagcacagaggatgcaccctttcagcactctcctcttggcaaggccgcagggaggactggtgctagcagcctcctgaataaaagctctccagtgaagaagccaagtcttctaaaggcccaccaattcgagggagactcttttgactcagcctccgagggctccgagggcctcgggccatgtgtgctctccctcagtaccctgataggcactgtggctgagacatccaaggagaagtaccgcctgcttgaccagagagacaggatcatgcggcaagctcgggtgaagagaaccgatctggacaaagcgaggacttttgttggcacctgcctggatatgtgtcctgagaaggagaggtacatgcgggagacccgtagccagctgagcgtgttcgaagtggtcccagggactgaccaggtggaccacgcagcagctgtgaaagagtacagtcggtcctcggcggatcaggaggagcccctgccccacgagctgcggcccttgccagtgctcagcaggaccatggactacctggtgacccagatcatggaccagaaggagggcagcctgcgggattggtatgacttcgtgtggaaccgcacgcgtggcatacggaaggatatcacgcagcagcacctctgtgaccccctgacggtgtccctgattgagaagtgcacccggtttcacatccactgtgcccacttcatgtgtgaggagcccatgtcctcctttgatgccaagatcaataatgagaacatgaccaagtgcctgcagagcctgaaggagatgtaccaggacctgagaaacaagggtgtcttctgtgccagcgaagcggagttccagggctacaatgttctgctcagtctcaacaagggagacatcctaagagaagtacaacagttccatcctgctgttagaaactcatctgaggtgaaatttgctgttcaggcttttgctgcattgaacagtaataattttgtgagatttttcaaactggtccagtcagcttcttacctgaacgcttgtcttttacactgttacttcagtcagatccgcaaggatgctctccgggcgctcaactttgcgtacacggtgagcacacagcgatctaccatctttcccctggatggtgtggtgcgcatgctgctgttcagagactgtgaagaggccaccgacttcctcacctgccacggcctcaccgtttccgacggctgtgtggagctgaaccggtctgcattcctggaaccagagggattatccaagaccaggaagtcggtgtttattactaggaagctgacggtgtcagtcggggaaattgtgaacggagggccattgccccccgtccctcgtcatacccctgtgtgcagcttcaactcccagaacaagtacatcggggagagcctggccgcggagctgcccgtcagcacccagagacccggctccgacacagtgggcggagggagaggagaggagtgtggtgtagagccggatgcacccctgtccagtctcccacagtctctaccagcccctgcgccctcaccagtgcctctgcctcctgtcctggcactgaccccgtctgtggcgcccagcctcttccagctgtctgtgcagcctgaaccaccgcctccagagcccgtgcccatgtactctgacgaggacctggcgcaggtggtggacgagctcatccaggaggccctgcagagggactgtgaggaagttggctctgcgggtgctgcctacgcagctgccgccctgggtgtttctaatgctgctatggaggatttgttaacagctgcaaccacgggcattttgaggcacattgcagctgaagaagtgtctaaggaaagagagcgaagggagcaggagaggcagcgggctgaagaggaaaggttgaaacaagagagagagctggtgttaagtgagctgagccagggcctggccgtggagctgatggaacgcgtgatgatggagtttgtgagggaaacctgctcccaggagttgaagaatgcagtagagacagaccagagggtccgtgtggcccgttgctgtgaggatgtctgtgcccacttagtggacttgtttctcgtggaggaaatcttccagactgcaaaggagaccctccaggagcttcagtgcttctgcaagtatctacagcggtggagggaagctgtcacagcccgcaagaaactgaggcgccaaatgcgggctttccctgctgcgccctgctgcgtggacgtgagcgaccggctgagggcgctggcgcccagcgcagagtgccccattgctgaagagaacctggccaggggcctcctggacctgggccatgcagggagattgggcatctcctgcaccaggttaaggcggctcagaaacaagacagctcaccagatgaaggttcagcacttctaccagcagctgctgagtgatgtggcatgggcgtctctggacctgccatccctcgtggctgagcacctccctgggaggcaggagcatgtgttttggaagctggtgctggtgttgccggatgtagaggagcagtccccagagagttgtggcagaattctagcaaattggttaaaagtcaagttcatgggagatgaaggctcagtggatgacacatccagcgatgctggtgggattcagacgctttcgcttttcaactcacttagcagcaaaggggatcagatgatttctgttaacgtgtgtataaaggtggcccatggcgccctcagtgatggtgccattgatgctgtggagacacagaaggacctcctgggagccagtgggctcatgctgctgcttccccccaaaatgaagagtgaggacatggcagaggaggacgtgtactggctgtcggccttgctgcagctcaagcagctcctgcaggctaagcccttccagcctgcgcttcctctggtggttcttgtgcctagcccaggaggggacgccgttgagaaggaagtagaagatggtctgatgctacaggacttggtttcagctaagctgatttcagattacactgttaccgagatccctgataccattaatgatctacaaggttcaactaaggttttgcaagcagtgcagtggctggtttcccactgcccccattcccttgacctctgctgccagactctcattcagtacgtcgaagacgggattggccatgagtttagtggccgctttttccatgacagaagagagaggcgtctgggcggtcttgcttctcaggagcctggcgccatcattgagctgtttaacagtgtgctgcagttcctggcttctgtggtgtcctctgaacagctgtgtgacctgtcctggcctgtcactgagtttgctgaggcagggggcagccggctgcttcctcacctgcactggaatgccccagagcacctggcctggctgaagcaggctgtgctcgggttccagcttccgcagatggaccttccacccctgggggccccctggctccccgtgtgctccatggttgtccagtacgcctcccagatccccagctcacgccagacacagcctgtcctccagtcccaggtggagaacctgctccacagaacctactgtaggtggaagagcaagagtccctccccagtccatggggcaggcccctcggtcatggagatcccatgggatgatcttatcgccttgtgtatcaaccacaagctgagagactggacgcccccccggcttcctgttacatcagaggcgctgagtgaagatggtcagatatgtgtgtatttttttaaaaacgatttgaaaaaatatgatgttcctttgtcgtgggaacaagccaggttgcagacgcagaaggagctacagctgagagagggacgtttggcaataaagccttttcatccttctgcaaacaattttcccataccattgcttcacatgcaccgtaactggaagaggagcacagagtgtgctcaagaggggaggattcccagcacagaggatctgatgcgaggagcttctgctgaggagctcttggcgcagtgtttgtcgagcagtctgctgctggagaaagaagagaacaagaggtttgaagatcagcttcagcaatggttgtctgaagactcaggagcatttacggatttaacttcccttcccctctatcttcctcagactctagtgtctctttctcacactattgaacctgtgatgaaaacatctgtaactactagcccacagagtgacatgatgagggagcaactgcagctgtcagaggcgacaggaacgtgtctaggcgaacgactaaagcacctggaaaggctgatccggagttcaagggaagaggaagttgcctctgagctccatctctctgcgctgctagacatggtggacatttgagcagcctgacctgtggggagggggtctctcccgaagagtttctgtttttactcaaaataatgttattctcagatgcttgatgcactgttggaaatgtgattaatttaatcatgcagataaaccatttaaatgtca

SEQ ID NO: 154138 - DNA, 876 bp, Homo sapiens
  Payload ID: 10289
  Gene Symbol: MCM3AP
  Gene Name: minichromosome maintenance complex component 3 associated protein
  ENST ID: ENST00000426537
  CDS Start-End: 595-876
ggcagcgcgggcctcggggtcctggggcgagacggtgagcgtgggggctgggccggcgccaggggcgccgtttccttcccccacgcagctccgcgcgcccgggcctccacatcgtcgctaacggagcgttgcggcgccggcgacccctggcgagcccggggcgggacagtggccaggccggcctgggcccagcgcgtggcctccgccgtttcgggctgtgctgggtggaagattaggctccccgggcacgccgtccccgccgagaggcctcagcttcgtggcagcgccctcgtccttccagcccgctcgagggtggccgccagggcgcgatgaaggaatgtgagaaagtgcttagcgctccagccgctccgagggaagccaggtgggaggagatcccgaaacgctaaggttttgacagcgttacagtgaattctccggctgtagagattggaggaagtcgggagaaattcgtctctaagttgtaagcttgttctaaagacgaaggggaactccctagtgctacaggctgtttcaggaagccaattaattttgtacacataatacttaattaccttctaataattggagcagaagatgaacccaactaatcctttcagtgggcagcagcctagtgctttttcggcgtcttctagtaatgtaggaacacttccatctaagccgccatttcgatttggtcaaccttctctttttggacaaaacagtaccttatctgggaagagctcgggattttcacaggtatccagctttccagcgtcttctggagtaagtcattcctcttcagtgcaaacattagggttcacccaaacctcaagtgttggacccttttctggacttgagcacacttccacctttgtg

SEQ ID NO: 154139 - DNA, 4183 bp, Homo sapiens
  Payload ID: 10290
  Gene Symbol: MCM4
  Gene Name: minichromosome maintenance complex component 4
  Uniprot ID: P33991
  ENST ID: ENST00000262105
  CDS Start-End: 210-2801
gtctcgcggtttgggagcgctactcgccaggtggactcggagtccgcgagcgtcgtcggcaagcggccgcctttccacggtaaccgcgcgccggcggggagggcgtggcgcggagccgacgggaacgtccgcgctgcggagcagggcagggaagccgggaggcgggcccggcccgagcttgtccttgtcgcgcaggtactccgagcactatgtcgtccccggcgtcgaccccgagccgccgcggcagccggcgtggaagggccacccccgcccagacgcctcggagtgaggatgccaggtcatctccctctcagagacgtagaggcgaggattccacctccacgggggagttgcagccgatgccaacctcgcctggagtggacctgcagagccctgctgcgcaggacgtgctgttttccagccctccccaaatgcattcttcagctatccctcttgactttgatgttagttcaccactgacatacggcactcccagctctcgggtagagggaaccccaagaagtggtgttaggggcacacctgtgagacagaggcctgacctgggctctgcacagaagggcctgcaagtggatctgcagtctgacggggcagcagcagaagatatagtggcaagtgagcagtctctaggccaaaaacttgtgatctggggaacagatgtaaatgtggcagcatgcaaagaaaactttcagagatttcttcagcgttttattgaccctctggctaaagaagaagaaaatgttggcatagatattactgaacctctatacatgcaacgacttggggagattaatgttattggtgagccatttttaaatgtgaactgtgaacacatcaaatcatttgacaaaaatttgtacagacaactcatctcttacccacaggaagttattccaacttttgacatggctgtcaatgaaatcttctttgaccgttaccctgactcaatcttagaacatcagattcaagtaagaccattcaacgcattgaagactaagaatatgagaaacctgaatccagaagacattgaccagctcatcaccatcagcggcatggtgatcaggacatcccagctgattcccgagatgcaggaggccttcttccagtgccaagtgtgtgcccacacgacccgggtggagatggaccgcggccgcattgcagagcccagtgtgtgcgggcgctgccacaccacccacagcatggcactcatccacaaccgctccctcttctctgacaagcagatgatcaagcttcaggagtctccggaagacatgcctgcagggcagacaccacacacagttatcctgtttgctcacaatgatctcgttgacaaggtccagcctggggacagagtgaatgttacaggcatctatcgagctgtgcctattcgagtcaatccaagagtgagtaatgtgaagtctgtctacaaaacccacattgatgtcattcattatcggaaaacggatgcaaaacgtctgcatggccttgatgaagaagcagaacagaaacttttttcagagaaacgtgtggaattgcttaaggaactttccaggaaaccagacatttatgagaggcttgcttcagccttggctccaagcatttatgaacatgaagatataaagaagggaattttgcttcagctctttggcgggacaaggaaggattttagtcacactggaaggggcaaatttcgggctgagatcaacatcttgctgtgtggcgaccctggtaccagcaagtcccagctgctgcagtacgtgtacaacctcgtccccaggggccagtacacgtctgggaagggctccagtgcagttggcctcactgcgtacgtaatgaaagaccctgagacaaggcagctggtcctgcagacaggtgctcttgtcctgagtgacaacggcatctgctgtatcgatgagttcgacaagatgaatgaaagtacaagatcggtattgcatgaagtcatggaacagcagactctgtccattgcaaaggctgggatcatctgtcagctcaatgcgcgcacctctgtcctggcagcagcaaatcccattgagtctcagtggaatcctaaaaaaacaaccattgaaaacatccagctgcctcatactttattatcaaggtttgatttgatcttcctcttgctggaccctcaggacgaagcctatgacaggcgtctggctcaccacctggtcgcactgtactaccagagcgaggagcaggcagaggaggagctcctggacatggcggtgctaaaggactacattgcctacgcgcacagcaccatcatgccgcggctaagtgaggaagccagccaggctctcatcgaggcttatgtagacatgaggaagattggcagtagccggggaatggtttctgcataccctcgacagctagagtcattaatccgcttagcagaagcccatgctaaagtaagattgtctaacaaagttgaagccattgatgtggaagaggccaaacgcctccatcgggaagctctgaagcagtctgcaactgatccccggactggcatcgtggacatatctattcttactacggggatgagtgccacctctcgtaaacggaaagaagaattagctgaagcattgaaaaagcttattttatctaagggcaaaacaccagctctaaaataccagcaactttttgaagatattcggggacaatctgacatagcaattactaaagatatgtttgaagaagcactgcgtgccctggcagatgatgatttcctgacagtgactgggaagaccgtgcgcttgctctgaagccttgtgagcaaggaaggctccctgcatgtcctgcttgctgcacgccacatgggtgtggtctgcatctcagttggccgccatcagtgtaaatagagcttaaagtcatggtttggctgcataaaaattttctaacttgggttcaatatttgtagtgaagtatctgttttcatttttttcacgttataaataaaaatactatgctggccgggcgcggtggctcacacctgtaatcccagcactttgggaggccaatgtgggtggatcatgaggtcaggagttcaagaccagcctagccaagatggtgaaaccccgtctctagtaaagataacaaaaaattagctgggcttgatggcatgcgcctgtaatcccagctactcgggaggttgaggcaggagaatcgcttaaacccaggcggcagaggttgcagtgagccaagatcgcgccactgcactccagcctcagcaatagagtgagactgtctcaaaaaaaaaaaaaaaaaaaaaacctgccaattttcaaacataccgtagagattattttcaggtgccattttatagtatagcagcagggcttttactctgtgtatgcacagatgcagtctggggcatggtttgtgtgctggactttctcatggccatcatcagtatgcttatggatttgatgacaggcatagcctgggcatatcacctcattggtaaagggctagagcctttcttttttatggcacttctttttttgagatagggtcttactctgtcaccctggctagagtacactggtacaatcacggctcaatgtaggcttaacctcctgggctcaggtgtatgtcactatgcccggctactttttgtattttttggtagagacggcttcgccacgttgcccaggctgcaagcgatatgcctaggctcaagcgatctgcccacctcaacttccggaagtgctgagattacaggtgtgagccactgcacccagcctttgttttattttttattttttgagaggtatgattctttctagagattttttctcatggctactattagatcaggaatgggtgattggagattattagattctaggttaacttctaccactttaccctaatacataaaactttttcctaaataaatgatggaaggaataatacttggttacctggcattatttttcagtaagaaaaaagctttactaaccactacatttatggaaatttgtaggggtaagtattttataggtcataaaaaacaccataatataacgaatctcattttctttaaatgtgaattaaatcctaacagtcatctttataaaatgaccataggctaaaatcttacgtgtaagtactactacaataaataatttctgaaacctttaaa

SEQ ID NO: 154140 - DNA, 547 bp, Homo sapiens
  Payload ID: 10290
  Gene Symbol: MCM4
  Gene Name: minichromosome maintenance complex component 4
  ENST ID: ENST00000524086
  CDS Start-End: 72-317
ctcgccaggtggactcggagtccgcgagcgtcgtcggcaagcggccgcctttccacggtactccgagcactatgtcgtccccggcgtcgaccccgagccgccgcggcagccggcgtggaagggccacccccgcccagacgcctcggagtgaggatgccaggtcatctccctctcagagacgtagaggcgaggattccacctccacgggggagttgcagccgatgccaacctcgcctggagtggacctgcagagccctgctgcgcaggacgtgctgttttccagccctccccaaatgcattcttcagttcaccactgacatacggcactcccagctctcgggtagagggaaccccaagaagtggtgttaggggcacacctgtgagacagaggcctgacctgggctctgcacagaagggcctgcaagtggatctgcagtctgacggggcagcagcagaagatatagtggcaagtgagcagtctctaggccaaaaacttgtgatctggggaacagatgtaaatgtggcagcatgcaaagaaaactttcag

SEQ ID NO: 154141 - DNA, 839 bp, Homo sapiens
  Payload ID: 10290
  Gene Symbol: MCM4
  Gene Name: minichromosome maintenance complex component 4
  ENST ID: ENST00000520637
  CDS Start-End: 4-839
gacatggctgtcaatgaaatcttctttgaccgttaccctgactcaatcttagaacatcagattcaagtaagaccattcaacgcattgaagactaagaatatgagaaacctgaatccagaagacattgaccagctcatcaccatcagcggcatggtgatcaggacatcccagctgattcccgagatgcaggaggccttcttccagtgccaaatcaagcttcaggagtctccggaagacatgcctgcagggcagacaccacacacagttatcctgtttgctcacaatgatctcgttgacaaggtccagcctggggacagagtgaatgttacaggcatctatcgagctgtgcctattcgagtcaatccaagagtgagtaatgtgaagtctgtctacaaaacccacattgatgtcattcattatcggaaaacggatgcaaaacgtctgcatggccttgatgaagaagcagaacagaaacttttttcagagaaacgtgtggaattgcttaaggaactttccaggaaaccagacatttatgagaggcttgcttcagccttggctccaagcatttatgaacatgaagatataaagaagggaattttgcttcagctctttggcgggacaaggaaggattttagtcacactggaaggggcaaatttcgggctgagatcaacatcttgctgtgtggcgaccctggtaccagcaagtcccagctgctgcagtacgtgtacaacctcgtccccaggggccagtacacgtctgggaagggctccagtgcagttggcctcactgcgtacgtaatgaaagaccctgagacaaggcagctggtcctgcagacagg

SEQ ID NO: 154142 - DNA, 734 bp, Homo sapiens
  Payload ID: 10290
  Gene Symbol: MCM4
  Gene Name: minichromosome maintenance complex component 4
  ENST ID: ENST00000519170
  CDS Start-End: 100-734
ctgttttgtgtgacacaagctcggagtgaggatgccaggtcatctccctctcagagacgtagaggcgaggattccacctccacgggggagttgcagccgatgccaacctcgcctggagtggacctgcagagccctgctgcgcaggacgtgctgttttccagccctccccaaatgcattcttcagctatccctcttgactttgatgttagttcaccactgacatacggcactcccagctctcgggtagagggaaccccaagaagtggtgttaggggcacacctgtgagacagaggcctgacctgggctctgcacagaagggcctgcaagtggatctgcagtctgacggggcagcagcagaagatatagtggcaagtgagcagtctctaggccaaaaacttgtgatctggggaacagatgtaaatgtggcagcatgcaaagaaaactttcagagatttcttcagcgttttattgaccctctggctaaagaagaagaaaatgttggcatagatattactgaacctctatacatgcaacgacttggggagattaatgttattggtgagccatttttaaatgtgaactgtgaacacatcaaatcatttgacaaaaatttgtacagacaactcatctcttacccacaggaagttattccaacttttgacatggctgtcaatgaaatcttctttgaccgttaccctgactcaatcttagaacatcagattcaagtaagacc

SEQ ID NO: 154143 - DNA, 4105 bp, Homo sapiens
  Payload ID: 10290
  Gene Symbol: MCM4
  Gene Name: minichromosome maintenance complex component 4
  Uniprot ID: P33991
  ENST ID: ENST00000523944
  CDS Start-End: 132-2723
aggggcggagacgaccttgccgccggcgggaactctgggtctcgcggtttgggagcgctactcgccaggtggactcggagtccgcgagcgtcgtcggcaagcggccgcctttccacggtactccgagcactatgtcgtccccggcgtcgaccccgagccgccgcggcagccggcgtggaagggccacccccgcccagacgcctcggagtgaggatgccaggtcatctccctctcagagacgtagaggcgaggattccacctccacgggggagttgcagccgatgccaacctcgcctggagtggacctgcagagccctgctgcgcaggacgtgctgttttccagccctccccaaatgcattcttcagctatccctcttgactttgatgttagttcaccactgacatacggcactcccagctctcgggtagagggaaccccaagaagtggtgttaggggcacacctgtgagacagaggcctgacctgggctctgcacagaagggcctgcaagtggatctgcagtctgacggggcagcagcagaagatatagtggcaagtgagcagtctctaggccaaaaacttgtgatctggggaacagatgtaaatgtggcagcatgcaaagaaaactttcagagatttcttcagcgttttattgaccctctggctaaagaagaagaaaatgttggcatagatattactgaacctctatacatgcaacgacttggggagattaatgttattggtgagccatttttaaatgtgaactgtgaacacatcaaatcatttgacaaaaatttgtacagacaactcatctcttacccacaggaagttattccaacttttgacatggctgtcaatgaaatcttctttgaccgttaccctgactcaatcttagaacatcagattcaagtaagaccattcaacgcattgaagactaagaatatgagaaacctgaatccagaagacattgaccagctcatcaccatcagcggcatggtgatcaggacatcccagctgattcccgagatgcaggaggccttcttccagtgccaagtgtgtgcccacacgacccgggtggagatggaccgcggccgcattgcagagcccagtgtgtgcgggcgctgccacaccacccacagcatggcactcatccacaaccgctccctcttctctgacaagcagatgatcaagcttcaggagtctccggaagacatgcctgcagggcagacaccacacacagttatcctgtttgctcacaatgatctcgttgacaaggtccagcctggggacagagtgaatgttacaggcatctatcgagctgtgcctattcgagtcaatccaagagtgagtaatgtgaagtctgtctacaaaacccacattgatgtcattcattatcggaaaacggatgcaaaacgtctgcatggccttgatgaagaagcagaacagaaacttttttcagagaaacgtgtggaattgcttaaggaactttccaggaaaccagacatttatgagaggcttgcttcagccttggctccaagcatttatgaacatgaagatataaagaagggaattttgcttcagctctttggcgggacaaggaaggattttagtcacactggaaggggcaaatttcgggctgagatcaacatcttgctgtgtggcgaccctggtaccagcaagtcccagctgctgcagtacgtgtacaacctcgtccccaggggccagtacacgtctgggaagggctccagtgcagttggcctcactgcgtacgtaatgaaagaccctgagacaaggcagctggtcctgcagacaggtgctcttgtcctgagtgacaacggcatctgctgtatcgatgagttcgacaagatgaatgaaagtacaagatcggtattgcatgaagtcatggaacagcagactctgtccattgcaaaggctgggatcatctgtcagctcaatgcgcgcacctctgtcctggcagcagcaaatcccattgagtctcagtggaatcctaaaaaaacaaccattgaaaacatccagctgcctcatactttattatcaaggtttgatttgatcttcctcttgctggaccctcaggacgaagcctatgacaggcgtctggctcaccacctggtcgcactgtactaccagagcgaggagcaggcagaggaggagctcctggacatggcggtgctaaaggactacattgcctacgcgcacagcaccatcatgccgcggctaagtgaggaagccagccaggctctcatcgaggcttatgtagacatgaggaagattggcagtagccggggaatggtttctgcataccctcgacagctagagtcattaatccgcttagcagaagcccatgctaaagtaagattgtctaacaaagttgaagccattgatgtggaagaggccaaacgcctccatcgggaagctctgaagcagtctgcaactgatccccggactggcatcgtggacatatctattcttactacggggatgagtgccacctctcgtaaacggaaagaagaattagctgaagcattgaaaaagcttattttatctaagggcaaaacaccagctctaaaataccagcaactttttgaagatattcggggacaatctgacatagcaattactaaagatatgtttgaagaagcactgcgtgccctggcagatgatgatttcctgacagtgactgggaagaccgtgcgcttgctctgaagccttgtgagcaaggaaggctccctgcatgtcctgcttgctgcacgccacatgggtgtggtctgcatctcagttggccgccatcagtgtaaatagagcttaaagtcatggtttggctgcataaaaattttctaacttgggttcaatatttgtagtgaagtatctgttttcatttttttcacgttataaataaaaatactatgctggccgggcgcggtggctcacacctgtaatcccagcactttgggaggccaatgtgggtggatcatgaggtcaggagttcaagaccagcctagccaagatggtgaaaccccgtctctagtaaagataacaaaaaattagctgggcttgatggcatgcgcctgtaatcccagctactcgggaggttgaggcaggagaatcgcttaaacccaggcggcagaggttgcagtgagccaagatcgcgccactgcactccagcctcagcaatagagtgagactgtctcaaaaaaaaaaaaaaaaaaaaaacctgccaattttcaaacataccgtagagattattttcaggtgccattttatagtatagcagcagggcttttactctgtgtatgcacagatgcagtctggggcatggtttgtgtgctggactttctcatggccatcatcagtatgcttatggatttgatgacaggcatagcctgggcatatcacctcattggtaaagggctagagcctttcttttttatggcacttctttttttgagatagggtcttactctgtcaccctggctagagtacactggtacaatcacggctcaatgtaggcttaacctcctgggctcaggtgtatgtcactatgcccggctactttttgtattttttggtagagacggcttcgccacgttgcccaggctgcaagcgatatgcctaggctcaagcgatctgcccacctcaacttccggaagtgctgagattacaggtgtgagccactgcacccagcctttgttttattttttattttttgagaggtatgattctttctagagattttttctcatggctactattagatcaggaatgggtgattggagattattagattctaggttaacttctaccactttaccctaatacataaaactttttcctaaataaatgatggaaggaataatacttggttacctggcattatttttcagtaagaaaaaagctttactaaccactacatttatggaaatttgtaggggtaagtattttataggtcataaaaaacaccataatataacgaatctcattttctttaaatgtgaattaaatcctaacagtcatctttataaaatgaccataggctaaaatcttacgtgtaagtactactacaataaataatttctgaaacctttaaa

SEQ ID NO: 154144 - DNA, 572 bp, Homo sapiens
  Payload ID: 10290
  Gene Symbol: MCM4
  Gene Name: minichromosome maintenance complex component 4
  ENST ID: ENST00000518221
  CDS Start-End: 151-572
acgcgcggaggcggggctgcggggcgcggcggcaggaactttcccggggacccctgcgggaaggcctggccagtaagcgcgcctctttggcccgaatcaacatggaaacctaaggaaaaacgtctgacctgcggaggtactccgagcactatgtcgtccccggcgtcgaccccgagccgccgcggcagccggcgtggaagggccacccccgcccagacgcctcggagtgaggatgccaggtcatctccctctcagagacgtagaggcgaggattccacctccacgggggagttgcagccgatgccaacctcgcctggagtggacctgcagagccctgctgcgcaggacgtgctgttttccagccctccccaaatgcattcttcagctatccctcttgactttgatgttagttcaccactgacatacggcactcccagctctcgggtagagggaaccccaagaagtggtgttaggggcacacctgtgagacagaggcctgacctgggctctgcacagaagggcctgcaagtggatctgcagtctgacggggcagcagcagaagatatagtggc

SEQ ID NO: 154145 - DNA, 366 bp, Homo sapiens
  Payload ID: 10290
  Gene Symbol: MCM4
  Gene Name: minichromosome maintenance complex component 4
  ENST ID: ENST00000518382
  CDS Start-End: 1-83
ttgaaaacatccagctgcctcatactttattatcaagattggcagtagccggggaatggtttctgcataccctcgacagctagagtcattaatccgcttagcagaagcccatgctaaagtaagattgtctaacaaagttgaagccattgatgtggaagaggccaaacgcctccatcgggaagctctgaagcagtctgcaactgatccccggactggcatcgtggacatatctattcttactacggggatgagtgccacctctcgtaaacggaaagaagaattagctgaagcattgaaaaagcttattttatctaagggcaaaacaccagctctaaaataccagcaactttttgaagatattcgggg

SEQ ID NO: 154146 - DNA, 3534 bp, Homo sapiens
  Payload ID: 10291
  Gene Symbol: MCM5
  Gene Name: minichromosome maintenance complex component 5
  Uniprot ID: P33992
  ENST ID: ENST00000216122
  CDS Start-End: 155-2359
aatcgctggccgcgaggctccggcgaaccaatgggagcgcagcggctgcggcgtccgaacaccgcctcttgtttttcccgcgaaactcggcggctgagcgtggaggttcttgtctcccctggtttgtgaagtgcggaaaaccagaggcgcagtcatgtcgggattcgacgatcctggcattttctacagcgacagcttcgggggcgacgcccaggccgacgaggggcaggcccgcaaatcgcagctgcagaggcgcttcaaggagttcctgcggcagtaccgagtgggcaccgaccgcacgggcttcaccttcaaatacagggatgaactcaagcggcattacaacctgggggagtactggattgaggtggagatggaggatctggccagctttgatgaggacctggccgactacttgtacaagcagccagccgagcacctgcagctgctggaggaagctgccaaggaggtagctgatgaggtgacccggccccggccttctggggaggaggtgctccaggacatccaggtcatgctcaagtcggacgccagcccttccagcattcgtagcctgaagtcggacatgatgtcacacctggtgaagatccctggcatcatcatcgcggcctctgcggtccgtgccaaggccacccgcatctctatccagtgccgcagctgccgcaacaccctcaccaacattgccatgcgccctggcctcgagggctatgccctgcccaggaagtgcaacacagatcaggctgggcgccccaaatgcccattggacccgtacttcatcatgcccgacaaatgcaaatgcgtggacttccagaccctgaagctgcaggagctgcctgatgcagtcccccacggggagatgcccagacacatgcagctctactgcgacaggtacctgtgtgacaaggtcgtccctgggaacagggttaccatcatgggcatctactccatcaagaagtttggcctgactaccagcaggggccgtgacagggtgggcgtgggcatccgaagctcctacatccgtgtcctgggcatccaggtggacacagatggctctggccgcagctttgctggggccgtgagcccccaggaggaggaggagttccgtcgcctggctgccctcccaaatgtctatgaggtcatctccaagagcatcgccccctccatctttgggggcacagacatgaagaaggccattgcctgcctgctctttgggggctcccgaaagaggctccctgatggacttactcgccgaggagacatcaacctgctgatgctaggggaccctgggacagccaagtcccagcttctgaagtttgtggagaagtgttctcccattggggtatacacgtctgggaaaggcagcagcgcagctggactgacagcctcggtgatgagggacccttcgtcccggaatttcatcatggagggcggagccatggtcctggccgatggtggggtcgtctgtattgacgagtttgacaagatgcgagaagatgaccgtgtggcaatccacgaagccatggagcagcagaccatctctatcgccaaggctgggatcaccaccaccctgaactcccgctgctccgtcctggctgctgccaactcagtgttcggccgctgggatgagacgaagggggaggacaacattgacttcatgcccaccatcttgtcgcgcttcgacatgatcttcatcgtcaaggatgagcacaatgaggagagggatgtgatgctggccaagcatgtcatcactctgcacgtgagcgcactgacacagacacaggctgtggagggcgagattgacctggccaagctgaagaagtttattgcctactgccgagtgaagtgtggcccccggctgtcagcagaggctgcagagaaactgaagaaccgctacatcatcatgcggagcggggcccgtcagcacgagagggacagtgaccgccgctccagcatccccatcactgtgcggcagctggaggccattgtgcgcatcgcggaagccctcagcaagatgaagctgcagcccttcgccacagaggcagatgtggaggaggccctgcggctcttccaagtgtccacgttggatgctgccttgtccggtaccctgtcaggggtggagggcttcaccagccaggaggaccaggagatgctgagccgcatcgagaagcagctcaagcgccgctttgccattggctcccaggtgtctgagcacagcatcatcaaggacttcaccaagcagaaatacccggagcacgccatccacaaggtgctgcagctcatgctgcggcgcggcgagatccagcatcgcatgcagcgcaaggttctctaccgcctcaagtgagtcgcgccgcctcactggactcatggactcgcccacgcctcgcccctcctgccgctgcctgccattgacaatgttgctgggacctctgcctccccactgcagccctcgaacttcccaggcaccctcctttctgccccagaggaaggagctgtagtgtcctgctgcctctgggcgcccgcctctagcgcggttctgggaagtgtgcttttggcatccgttaataataaagccacggtgtgttcaggtatctgtgggtttgtgcactcggtgacctgtcacctccatcgtgccctcatggcagggtaagtgtgagggaacagggtctggaggcagactggccagggtttctgacttggatctgccactcagacttctgggtaagtcacgtgacttgagtgctccggtttcttcatctgtttagcggggctcataaagccactcccttgatgctgggaatccagtgagaccagggagtggggaagcgcttctcaaagtgtgtgattttgatccgcctcacctgttccccagtaacttattggggggctgcgagccgtggtgcggcggtcagactgcctggattcatggaccctctccatgccttagtttccttatctgtaagcaggctgatactagaacctgcttcacagggttgtgcttagggtcagtgagcagctgttagtgaggggaatgtagtggccaccaggcaggaactaggactccagccagttctttcctggtgggccacgtgtaactgtgtggccttgggcgagacatttcacttttctgtgcctgagtttatcagtaaactggagatggggggattcctcaccctgagttgtgaggattgaatgacagaaggcactagtgacagtgatgctggaggaaggagtgttgccaagtgcctcggtcactttgcctaatttcagaaagtcactctgagttggtatgttttgtgtttttaaaaaagctaggattcataaaattaaatagaaatcagtgaaataaaatatttgatatttaaaatacatttagaaatacaaagtgtcaagcaaaacgtgaatttggaaatctatggaacattagataaggtatttaaaagtaattgccatgtaaaaatgacacgaacttgaagtaagattatttgatttttctaaaaatacaagaaagcttggtgc

SEQ ID NO: 154147 - DNA, 2402 bp, Homo sapiens
  Payload ID: 10291
  Gene Symbol: MCM5
  Gene Name: minichromosome maintenance complex component 5
  ENST ID: ENST00000382011
  CDS Start-End: 81-2156
ttcccgcgaaactcggcggctgagcgtggaggttcttgtctcccctggtttgtgaagtgcggaaaaccagaggcgcagtcatgtcgggattcgacgatcctggcattttctacagcgacagcttcgggggcgacgcccaggccgacgaggggcaggcccgcaaatcgcagctgcagaggcgcttcaaggagttcctgcggcagtaccgagtgggcaccgaccgcacgggcttcaccttcaaatacagggatgaactcaagcggcattacaacctgggggagtactggattgaggtggagatggaggatctggccagctttgatgaggacctggccgactacttgtacaagcagccagccgagcacctgcagctgtcggacatgatgtcacacctggtgaagatccctggcatcatcatcgcggcctctgcggtccgtgccaaggccacccgcatctctatccagtgccgcagctgccgcaacaccctcaccaacattgccatgcgccctggcctcgagggctatgccctgcccaggaagtgcaacacagatcaggctgggcgccccaaatgcccattggacccgtacttcatcatgcccgacaaatgcaaatgcgtggacttccagaccctgaagctgcaggagctgcctgatgcagtcccccacggggagatgcccagacacatgcagctctactgcgacaggtacctgtgtgacaaggtcgtccctgggaacagggttaccatcatgggcatctactccatcaagaagtttggcctgactaccagcaggggccgtgacagggtgggcgtgggcatccgaagctcctacatccgtgtcctgggcatccaggtggacacagatggctctggccgcagctttgctggggccgtgagcccccaggaggaggaggagttccgtcgcctggctgccctcccaaatgtctatgaggtcatctccaagagcatcgccccctccatctttgggggcacagacatgaagaaggccattgcctgcctgctctttgggggctcccgaaagaggctccctgatggacttactcgccgaggagacatcaacctgctgatgctaggggaccctgggacagccaagtcccagcttctgaagtttgtggagaagtgttctcccattggggtatacacgtctgggaaaggcagcagcgcagctggactgacagcctcggtgatgagggacccttcgtcccggaatttcatcatggagggcggagccatggtcctggccgatggtggggtcgtctgtattgacgagtttgacaagatgcgagaagatgaccgtgtggcaatccacgaagccatggagcagcagaccatctctatcgccaaggctgggatcaccaccaccctgaactcccgctgctccgtcctggctgctgccaactcagtgttcggccgctgggatgagacgaagggggaggacaacattgacttcatgcccaccatcttgtcgcgcttcgacatgatcttcatcgtcaaggatgagcacaatgaggagagggatgtgatgctggccaagcatgtcatcactctgcacgtgagcgcactgacacagacacaggctgtggagggcgagattgacctggccaagctgaagaagtttattgcctactgccgagtgaagtgtggcccccggctgtcagcagaggctgcagagaaactgaagaaccgctacatcatcatgcggagcggggcccgtcagcacgagagggacagtgaccgccgctccagcatccccatcactgtgcggcagctggaggccattgtgcgcatcgcggaagccctcagcaagatgaagctgcagcccttcgccacagaggcagatgtggaggaggccctgcggctcttccaagtgtccacgttggatgctgccttgtccggtaccctgtcaggggtggagggcttcaccagccaggaggaccaggagatgctgagccgcatcgagaagcagctcaagcgccgctttgccattggctcccaggtgtctgagcacagcatcatcaaggacttcaccaagcagaaatacccggagcacgccatccacaaggtgctgcagctcatgctgcggcgcggcgagatccagcatcgcatgcagcgcaaggttctctaccgcctcaagtgagtcgcgccgcctcactggactcatggactcgcccacgcctcgcccctcctgccgctgcctgccattgacaatgttgctgggacctctgcctccccactgcagccctcgaacttcccaggcaccctcctttctgccccagaggaaggagctgtagtgtcctgctgcctctgggcgcccgcctctagcgcggttctgggaagtgtgcttttggcatccgttaataataaagccacggtgtgttcaggt

SEQ ID NO: 154148 - DNA, 739 bp, Homo sapiens
  Payload ID: 10291
  Gene Symbol: MCM5
  Gene Name: minichromosome maintenance complex component 5
  ENST ID: ENST00000416905
  CDS Start-End: 48-739
tcttgtctcccctggtttgtgaagtgcggaaaaccagaggcgcagtcatgtcgggattcgacgatcctggcattttctacagcgacagcttcgggggcgacgcccaggccgacgaggggcaggcccgcaaatcgcagctgcagaggcgcttcaaggagttcctgcggcagtaccgagtgggcaccgaccgcacgggcttcaccttcaaatacagtcttgcaccttcattgattgagcacctgctgcctgccagatactgttctgggtgctgggctgcagcactgaagctggacctggctcctgcttctagggatgaactcaagcggcattacaacctgggggagtactggattgaggtggagatggaggatctggccagctttgatgaggacctggccgactacttgtacaagcagccagccgagcacctgcagctgctggaggaagctgccaaggaggtagctgatgaggtgacccggccccggccttctggggaggaggtgctccaggacatccaggtcatgctcaagtcggacgccagcccttccagcattcgtagcctgaagtcggacatgatgtcacacctggtgaagatccctggcatcatcatcgcggcctctgcggtccgtgccaaggccacccgcatctctatccagtgccgcagctgccgcaacaccctcaccaacattgccatgcgccctggcctcgagggctatgccctgcccaggaagtgcaacac

SEQ ID NO: 154149 - DNA, 551 bp, Homo sapiens
  Payload ID: 10291
  Gene Symbol: MCM5
  Gene Name: minichromosome maintenance complex component 5
  ENST ID: ENST00000444778
  CDS Start-End: 100-551
gcgcagtcatgtcgggattcgacgatcctggcattttctacagcgacagcttcgggggcgacgcccagcccttccagcattcgtagcctgaagtcggacatgatgtcacacctggtgaagatccctggcatcatcatcgcggcctctgcggtccgtgccaaggccacccgcatctctatccagtgccgcagctgccgcaacaccctcaccaacattgccatgcgccctggcctcgagggctatgccctgcccaggaagtgcaacacagatcaggctgggcgccccaaatgcccattggacccgtacttcatcatgcccgacaaatgcaaatgcgtggacttccagaccctgaagctgcaggagctgcctgatgcagtcccccacggggagatgcccagacacatgcagctctactgcgacaggtacctgtgtgacaaggtcgtccctgggaacagggttaccatcatgggcatctactccatcaagaagtttggcctgactaccagcaggggccgtgacagggtgggcgtgggcatccgaagctcctacat

SEQ ID NO: 154150 - DNA, 450 bp, Homo sapiens
  Payload ID: 10291
  Gene Symbol: MCM5
  Gene Name: minichromosome maintenance complex component 5
  ENST ID: ENST00000451351
  CDS Start-End: 84-257
tttttcccgcgaaactcggcggctgagcgtggaggttcttgtctcccctggtttgtgaagtgcggaaaaccagaggcgcagtcatgtcgggattcgacgatcctggcattttctacagcgacagcttcgggggcgacgcccaggccgacgaggggcaggcccgcaaatcgcagctgcagaggcgcttcaaggagttcctgcggcagtaccgagtgggcaccgaccgcacgggcttcaccttcaaatacagcagctgatattgcccacctgtgtgccaggcactgcgctacaaagatgaaaagacgtgcttcttgtcctagagaagctcctaagtcagaggagtgagtcgtgaagaccaacagataacttccacggtggtcatttcctccacagaggaagggatgaactcaagcggcattacaacctgggggagtactggattgaggtgga

SEQ ID NO: 154151 - DNA, 3736 bp, Homo sapiens
  Payload ID: 10292
  Gene Symbol: MCM6
  Gene Name: minichromosome maintenance complex component 6
  Uniprot ID: Q14566
  ENST ID: ENST00000264156
  CDS Start-End: 62-2527
ggaaaaaagcgacttgtggcggtcgagcgtggcgcaggcgaatcctcggcactaagcaaatatggacctcgcggcggcagcggagccgggcgccggcagccagcacctggaggtccgcgacgaggtggccgagaagtgccagaaactgttcctggacttcttggaggagtttcagagcagcgatggagaaattaaatacttgcaattagcagaggaactgattcgtcctgagagaaacacattggttgtgagttttgtggacctggaacaatttaaccagcaactttccaccaccattcaagaggagttctatagagtttacccttacctgtgtcgggccttgaaaacattcgtcaaagaccgtaaagagatccctcttgccaaggatttttatgttgcattccaagacctgcctaccagacacaagattcgagagctcacctcatccagaattggtttgctcactcgcatcagtgggcaggtggtgcggactcacccagttcacccagagcttgtgagcggaacttttctgtgcttggactgtcagacagtgatcagggatgtagaacagcagttcaaatacacacagccaaacatctgccgaaatccagtttgtgccaacaggaggagattcttactggatacaaataaatcaagatttgttgattttcaaaaggttcgtattcaagagacccaagctgagcttcctcgagggagtatcccccgcagtttagaagtaattttaagggctgaagctgtggaatcagctcaagctggtgacaagtgtgactttacagggacactgattgttgtgcctgacgtctccaagcttagcacaccaggagcacgtgcagaaactaattcccgtgtcagtggtgttgatggatatgagacagaaggcattcgaggactccgggcccttggtgttagggacctttcttataggctggtctttcttgcctgctgtgttgcgccaaccaacccaaggtttggggggaaagagctcagagatgaggaacagacagctgagagcattaagaaccaaatgactgtgaaagaatgggagaaagtgtttgagatgagtcaagataaaaatctataccacaatctttgtaccagcctgttccctactatacatggcaatgatgaagtaaaacggggtgtcctgctgatgctctttggtggcgttccaaagacaacaggagaagggacctctcttcgaggggacataaatgtttgcattgttggtgacccaagtacagctaagagccaatttctcaagcacgtggaggagttcagccccagagctgtctacaccagtggtaaagcgtccagtgctgctggcttaacagcagctgttgtgagagatgaagaatctcatgagtttgtcattgaggctggagctttgatgttggctgataatggtgtgtgttgtattgatgaatttgataagatggacgtgcgggatcaagttgctattcatgaagctatggaacagcagaccatatccatcactaaagcaggagtgaaggctactctgaacgcccggacgtccattttggcagcagcaaacccaatcagtggacactatgacagatcaaaatcattgaaacagaatataaatttgtcagctcccatcatgtcccgattcgatctcttctttatccttgtggatgaatgtaatgaggttacagattatgccattgccaggcgcatagtagatttgcattcaagaattgaggaatcaattgatcgtgtctattccctcgatgatatcagaagatatcttctctttgcaagacagtttaaacccaagatttccaaagagtcagaggacttcattgtggagcaatataaacatctccgccagagagatggttctggagtgaccaagtcttcatggaggattacagtgcgacagcttgagagcatgattcgtctctctgaagctatggctcggatgcactgctgtgatgaggtccaacctaaacatgtgaaggaagctttccggttactgaataaatcaatcatccgtgtggaaacacctgatgtcaatctagatcaagaggaagagatccagatggaggtagatgagggtgctggtggcatcaatggtcatgctgacagccctgctcctgtgaacgggatcaatggctacaatgaagacataaatcaagagtctgctcccaaagcctccttaaggctgggcttctctgagtactgccgaatctctaaccttattgtgcttcacctcagaaaggtggaagaagaagaggacgagtcagcattaaagaggagcgagcttgttaactggtacttgaaggaaatcgaatcagagatagactctgaagaagaacttataaataaaaaaagaatcatagagaaagttattcatcgactcacacactatgatcatgttctaattgagctcacccaggctggattgaaaggctccacagagggaagtgagagctatgaagaagatccctacttggtagttaaccctaactacttgctcgaagattgagatagtgaaagtaactgaccagagctgaggaactgtggcacagcacctcgtggcctggagcctggctggagctctgctagggacagaagtgtttctggaagtgatgcttccaggatttgttttcagaaacaagaattgagttgatggtcctatgtgtcacattcatcacaggtttcataccaacacaggcttcagcacttcctttggtgtgtttcctgtcccagtgaagttggaaccaaataatgtgtagtctctataaccaatacctttgttttcatgtgtaagaaaaggcccattacttttaaggtatgtgctgtcctattgagcaaataactttttttcaattgccagctactgcttttattcatcaaaataaaataacttgttctgaagttgtctattggatttctttctactgtaccctgattattacttccatctacttctgaatgtgagactttccctttttgcttaacctggagtgaagaggtagaactgtggtattatggatgaggtttctatgagaaggagtcattagagaactcatatgaaagctagaggccttagagatgactttccaaggttaattccagttgtttttttttttttttaagtttataaaagtttattatacttttttaaaattactctttagtaatttattttacttctgtgtcctaagggtaatttctcaggattgttttcaaattgcttttttaggggaaataggtcatttgctatattacaagcaatccccaaattttatggtcttccaggaaaagttattaccgtttatgatactaacagttcctgagacttagctatgatcagtatgttcatgaggtggagcagttcctgtgttgcagcttttaacaacagatggcattcattaaatcacaaagtatgttaaaggtcacaaaagcaaaataactgtctgaggctaaggcccacgtgggacagtctaatacccatgagtactcaacttgccttgatgtctgagctttccagtgcaatgtgaatttgagcagccagaaatctattagtagaaagcaagacagattaatataggttaaaacaatgatttaaatatgtttctcccaataattatctctttccctggaatcaacttgtatgaaaccttgtcaaaatgtactccacaagtatgtacaattaagtattttaaaaataaatggcaaacattaaaaacaa

SEQ ID NO: 154152 - DNA, 2957 bp, Homo sapiens
  Payload ID: 10293
  Gene Symbol: MCM7
  Gene Name: minichromosome maintenance complex component 7
  Uniprot ID: P33993
  ENST ID: ENST00000303887
  CDS Start-End: 647-2806
agtcccgtcagcttccggtagaagagctcggccacatcccggccgccactgtccccgcggactggcgggtggaaggactcagtgaaggatcctgcgacacaggctggccctgggcgcccctcccgcccggcccctccgccccttcccagccccaagggtctaggatacagtctttgtagatgagcgggtcccccttggaggacagaatgaagaattgggaaatcatggccgttctggagagtagacaagaagacggcgaaagtcgggcctgccccgccctgcggccccggaacaaaagaacgcgtgtgcgctggccctttaagagcgattctcctccgcccgcgccagctcggaccgcgggaaacccggcgcctgcactaccccgcccggagattcccttccgacgcccgcaccgcctccccgtcactcattctaggcccgcacggtgattggcttgcggctagcgggaggtgaagaaggccgccttgtccgattggcccgcacgcagtggcgccggtcacgtggggggcgacgtttcgcgccaatttcggttggccggccacagtccaccgcgcggagattctcagcttccccaggagcaagacctctgagcccgccaagcgcggccgcacggccctcggcagcgatggcactgaaggactacgcgctagagaaggaaaaggttaagaagttcttacaagagttctaccaggatgatgaactcgggaagaagcagttcaagtatgggaaccagttggttcggctggctcatcgggaacaggtggctctgtatgtggacctggacgacgtagccgaggatgaccccgagttggtggactcaatttgtgagaatgccaggcgctacgcgaagctctttgctgatgccgtacaagagctgctgcctcagtacaaggagagggaagtggtaaataaagatgtcctggacgtttacattgagcatcggctaatgatggagcagcggagtcgggaccctgggatggtccgaagcccccagaaccagtaccctgctgaactcatgcgcagatttgagctgtattttcaaggccctagcagcaacaagcctcgtgtgatccgggaagtgcgggctgactctgtggggaagttggtaactgtgcgtggaatcgtcactcgtgtctctgaagtcaaacccaagatggtggtggccacttacacttgtgaccagtgtggggcagagacctaccagccgatccagtctcccactttcatgcctctgatcatgtgcccaagccaggagtgccaaaccaaccgctcaggagggcggctgtatctgcagacacggggctccagattcatcaaattccaggagatgaagatgcaagaacatagtgatcaggtgcctgtgggaaatatccctcgtagtatcacggtgctggtagaaggagagaacacaaggattgcccagcctggagaccacgtcagcgtcactggtattttcttgccaatcctgcgcactgggttccgacaggtggtacagggtttactctcagaaacctacctggaagcccatcggattgtgaagatgaacaagagtgaggatgatgagtctggggctggagagctcaccagggaggagctgaggcaaattgcagaggaggatttctacgaaaagctggcagcttcaatcgccccagaaatatacgggcatgaagatgtgaagaaggcactgctgctcctgctagtcgggggtgtggaccagtctcctcgaggcatgaaaatccggggcaacatcaacatctgtctgatgggggatcctggtgtggccaagtctcagctcctgtcatacattgatcgactggcgcctcgcagccagtacacaacaggccggggctcctcaggagtggggcttacggcagctgtgctgagagactccgtgagtggagaactgaccttagagggtggggccctggtgctggctgaccagggtgtgtgctgcattgatgagttcgacaagatggctgaggccgaccgcacagccatccacgaggtcatggagcagcagaccatctccattgccaaggccggcattctcaccacactcaatgcccgctgctccatcctggctgccgccaaccctgcctacgggcgctacaaccctcgccgcagcctggagcagaacatacagctacctgctgcactgctctcccggtttgacctcctctggctgattcaggaccggcccgaccgagacaatgacctacggttggcccagcacatcacctatgtgcaccagcacagccggcagcccccctcccagtttgaacctctggacatgaagctcatgaggcgttacatagccatgtgccgcgagaagcagcccatggtgccagagtctctggctgactacatcacagcagcatacgtggagatgaggcgagaggcttgggctagtaaggatgccacctatacttctgcccggaccctgctggctatcctgcgcctttccactgctctggcacgtctgagaatggtggatgtggtggagaaagaagatgtgaatgaagccatcaggctaatggagatgtcaaaggactctcttctaggagacaaggggcagacagctaggactcagagaccagcagatgtgatatttgccaccgtccgtgaactggtctcagggggccgaagtgtccggttctctgaggcagagcagcgctgtgtatctcgtggcttcacacccgcccagttccaggcggctctggatgaatatgaggagctcaatgtctggcaggtcaatgcttcccggacacggatcacttttgtctgattccagcctgcttgcaaccctggggtcctcttgttccctgctggcctgccccttgggaaggggcagtgatgcctttgaggggaaggaggagcccctctttctcccatgctgcacttactccttttgctaataaaagtgtttgtagattgtc

SEQ ID NO: 154153 - DNA, 1968 bp, Homo sapiens
  Payload ID: 10293
  Gene Symbol: MCM7
  Gene Name: minichromosome maintenance complex component 7
  Uniprot ID: P33993
  ENST ID: ENST00000343023
  CDS Start-End: 647-1816
agtcccgtcagcttccggtagaagagctcggccacatcccggccgccactgtccccgcggactggcgggtggaaggactcagtgaaggatcctgcgacacaggctggccctgggcgcccctcccgcccggcccctccgccccttcccagccccaagggtctaggatacagtctttgtagatgagcgggtcccccttggaggacagaatgaagaattgggaaatcatggccgttctggagagtagacaagaagacggcgaaagtcgggcctgccccgccctgcggccccggaacaaaagaacgcgtgtgcgctggccctttaagagcgattctcctccgcccgcgccagctcggaccgcgggaaacccggcgcctgcactaccccgcccggagattcccttccgacgcccgcaccgcctccccgtcactcattctaggcccgcacggtgattggcttgcggctagcgggaggtgaagaaggccgccttgtccgattggcccgcacgcagtggcgccggtcacgtggggggcgacgtttcgcgccaatttcggttggccggccacagtccaccgcgcggagattctcagcttccccaggagcaagacctctgagcccgccaagcgcggccgcacggccctcggcagcgatggcactgaaggactacgcgctagagaaggaaaaggttaagaagttcttacaagagttctaccaggatgatgaactcgggaagaagcagttcaagtatgggaaccagttggttcggctggctcatcgggaacaggtggctctgtatgtggacctggacgacgtagccgaggatgaccccgagttggtggactcaatttgtgagaatgccaggcgctacgcgaagctctttgctgatgccgtacaagagctgctgcctcagtacaaggagagggaagtggtaaataaagatgtcctggacgtttacattgagcatcggctaatgatggagcagcggagtcgggaccctgggatggtccgaagcccccagaaccagtaccctgctgaactcatgcgcagatttgagctgtattttcaaggccctagcagcaacaagcctcgtgtgatccgggaagtgcgggctgactctgtggggaagttggtaactgtgcgtggaatcgtcactcgtgtctctgaagtcaaacccaagatggtggtggccacttacacttgtgaccagtgtggggcagagacctaccagccgatccagtctcccactttcatgcctctgatcatgtgcccaagccaggagtgccaaaccaaccgctcaggagggcggctgtatctgcagacacggggctccagattcatcaaattccaggagatgaagatgcaagaacatagtgatcaggtgcctgtgggaaatatccctcgtagtatcacggtgctggtagaaggagagaacacaaggattgcccagcctggagaccacgtcagcgtcactggtattttcttgccaatcctgcgcactgggttccgacaggtggtacagggtttactctcagaaacctacctggaagcccatcggattgtgaagatgaacaagagtgaggatgatgagtctggggctggagagctcaccagggaggagctgaggcaaattgcagatgtgatatttgccaccgtccgtgaactggtctcagggggccgaagtgtccggttctctgaggcagagcagcgctgtgtatctcgtggcttcacacccgcccagttccaggcggctctggatgaatatgaggagctcaatgtctggcaggtcaatgcttcccggacacggatcacttttgtctgattccagcctgcttgcaaccctggggtcctcttgttccctgctggcctgccccttgggaaggggcagtgatgcctttgaggggaaggaggagcccctctttctcccatgctgcacttactccttttgctaataaaagtgtttgtagattgtca

SEQ ID NO: 154154 - DNA, 2975 bp, Homo sapiens
  Payload ID: 10293
  Gene Symbol: MCM7
  Gene Name: minichromosome maintenance complex component 7
  Uniprot ID: P33993
  ENST ID: ENST00000354230
  CDS Start-End: 1141-2772
agtggcgcgaggaggctggagggagtgtcgtgtaaacagtgtccttccgcgcggcggccgcggagagagctgcggcccgggggggcgtgcctgggatccggagcttcgctcgggcccgggaaaggcggcagtgggctgggatcgcggtgtctctgggtgtgatggccaatggctggactggctcccgccctgggcggaggaatcccgagctgtgaagcggctggaatccgggcccatgtgcttctttgtttactaagagcggaagcgatggcgggagcgggggtggggtgcggtggcggggtgcggtggcggaggtcccggtgaaatcaggggctaaggggacccaaagaaggcgggggatcataggggtggaaagaaagctgagaaccttgagaccggagtgtgaggggccaacggggaagggcgctagaattttaaactaaagtagggaccggaattcccctggggagatgttggatggccctgtgcactgccacgggctctttattcttcgctggttagaaacagacttgtgaaaaagagttatgcccactttggggagacttcgaaaaggttaagaagttcttacaagagttctaccaggatgatgaactcgggaagaagcagttcaagtatgggaaccagttggttcggctggctcatcgggaacaggtggctctgtatgtggacctggacgacgtagccgaggatgaccccgagttggtggactcaatttgtgagaatgccaggcgctacgcgaagctctttgctgatgccgtacaagagctgctgcctcagtacaaggagagggaagtggtaaataaagatgtcctggacgtttacattgagcatcggctaatgatggagcagcggagtcgggaccctgggatggtccgaagcccccagaaccagtaccctgctgaactcatgcgcagattgtgagtggtctctgtcgggaaagatgtagggattggttctccaggatcttgtttgtgactgttttctccccttagtgagctgtattttcaaggccctagcagcaacaagcctcgtgtgatccgggaagtgcgggctgactctgtggggaagttggtaactgtgcgtggaatcgtcactcgtgtctctgaagtcaaacccaagatggtggtggccacttacacttgtgaccagtgtggggcagagacctaccagccgatccagtctcccactttcatgcctctgatcatgtgcccaagccaggagtgccaaaccaaccgctcaggagggcggctgtatctgcagacacggggctccagattcatcaaattccaggagatgaagatgcaagaacatagtgatcaggtgcctgtgggaaatatccctcgtagtatcacggtgctggtagaaggagagaacacaaggattgcccagcctggagaccacgtcagcgtcactggtattttcttgccaatcctgcgcactgggttccgacaggtggtacagggtttactctcagaaacctacctggaagcccatcggattgtgaagatgaacaagagtgaggatgatgagtctggggctggagagctcaccagggaggagctgaggcaaattgcagaggaggatttctacgaaaagctggcagcttcaatcgccccagaaatatacgggcatgaagatgtgaagaaggcactgctgctcctgctagtcgggggtgtggaccagtctcctcgaggcatgaaaatccggggcaacatcaacatctgtctgatgggggatcctggtgtggccaagtctcagctcctgtcatacattgatcgactggcgcctcgcagccagtacacaacaggccggggctcctcaggagtggggcttacggcagctgtgctgagagactccgtgagtggagaactgaccttagagggtggggccctggtgctggctgaccagggtgtgtgctgcattgatgagttcgacaagatggctgaggccgaccgcacagccatccacgaggtcatggagcagcagaccatctccattgccaaggccggcattctcaccacactcaatgcccgctgctccatcctggctgccgccaaccctgcctacgggcgctacaaccctcgccgcagcctggagcagaacatacagctacctgctgcactgctctcccggtttgacctcctctggctgattcaggaccggcccgaccgagacaatgacctacggttggcccagcacatcacctatgtgcaccagcacagccggcagcccccctcccagtttgaacctctggacatgaagctcatgaggcgttacatagccatgtgccgcgagaagcagcccatggtgccagagtctctggctgactacatcacagcagcatacgtggagatgaggcgagaggcttgggctagtaaggatgccacctatacttctgcccggaccctgctggctatcctgcgcctttccactgctctggcacgtctgagaatggtggatgtggtggagaaagaagatgtgaatgaagccatcaggctaatggagatgtcaaaggactctcttctaggagacaaggggcagacagctaggactcagagaccagcagatgtgatatttgccaccgtccgtgaactggtctcagggggccgaagtgtccggttctctgaggcagagcagcgctgtgtatctcgtggcttcacacccgcccagttccaggcggctctggatgaatatgaggagctcaatgtctggcaggtcaatgcttcccggacacggatcacttttgtctgattccagcctgcttgcaaccctggggtcctcttgttccctgctggcctgccccttgggaaggggcagtgatgcctttgaggggaaggaggagcccctctttctcccatgctgcacttactccttttgctaataaaagtgtttgtagattgtcatcttctagcctgggcctgacttccattaaaacagggttttgtgcgtttttt

SEQ ID NO: 154155 - DNA, 1497 bp, Homo sapiens
  Payload ID: 10293
  Gene Symbol: MCM7
  Gene Name: minichromosome maintenance complex component 7
  ENST ID: ENST00000425308
  CDS Start-End: 948-1497
taggccccgggggcgggcaggccggggccgctgcgcgccgggattggccgtttgaggccgccctccgagcggaagtggagccgggcggaagtggcgcgaggaggctggagggagtgtcgtgtaaacagtgtccttccgcgcggcggccgcggagagagctgcggcccgggggggcgtgcctgggatccggagcttcgctcgggcccgggaaaggcggcagtgggctgggatcgcggtgtctctgggtgtgatggccaatggctggactggctcccgccctgggcggaggaatcccgagctgtgaagcggctggaatccgggcccatgtgcttctttgtttactaagagcggaagcgatggcgggagcgggggtggggtgcggtggcggggtgcggtggcggaggtcccggtgaaatcaggggctaaggggacccaaagaaggcgggggatcataggggtggaaagaaagctgagaaccttgagaccggagtgtgaggggccaacggggaagggcgctagaattttaaactaaagtagggaccggaattcccctggggagatgttggatggccctgtgcactgccacgggctctttattcttcgctggttagaaacagacttgtgaaaaagagttatgcccactttggggagacttcgaaaaggttaagaagttcttacaagagttctaccaggatgatgaactcgggaagaagcagttcaagtatgggaaccagttggttcggctggctcatcgggaacaggtggctctgtatgtggacctggacgacgtagccgaggatgaccccgagttggtggactcaatttgtgagaatgccaggcgctacgcgaagctctttgctgatgccgtacaagagctgctgcctcagtacaaggagagggaagtggtaaataaagatgtcctggacgtttacattgagcatcggctaatgatggagcagcggagtcgggaccctgggatggtccgaagcccccagaaccagtaccctgctgaactcatgcgcagatttgagctgtattttcaaggccctagcagcaacaagcctcgtgtgatccgggaagtgcgggctgactctgtggggaagttggtaactgtgcgtggaatcgtcactcgtgtctctgaagtcaaacccaagatggtggtggccacttacacttgtgaccagtgtggggcagagacctaccagccgatccagtctcccactttcatgcctctgatcatgtgcccaagccaggagtgccaaaccaaccgctcaggagggcggctgtatctgcagacacggggctccagattcatcaaattccaggagatgaagatgcaagaacatagtgatcaggtgcctgtgggaaatatccctcgtagtatcacggtgctggtagaaggagagaacacaaggattgcccagcctggagaccacgtcagcgtcactggtattttcttgccaatcctgcgcactgggttccgacaggtggtacagg

SEQ ID NO: 154156 - DNA, 648 bp, Homo sapiens
  Payload ID: 10293
  Gene Symbol: MCM7
  Gene Name: minichromosome maintenance complex component 7
  ENST ID: ENST00000491245
  CDS Start-End: 1-251
gggaacaggtggctctgtatgtggacctggacgacgtagccgaggatgaccccgagttggtggactcaatttgtgagaatgccagaccatctccattgccaaggccggcattctcaccacactcaatgcccgctgctccatcctggctgccgccaaccctgcctacgggcgctacaaccctcgccgcagcctggagcagaacatacagctacctgctgcactgctctcccggtttgacctcctctggctgattcaggaccggcccgaccgagacaatgacctacggttggcccagcacatcacctatgtgcaccagcacagccggcagcccccctcccagtttgaacctctggacatgaagctcatgaggcgttacatagccatgtgccgcgagaagcagcccatggtgccagagtctctggctgactacatcacagcagcatacgtggagatgaggcgagaggcttgggctagtaaggatgccacctatacttctgcccggaccctgctggctatcctgcgcctttccactgctctggcacgtctgagaatggtggatgtggtggagaaagaagatgtgaatgaagccatcaggctaatggagatgtcaaaggactctcttctaggagacaaggggcagacagctag

SEQ ID NO: 154157 - DNA, 3084 bp, Homo sapiens
  Payload ID: 10293
  Gene Symbol: MCM7
  Gene Name: minichromosome maintenance complex component 7
  Uniprot ID: P33993
  ENST ID: ENST00000621318
  CDS Start-End: 1250-2881
agtcccgtcagcttccggtagaagagctcggccacatcccggccgccactgtccccgcggactggcgggtggaaggactcagtgaaggatcctgcgacacaggctggccctgggcgcccctcccgcccggcccctccgccccttcccagccccaagggtctaggatacagtctttgtagatgagcgggtcccccttggaggacagaatgaagaattgggaaatcatggccgttctggagagtagacaagaagacggcgaaagtcgggcctgccccgccctgcggccccggaacaaaagaacgcgtgtgcgctggccctttaagagcgattctcctccgcccgcgccagctcggaccgcgggaaacccggcgcctgcactaccccgcccggagattcccttccgacgcccgcaccgcctccccgtcactcattctaggcccgcacggtgattggcttgcggctagcgggaggtgaagaaggccgccttgtccgattggcccgcacgcagtggcgccggtcacgtggggggcgacgtttcgcgccaatttcggttggccggccacagtccaccgcgcggagattctcagcttccccaggagcaagacctctgagcccgccaagcgcggccgcacggccctcggcagcgatggcactgaaggactacgcgctagagaaggaaaaggttaagaagttcttacaagagttctaccaggatgatgaactcgggaagaagcagttcaagtatgggaaccagttggttcggctggctcatcgggaacaggtggctctgtatgtggacctggacgacgtagccgaggatgaccccgagttggtggactcaatttgtgagaatgccaggcgctacgcgaagctctttgctgatgccgtacaagagctgctgcctcagtacaaggagagggaagtggtaaataaagatgtcctggacgtttacattgagcatcggctaatgatggagcagcggagtcgggaccctgggatggtccgaagcccccagaaccagtaccctgctgaactcatgcgcagattgtgagtggtctctgtcgggaaagatgtagggattggttctccaggatcttgtttgtgactgttttctccccttagtgagctgtattttcaaggccctagcagcaacaagcctcgtgtgatccgggaagtgcgggctgactctgtggggaagttggtaactgtgcgtggaatcgtcactcgtgtctctgaagtcaaacccaagatggtggtggccacttacacttgtgaccagtgtggggcagagacctaccagccgatccagtctcccactttcatgcctctgatcatgtgcccaagccaggagtgccaaaccaaccgctcaggagggcggctgtatctgcagacacggggctccagattcatcaaattccaggagatgaagatgcaagaacatagtgatcaggtgcctgtgggaaatatccctcgtagtatcacggtgctggtagaaggagagaacacaaggattgcccagcctggagaccacgtcagcgtcactggtattttcttgccaatcctgcgcactgggttccgacaggtggtacagggtttactctcagaaacctacctggaagcccatcggattgtgaagatgaacaagagtgaggatgatgagtctggggctggagagctcaccagggaggagctgaggcaaattgcagaggaggatttctacgaaaagctggcagcttcaatcgccccagaaatatacgggcatgaagatgtgaagaaggcactgctgctcctgctagtcgggggtgtggaccagtctcctcgaggcatgaaaatccggggcaacatcaacatctgtctgatgggggatcctggtgtggccaagtctcagctcctgtcatacattgatcgactggcgcctcgcagccagtacacaacaggccggggctcctcaggagtggggcttacggcagctgtgctgagagactccgtgagtggagaactgaccttagagggtggggccctggtgctggctgaccagggtgtgtgctgcattgatgagttcgacaagatggctgaggccgaccgcacagccatccacgaggtcatggagcagcagaccatctccattgccaaggccggcattctcaccacactcaatgcccgctgctccatcctggctgccgccaaccctgcctacgggcgctacaaccctcgccgcagcctggagcagaacatacagctacctgctgcactgctctcccggtttgacctcctctggctgattcaggaccggcccgaccgagacaatgacctacggttggcccagcacatcacctatgtgcaccagcacagccggcagcccccctcccagtttgaacctctggacatgaagctcatgaggcgttacatagccatgtgccgcgagaagcagcccatggtgccagagtctctggctgactacatcacagcagcatacgtggagatgaggcgagaggcttgggctagtaaggatgccacctatacttctgcccggaccctgctggctatcctgcgcctttccactgctctggcacgtctgagaatggtggatgtggtggagaaagaagatgtgaatgaagccatcaggctaatggagatgtcaaaggactctcttctaggagacaaggggcagacagctaggactcagagaccagcagatgtgatatttgccaccgtccgtgaactggtctcagggggccgaagtgtccggttctctgaggcagagcagcgctgtgtatctcgtggcttcacacccgcccagttccaggcggctctggatgaatatgaggagctcaatgtctggcaggtcaatgcttcccggacacggatcacttttgtctgattccagcctgcttgcaaccctggggtcctcttgttccctgctggcctgccccttgggaaggggcagtgatgcctttgaggggaaggaggagcccctctttctcccatgctgcacttactccttttgctaataaaagtgtttgtagattgtcatcttctagcctgggcctgacttccattaaaacagggttttgtgcgtttttt

SEQ ID NO: 154158 - DNA, 2043 bp, Homo sapiens
  Payload ID: 10294
  Gene Symbol: MCMDC2
  Gene Name: minichromosome maintenance domain containing 2
  ENST ID: ENST00000313616
  CDS Start-End: 137-2035
cctaatgccctggatcaggccatccaacttgtaggaatatcccaataggttttcacatcctttctatgagtttcgccatctatagcttttatcaacaattgtggtttaatcaattagaaatattaaccaggagaaaatgtcaaatctaaaaatgaaagaggcggccctcatctatcttgacagaagtggaggcctccaaaagtttatagatgattgcaagtactacaatgattcaaaacaaagctatgctgtctatcgattcaaaattttaataaatccctctgatgttgttgaattagatgctgagcttggaaatcacattttacaccaacctttaaaagctgctgaagtctttcaatcagtctgttttattgctgttaagactctctcattaattggacaattgcagactgaaacgcaaattaatatagtgctgaaattaacacatttacctcccctgccaagttatggtcttgatctttgtgagtttccacttgattatacatctcagagattttatatgatgcaaggaattgtgattgcaatgacaactataaccaagtatacacaaggggcaagatttctttgttcagatgaagcatgccctctttcaaaaggatttcagtatataagagtgcatgtgcctggtgctacagaatctgcaacgataagaaatgactttttgtgtaatctatgtgcatcttcacttcaagaagacagaaaatttagagtacttggtgataaacaaatagttgaaataattgccacaaaggcacttcgtgcttttcaaggatattctaacaaccagccatttaggtttcaatcacttacaattttcctaagagatgaatcagtgaataaaatgaatataggaaatgaatataaaattattggaattccaacctgtgtaaaaacctcacaaactgctgtctgtatagaagcaaatagcataactttttgtaattcaaaagttccttcaggaattagtgacaacttcaggtgtctcctctccttaacttccagctcatgctggaagtttacagcaatacttgccaatatctttgcatcacaaattacccctcctgggacttacaatttgctcaagctctgtttgttgatgagtctagtacagacaactgaccgtaacaaggaactggaagattgcctggatattttaattataacaagtgatactctactcatagacaggcttctgaattttagcataaaccttgtcccccgtggtatacgtcatctagtctctactgaaatttttcccactctatccaggaataagtatggaactggagcagttagcattcaggctggcagtgctttgctagctaaaggtggtatctgctttataggagacttggcttcacacaaaaaagataaacttgaacagcttcaaacagttctggagagcagaagcatcacagtgtacatcccaggaaagaagtttggggaggatattgatcaacagatgacttttccagttcagtgcagtttttggtcttttgttgatgtggattcatcttcaaggagaaatgcacagaaaatcaacactctaattggtcagatggattgcagtttgattccagctaaccttgtggaggcatttggtttattgattaactgcaacgagtcatctccctgccacccatttcttcctactgtgcaacacactttgaacaaagccattaatcctgaagggctgttttatgcggcttctagacagttcacaactgaagattttgaaaagctattggcttttgcaaagaatttgaatgtagaattcagcttggaagcagaaagaatgacccatggctattatctagcaagtcgcagaatcagaacaggctctgtatgtggatcaaagctgtcagcatctgcattaaaatatctcgttttcctatctgaagcccatgcacgactgaacttaaggaacaaagtgcttaaagaagatgtgctgattgcagccttactatttgaaacatccctcacattgaaatatggtaatgaattaaattattaatgatcact

SEQ ID NO: 154159 - DNA, 2373 bp, Homo sapiens
  Payload ID: 10294
  Gene Symbol: MCMDC2
  Gene Name: minichromosome maintenance domain containing 2
  Uniprot ID: Q4G0Z9
  ENST ID: ENST00000396592
  CDS Start-End: 172-1944
gggacgtgcgcgcatgcgcgctaggactccgctccgcctacgctgcaggcggagagcaaccgccaagcttggtgggagtcaaggttttcacatcctttctatgagtttcgccatctatagcttttatcaacaattgtggtttaatcaattagaaatattaaccaggagaaaatgtcaaatctaaaaatgaaagaggcggccctcatctatcttgacagaagtggaggcctccaaaagtttatagatgattgcaagtactacaatgattcaaaacaaagctatgctgtctatcgattcaaaattttaataaatccctctgatgttgttgaattagatgctgagcttggaaatcacattttacaccaacctttaaaagctgctgaagtctttcaatcagtctgttttattgctgttaagactctctcattaattggacaattgcagactgaaacgcaaattaatatagtgctgaaattaacacatttacctcccctgccaagttatggtcttgatctttgtgagtttccacttgattatacatctcagagattttatatgatgcaaggaattgtgattgcaatgacaactataaccaagtatacacaaggggcaagatttctttgttcagatgaagcatgccctctttcaaaaggatttcagtatataagagtgcatgtgcctggtgctacagaatctgcaacgataagaaatgactttttgtgtaatctatgtgcatcttcacttcaagaagacagaaaatttagagtacttggtgataaacaaatagttgaaataattgccacaaaggcacttcgtgcttttcaaggatattctaacaaccagccatttaggtttcaatcacttacaattttcctaagagatgaatcagtgaataaaatgaatataggaaatgaatataaaattattggaattccaacctgtgtaaaaacctcacaaactgctgtctgtatagaagcaaatagcataactttttgtaattcaaaagttccttcaggaattagtgacaacttcaggtgtctcctctccttaacttccagctcatgctggaagtttacagcaatacttgccaatatctttgcatcacaaattacccctcctgggacttacaatttgctcaagctctgtttgttgatgagtctagtacagacaactgaccgtaacaaggaactggaagattgcctggatattttaattataacaagtgatactctactcatagacaggcttctgaattttagcataaaccttgtcccccgtggtatacgtcatctagtctctactgaaatttttcccactctatccaggaataagtatggaactggagcagttagcattcaggctggcagtgctttgctagctaaaggtggtatctgctttataggagacttggcttcacacaaaaaagataaacttgaacagcttcaaacagttctggagagcagaagcatcacagtgtacatcccaggaaagaagtttggggaggatattgatcaacagatgacttttccagttcagtgcagtttttggtcttttgttgatgtggattcatcttcaaggagaaatgcacagaaaatcaacactctaattggtcagatggattgcagtttgattccagctaaccttgtggaggcatttggtttattgattaactgcaacgagtcatctccctgccacccatttcttcctactgtgcaacacactttgaacaaagccattaatcctgaagggctgttttatgcggcttctagacagttcacaactgaagattttgaaaagctattggcttttgcaaagaatttgaatgtagaattcagcttggaagcagaaagaatgacccatggctattatctagcaagtcgcagaatcagaacaggctctgtatgtggatcaaagctgtcagcatctgcattaaaatatctgtaggtattcaattcaagattttaaaatcagcattgagtttcaaatgatatgtttaattaaattgctaatttacctatttcacttgtttctctgcttgattgctagttggttggtttgtaaatggccttgttccaaaaggactaaaggcttcacaattccttttgttatatcatgttacatcattttaatctctaataatttttttactaaactgatttttattggatgccatatgagatatgtctgggaaaagtgcactgatttcaaatgcaaatccttgtttttaaaaatgtggctgttgggcgggcacggtggctcacacctgtaatcccagcactttgggagtccgagagggcagattgcctgaggtcaggagttcaagaccagcctgggcaacacagtaaaaccctgtctctaataaaatacagaaaa

SEQ ID NO: 154160 - DNA, 2372 bp, Homo sapiens
  Payload ID: 10294
  Gene Symbol: MCMDC2
  Gene Name: minichromosome maintenance domain containing 2
  ENST ID: ENST00000415737
  CDS Start-End: 94-285
tctaggttttcacatcctttctatgagtttcgccatctatagcttttatcaacaattgtggtttaatcaattagaaatattaaccaggagaaaatgtcaaatctaaaaatgaaagaggcggccctcatctatcttgacagaagtggaggcctccaaaagtttatagatgattgcaagtactacaatggtacgttcagcaaagatgctgagcttggaaatcacattttacaccaacctttaaaagctgctgaagtctttcaatcagtaagtcaaaaaaagaaataattttatgccacatggaatttttggtaactttttttgtttgaaatcacaggtctgttttattgctgttaagactctctcattaattggacaattgcagactgaaacgcaagatttcagtatataagagtgcatgtgcctggtgctacagaatctgcaacgataagaaatgactttttgtgtaatctatgtgcatcttcacttcaagaagacagaaaatttagagtacttggtgataaacaaatagttgaaataattgccacaaaggcacttcgtgcttttcaaggatattctaacaaccagccatttaggtttcaatcacttacaattttcctaagagatgaatcagtgaataaaatgaatataggaaatgaatataaaattattggaattccaacctgtgtaaaaacctcacaaactgctgtctgtatagaagcaaatagcataactttttgtaattcaaaagttccttcaggaattagtgacaacttcaggtgtctcctctccttaacttccagctcatgctggaagtttacagcaatacttgccaatatctttgcatcacaaattacccctcctgggacttacaatttgctcaagctctgtttgttgatgagtctagtacagacaactgaccgtaacaaggaactggaagattgcctggatattttaattataacaagtgatactctactcatagacaggcttctgaattttagcataaaccttgtcccccgtggtatacgtcatctagtctctactgaaatttttcccactctatccaggaataagtatggaactggagcagttagcattcaggctggcagtgctttgctagctaaaggtggtatctgctttataggagacttggcttcacacaaaaaagataaacttgaacagcttcaaacagttctggagagcagaagcatcacagtgtacatcccaggaaagaagtttggggaggatattgatcaacagatgacttttccagttcagtgcagtttttggtcttttgttgatgtggattcatcttcaaggagaaatgcacagaaaatcaacactctaattggtcagatggattgcagtttgattccagctaaccttgtggaggcatttggtttattgattaactgcaacgagtcatctccctgccacccatttcttcctactgtgcaacacactttgaacaaagccattaatcctgaagggctgttttatgcggcttctagacagttcacaactgaagattttgaaaagctattggcttttgcaaagaatttgaatgtagaattcagcttggaagcagaaagaatgacccatggctattatctagcaagtcgcagaatcagaacaggctctgtatgtggatcaaagctgtcagcatctgcattaaaatatctcgttttcctatctgaagcccatgcacgactgaacttaaggaacaaagtgcttaaagaagatgtgctgattgcagccttactatttgaaacatccctcacattgaaatatggggccactgtattttgtgttgctccgaatgcagtatttccatttgaactgtataatgaagaatacttagagcaaagggatctctatctgactcagtgccaacaacagctggaacaatttattgccacatatggacctgggacaactattttctctagtgatgaataagcaatttgaggaatttttgttcattcctacttaagcagtggagaaaaagtgtgactattttgagagtgactttgaagtaatgctttgataatactctgtacaggaatatattacaatactgtttttaaaaatataaaatatagtcccctcaaaactaattgctaatgggataaatactaatccaaacctctaaaaccaacagaattttaaaacttagaacaatgtggacaatttaaagtgataaagttgtcaaggagaatactataaagaaaaacctggttagcccagaataccagtggtgaacagataaaaatgtaaatgttgcaatttgagcagtgtgtaaaatggcaacctttatgtagttcactctactgtcacaagatggcaataactctttacctacaaattactct

SEQ ID NO: 154161 - DNA, 5096 bp, Homo sapiens
  Payload ID: 10294
  Gene Symbol: MCMDC2
  Gene Name: minichromosome maintenance domain containing 2
  Uniprot ID: Q4G0Z9
  ENST ID: ENST00000422365
  CDS Start-End: 172-2217
gggacgtgcgcgcatgcgcgctaggactccgctccgcctacgctgcaggcggagagcaaccgccaagcttggtgggagtcaaggttttcacatcctttctatgagtttcgccatctatagcttttatcaacaattgtggtttaatcaattagaaatattaaccaggagaaaatgtcaaatctaaaaatgaaagaggcggccctcatctatcttgacagaagtggaggcctccaaaagtttatagatgattgcaagtactacaatgattcaaaacaaagctatgctgtctatcgattcaaaattttaataaatccctctgatgttgttgaattagatgctgagcttggaaatcacattttacaccaacctttaaaagctgctgaagtctttcaatcagtctgttttattgctgttaagactctctcattaattggacaattgcagactgaaacgcaaattaatatagtgctgaaattaacacatttacctcccctgccaagttatggtcttgatctttgtgagtttccacttgattatacatctcagagattttatatgatgcaaggaattgtgattgcaatgacaactataaccaagtatacacaaggggcaagatttctttgttcagatgaagcatgccctctttcaaaaggatttcagtatataagagtgcatgtgcctggtgctacagaatctgcaacgataagaaatgactttttgtgtaatctatgtgcatcttcacttcaagaagacagaaaatttagagtacttggtgataaacaaatagttgaaataattgccacaaaggcacttcgtgcttttcaaggatattctaacaaccagccatttaggtttcaatcacttacaattttcctaagagatgaatcagtgaataaaatgaatataggaaatgaatataaaattattggaattccaacctgtgtaaaaacctcacaaactgctgtctgtatagaagcaaatagcataactttttgtaattcaaaagttccttcaggaattagtgacaacttcaggtgtctcctctccttaacttccagctcatgctggaagtttacagcaatacttgccaatatctttgcatcacaaattacccctcctgggacttacaatttgctcaagctctgtttgttgatgagtctagtacagacaactgaccgtaacaaggaactggaagattgcctggatattttaattataacaagtgatactctactcatagacaggcttctgaattttagcataaaccttgtcccccgtggtatacgtcatctagtctctactgaaatttttcccactctatccaggaataagtatggaactggagcagttagcattcaggctggcagtgctttgctagctaaaggtggtatctgctttataggagacttggcttcacacaaaaaagataaacttgaacagcttcaaacagttctggagagcagaagcatcacagtgtacatcccaggaaagaagtttggggaggatattgatcaacagatgacttttccagttcagtgcagtttttggtcttttgttgatgtggattcatcttcaaggagaaatgcacagaaaatcaacactctaattggtcagatggattgcagtttgattccagctaaccttgtggaggcatttggtttattgattaactgcaacgagtcatctccctgccacccatttcttcctactgtgcaacacactttgaacaaagccattaatcctgaagggctgttttatgcggcttctagacagttcacaactgaagattttgaaaagctattggcttttgcaaagaatttgaatgtagaattcagcttggaagcagaaagaatgacccatggctattatctagcaagtcgcagaatcagaacaggctctgtatgtggatcaaagctgtcagcatctgcattaaaatatctcgttttcctatctgaagcccatgcacgactgaacttaaggaacaaagtgcttaaagaagatgtgctgattgcagccttactatttgaaacatccctcacattgaaatatggggccactgtattttgtgttgctccgaatgcagtatttccatttgaactgtataatgaagaatacttagagcaaagggatctctatctgactcagtgccaacaacagctggaacaatttattgccacatatggacctgggacaactattttctctagtgatgaataagcaatttgaggaatttttgttcattcctacttaagcagtggagaaaaagtgtgactattttgagagtgactttgaagtaatgctttgataatactctgtacaggaatatattacaatactgtttttaaaaatataaaatatagtcccctcaaaactaattgctaatgggataaatactaatccaaacctctaaaaccaacagaattttaaaacttagaacaatgtggacaatttaaagtgataaagttgtcaaggagaatactataaagaaaaacctggttagcccagaataccagtggtgaacagataaaaatgtaaatgttgcaatttgagcagtgtgtaaaatggcaacctttatgtagttcactctactgtcacaagatggcaataactctttacctacaaattactctaaaacatttttcttccacttgtgaacttgctaaactgatgagtaaatactttatataacccgaagcttcaaatgtaaggccttttcatactttattactggcctgtccattacatactactgttttagaagccctaaatatggaatcgggaaaagccttggaagttttccatacgtatacgctaggttaaatgaaaaaaatactttacacggaaacaaggagccaataacttataaattggctctctaaccctaactggttacaagaaaggctccaaaaggcaaagaaaccaacttgcaaatctagtcctcatttttggagggaagatatctgctctgaaaagataggggcaccatgagaaaacaaatccatcttgtaaaatttataaatcctttttagttcagtttccataactttaataaaagatcagttctattcacagaaaagcaaaatgtcattaccaaattgccactttattaaccaagatgttaccatgcatcaattctttcaaaactggtcccttaacagagatgcttaactgtacagctggacctctcccactctccacaggacccggaggaagttgttcactattactgaatacctactagtagcagggagtaaacagtattagttttcagaagccaaaggtagtgtttttgttttttgtttttttgagatggggtctcgctctgtcatgcaggctggagtgcagtggtgttatcttggcactgcaacctccacctcccgggttcaagtgattctcctgctgggattacaggtgcactccaccatgactggctaatttttgtatttttagtagagacagggtttcaccatgttggccaggctggtcttgaactcccgacctcaggtgatctgcctgcctcagtctcccaaagtgctaagacaacaggtatgagccaacacgactggcgactgtagttttcaacaaaatacttacatattacagttctataatgttaagacgtttattttgtgcttctcaaatactacatttcaaacatgtctggctctctatggggggaaggcaaaacacattcctattttataaaactaggatccttttacaattggaaagtttaaaaacttttttttttggagacaggggctgtcaccgtttggagggttgtggcgccacctcagctccctgcagccttgaccttgcaagtaattctcccaccttaggcctccgagtagctgggactacagggacatgctaccaccctgggataacttctgcattttttgtagagatggaattttgccatgtttcccaggctggtctcaagtcatcctcccatctcagtacctcagcttcccagtgttgggattacaggagtgagccaccatgcatggcacaaagatggcttttatttacttatctatatttatatatacatatttatatgtagctgtcacccaagctgtagtgtactgatgcaatcatagctcactgccaccttaatctccccagctcaaaaaacccaacctcagtctcaaagatggttacttcaccacaaaaaaattaaaatgtttaagtttctcattaaagagtagaagtgtacattcagaaacaattatgggaggtaattcattaatattaaatatgccaacggtattttaaaggttattggagaattagaagggggtggggtgcaggacgaaaaattaatgggtgcaatgtacaccattcaggtaatggctgcacaaaaagctcagactccaaactacttcatatacctatgcaacagaactgcacttataccccccaaatctatactgagggaagtgactaagatgttgctatacaggttttataccatttatcatataaaaattataaccttggtaaaaggaatttataagctagtactcaacaggagaaaagatttagctctaaaccttcacccagatataaattcagctttagaattcttgccaatttagtcctagacagactggtctgctcagtcatttctcttaacatagcatattgcttagttattacatgtactagtattaggatgacttttttgttcacaaagatgaaagcaaactgaataaaaaaggtgaaacctttatctgtaagggggaatttgattgctatttggtattaaagagttttaagattcaaccacctggtacaacagcaggctctgaaggggaagccagacagggaacctagaggtacaagcaatgtctccccagctgtcagcctcaatgagaatcaccacccataaataagctaattattgacaagattataatctttcgaatatgttcaaaacaggtctgactagtgactatgagaatggagctatttagagttgatttaaaagaaaacactttattgttcagcaattaaaagttagccaaatatgtatttttctccataatttattgtgatgttatcaacatcaagtaaaatgctcattttcatca

SEQ ID NO: 154162 - DNA, 2245 bp, Homo sapiens
  Payload ID: 10294
  Gene Symbol: MCMDC2
  Gene Name: minichromosome maintenance domain containing 2
  ENST ID: ENST00000428734
  CDS Start-End: 150-278
aggactccgctccgcctacgctgcaggcggagagcaaccgccaagcttggtgggagtcaaggttttcacatcctttctatgagtttcgccatctatagcttttatcaacaattgtggtttaatcaattagaaatattaaccaggagaaaatgtcaaatctaaaaatgaaagaggcggccctcatctatcttgacagaagtggaggcctccaaaagtttatagatgattgcaagtactacaatggtacgttcagcaaaggtctgttttattgctgttaagactctctcattaattggacaattgcagactgaaacgcaaattaatatagtgctgaaattaacacatttacctcccctgccaagttatggtcttgatctttgtgagtttccacttgattatacatctcagagattttatatgatgcaaggaattgtgattgcaatgacaactataaccaagtatacacaaggggcaagatttctttgttcagatgaagcatgccctctttcaaaaggatttcagtatataagagtgcatgtgcctggtgctacagaatctgcaacgataagaaatgactttttgtgtaatctatgtgcatcttcacttcaagaagacagaaaatttagagtacttggtgataaacaaatagttgaaataattgccacaaaggcacttcgtgcttttcaaggatattctaacaaccagccatttaggtttcaatcacttacaattttcctaagagatgaatcagtgaataaaatgaatataggaaatgaatataaaattattggaattccaacctgtgtaaaaacctcacaaactgctgtctgtatagaagcaaatagcataactttttgtaattcaaaagttccttcaggaattagtgacaacttcaggtgtctcctctccttaacttccagctcatgctggaagtttacagcaatacttgccaatatctttgcatcacaaattacccctcctgggacttacaatttgctcaagctctgtttgttgatgagtctagtacagacaactgaccgtaacaaggaactggaagattgcctggatattttaattataacaagtgatactctactcatagacaggcttctgaattttagcataaaccttgtcccccgtggtatacgtcatctagtctctactgaaatttttcccactctatccaggaataagtatggaactggagcagttagcattcaggctggcagtgctttgctagctaaaggtggtatctgctttataggagacttggcttcacacaaaaaagataaacttgaacagcttcaaacagttctggagagcagaagcatcacagtgtacatcccaggaaagaagtttggggaggatattgatcaacagatgacttttccagttcagtgcagtttttggtcttttgttgatgtggattcatcttcaaggagaaatgcacagaaaatcaacactctaattggtcagatggattgcagtttgattccagctaaccttgtggaggcatttggtttattgattaactgcaacgagtcatctccctgccacccatttcttcctactgtgcaacacactttgaacaaagccattaatcctgaagggctgttttatgcggcttctagacagttcacaactgaagattttgaaaagctattggcttttgcaaagaatttgaatgtagaattcagcttggaagcagaaagaatgacccatggctattatctagcaagtcgcagaatcagaacaggctctgtatgtggatcaaagctgtcagcatctgcattaaaatatctcgttttcctatctgaagcccatgcacgactgaacttaaggaacaaagtgcttaaagaagatgtgctgattgcagccttactatttgaaacatccctcacattgaaatatggggccactgtattttgtgttgctccgaatgcagtatttccatttgaactgtataatgaagaatacttagagcaaagggatctctatctgactcagtgccaacaacagctggaacaatttattgccacatatggacctgggacaactattttctctagtgatgaataagcaatttgaggaatttttgttcattcctacttaagcagtggagaaaaagtgtgactattttgagagtgactttgaagtaatgctttgataatactctgtacaggaatatattacaatactgtttttaaaaatataaaatatagtcccctcaaaactaattgctaat

SEQ ID NO: 154163 - DNA, 1831 bp, Homo sapiens
  Payload ID: 10294
  Gene Symbol: MCMDC2
  Gene Name: minichromosome maintenance domain containing 2
  ENST ID: ENST00000492775
  CDS Start-End: 131-1237
gctgcaggcggagagcaaccgccaagcttggtgggagtcaaggttttcacatcctttctatgagtttcgccatctatagcttttatcaacaattgtggtttaatcaattagaaatattaaccaggagaaaatgtcaaatctaaaaatgaaagaggcggccctcatctatcttgacagaagtggaggcctccaaaagtttatagatgattgcaagtactacaatgattcaaaacaaagctatgctgtctatcgattcaaaattttaataaatccctctgatgttgttgaattagatgctgagcttggaaatcacattttacaccaacctttaaaagctgctgaagtctttcaatcagtctgttttattgctgttaagactctctcattaattggacaattgcagactgaaacgcaaattaatatagtgctgaaattaacacatttacctcccctgccaagttatggtcttgatctttgtgagtttccacttgattatacatctcagagattttatatgatgcaaggaattgtgattgcaatgacaactataaccaagtatacacaaggggcaagatttctttgttcagatgaagcatgccctctttcaaaaggatttcagtatataagagtgcatgtgcctggtgctacagaatctgcaacgataagaaatgactttttgtgtaatctatgtgcatcttcacttcaagaagacagaaaatttagagtacttggtgataaacaaatagttgaaataattgccacaaaggcacttcgtgcttttcaaggatattctaacaaccagccatttaggtttcaatcacttacaattttcctaagagatgaatcagtgaataaaatgaatataggaaatgaatataaaattattggaattccaacctgtgtaaaaacctcacaaactgctgtctgtatagaagcaaatagcataactttttgtaattcaaaagttccttcaggaattagtgacaacttcaggtgtctcctctccttaacttccagctcatgctggaagtttacagcaatacttgccaatatctttgcatcacaaattacccctcctgggacttacaatttgctcaagctctgtttgttgatgagtctagtacagacaactgaccgtaacaaggaactggaagattgcctggatattttaattataacaagtgatactctactcatagacaggtatatatgtgacatgaatttttacaaatattaattggtcacagatttgcatacatcctttccatgagcattattacaagaagaatatttagaatttttctgagccagtataagtatttaaatcaatctttatcaataaaattcaaaacctttgaaagataaattgataagtgataagttgaattactccaattttcaacctatttccccactcagacctttgtaaataaatacatccttcccagccttcctttccccctattccctagctctgtattctctttctgtactttgttttgaatagtcttccccctaaggaacaaactaaccattttcttatttttcttcaatattccatcaataatattgactcactgcatccagataaggctgtcagaagtgccataattactatctggggggaacatcatcctaactttggagtaagcctctatttagcattttgtggctccccactagcaagtaccctttccttaaaacttgcttaaatattcacaaagttagaaataagctccctatttagtatcttgtatgcaaatccaaagcaaaaaataaatttacaaaatgaatttaaaatagaaaaaaataaaattgaaattaacaataa

SEQ ID NO: 154164 - DNA, 590 bp, Homo sapiens
  Payload ID: 10295
  Gene Symbol: MINOS1-NBL1
  Gene Name: MINOS1-NBL1 readthrough
  ENST ID: ENST00000602450
  CDS Start-End: 1-140
ggaagtgggaccggtgtctggcggatgcggtcgtgaagatagagatggggtttcaccatgttgcccaggctggtcttgaactcagggtccaaacgatccacctaccttggcctcccaacgtgccaggattacaggcatgagccaccacacctggtccatcttgataatttcatactctggcttggcaaagactgaagggaagccatggtgaatgcacagcaacttctggctctggaggccacgggcatgatgcttcgggtcctggtgggggctgtcctccctgccatgctactggctgccccaccacccatcaacaagctggcactgttcccagataagagtgcctggtgcgaagccaagaacatcacccagatcgtgggccacagcggctgtgaggccaagtccatccagaacagggcgtgcctaggacagtgcttcagctacagcgtccccaacaccttcccacagtccacagagtccctggttcactgtgactcctgcatgccagcccagtccatgtgggagattgtgacgctggagtgcccgggccacgaggaggtgcccagggtggacaagctggtggagaagat

SEQ ID NO: 154165 - DNA, 820 bp, Homo sapiens
  Payload ID: 10295
  Gene Symbol: MINOS1-NBL1
  Gene Name: MINOS1-NBL1 readthrough
  ENST ID: ENST00000602293
  CDS Start-End: 83-295
aggaagtgggaccggtgtctggcggatgcggtcgtgaagatagaatcctggtaattgatgtccacccgagaaatccctgcagatgttccagcctctgtctagtccagatagccacaggaagggtactggttttggattaggaattgttttctcacttaccttctttaaaagaagaatgtggccattagccttcggttctggcatgggattaggaatggcttattccaactgtcagcatgatttccaggctccatatcttctacatggaaaatatgtcaaagagcaggagcagtgacttcacctgagaacatcccagcgggaggacaagagaaatcatgtttattcctcaggaatactgaagtgccctggaaattccccaatggcttctcatcccatttggagaaaaagtcaaagtcgatacagtggactgtaggactctacaagacctggccttcttgggctctggaggccacgggcatgatgcttcgggtcctggtgggggctgtcctccctgccatgctactggctgccccaccacccatcaacaagctggcactgttcccagataagagtgcctggtgcgaagccaagaacatcacccagatcgtgggccacagcggctgtgaggccaagtccatccagaacagggcgtgcctaggacagtgcttcagctacagcgtccccaacaccttcccacagtccacagagtccctggttcactgtgactcctgcatgccagcccagtccatgtgggagattgtgacgctggagtgcccgggccacgaggaggtgcccagggtggacaagctggtggagaaga

SEQ ID NO: 154166 - DNA, 1623 bp, Homo sapiens
  Payload ID: 10295
  Gene Symbol: MINOS1-NBL1
  Gene Name: MINOS1-NBL1 readthrough
  ENST ID: ENST00000602662
  CDS Start-End: 151-696
gcgagactttcaggggtcggagcgcgggggccggccgagaggaaagctggaggcgcgggtggggaacatgtctgagtcggagctcggcaggaagtgggaccggtgtctggcggatgcggtcgtgaagatagggctctggaggccacgggcatgatgcttcgggtcctggtgggggctgtcctccctgccatgctactggctgccccaccacccatcaacaagctggcactgttcccagataagagtgcctggtgcgaagccaagaacatcacccagatcgtgggccacagcggctgtgaggccaagtccatccagaacagggcgtgcctaggacagtgcttcagctacagcgtccccaacaccttcccacagtccacagagtccctggttcactgtgactcctgcatgccagcccagtccatgtgggagattgtgacgctggagtgcccgggccacgaggaggtgcccagggtggacaagctggtggagaagatcctgcactgtagctgccaggcctgcggcaaggagcctagtcacgaggggctgagcgtctatgtgcagggcgaggacgggccgggatcccagcccggcacccaccctcacccccatccccacccccatcctggcgggcagacccctgagcccgaggacccccctggggccccccacacagaggaagagggggctgaggactgaggcccccccaactcttcctcccctctcatccccctgtggaatgttgggtctcactctctggggaagtcaggggagaagctgaagcccccctttggcactggatggacttggcttcagactcggacttgaatgctgcccggttgccatggagatctgaaggggcggggttagagccaagctgcacaatttaatatattcaagagtggggggaggaagcagaggtcttcagggctctttttttggggggggtggtctcttcctgtctggcttctagagatgtgcctgtgggagggggaggaagttggctgagccattgagtgctgggggaggccatccaagatggcatgaatcgggctaaggtccctgggggtgcagatggtactgctgaggtcccgggcttagtgtgagcatcttgccagcctcaggcttgagggagggctgggctagaaagaccactggcagaaacaggaggctccggcccacaggtttccccaaggcctctcaccccacttcccatctccagggaagcgtcgccccagtggcactgaagtggccctccctcagcggaggggtttgggagtcaggcctgggcaggaccctgctgactcgtggcgcgggagctgggagccaggctctccgggcctttctctggcttccttggcttgcctggtgggggaaggggaggaggggaagaaggaaagggaagagtcttccaaggccagaaggagggggacaaccccccaagaccatccctgaagacgagcatccccctcctctccctgttagaaatgttagtgccccgcactgtgccccaagttctaggccccccagaaagctgccagagccggccgccttctcccctctcccagggatgctctttgtaaatatcggatgggtgtgggagtgaggggttacctccctcgcccc

SEQ ID NO: 154167 - DNA, 999 bp, Homo sapiens
  Payload ID: 10295
  Gene Symbol: MINOS1-NBL1
  Gene Name: MINOS1-NBL1 readthrough
  ENST ID: ENST00000602384
  CDS Start-End: 1-216
aggaagtgggaccggtgtctggcggatgcggtcgtgaagataggtactggttttggattaggaattgttttctcacttaccttctttaaaagaagaatgtggccattagccttcggttctggcatgggattaggaatggcttattccaactgtcagcatgatttccaggctccatatcttctacatggaaaatatgtcaaagagcaggagcagtgacttcacctgagaacatcccagcgggaggacaagagaaatcatgtttattcctcaggaatactgaagtgccctggaaattccccaatggcttctcatcccatttggagaaaaagtcaaagtcgatacagtggactgtaggactctacaagacctggccttcttgataaggaaaccaaggcccaggtgtgaaacaactagcacagagtcagagggcgatgcaggaacaatgtaaaccctgagcctcccctgatgagtccgaatggctcctcccagctccatacctggagcgagagtgcagaggtttggacccccgttgaggccagactgacaggattagaggaaacagctgggctgagtccgtgccctgcaggagggagctcacattcccggactctgggagagagcagctccccacagctcagtcacattccagggctctggaggccacgggcatgatgcttcgggtcctggtgggggctgtcctccctgccatgctactggctgccccaccacccatcaacaagctggcactgttcccagataagagtgcctggtgcgaagccaagaacatcacccagatcgtgggccacagcggctgtgaggccaagtccatccagaacagggcgtgcctaggacagtgcttcagctacagcgtccccaacaccttcccacagtccacagagtccctggttcactgtgactcctgcatgccagcccagtccatgtgggagattgtgacgctggagtgcccgggccacgaggaggtgcccagggtggacaagc

SEQ ID NO: 154168 - DNA, 7185 bp, Homo sapiens
  Payload ID: 10296
  Gene Symbol: MIPOL1
  Gene Name: mirror-image polydactyly 1
  Uniprot ID: Q8TD10
  ENST ID: ENST00000327441
  CDS Start-End: 467-1795
cgccccgctcctccgccggatcgtctgtgggtgagtctcgagccaggaggctctgagccagtggcgattggctgacgcggtggctgcgcactcggcctgagaaactcggcaagcgcgcagtgtcgactccccggtctatgccaggcgcatctcagagtttggcttagagattaaagctccttctatcttgtgatgccaccatcgcaaggttctcaaggttgttgtgggagaagagaaggctaaaggagctcatagaatgcctttaatgctaatccaaaagtaaatgagaaacttagaaaaagattgccaattccaaatcaacatatttagagaaaattggaaaaggagaagcttactacagctttatttgaggactttttaaagaacgctgggttctatctgtgagctgcaaatcttggagcaaaaaccagagacattgccagagcaaacaagaacagaaatacaaatggagaactggtcaaaagacataacccacagttatcttgaacaagaaactacggggataaataaaagtacgcagccagatgagcaactgactatgaattctgagaaaagtatgcatcggaaatccactgaattagttaatgaaataacatgtgagaacacagaatggccagggcagagatcaacgaattttcagatcatcagttcttatccagatgatgagtctgtttactgcactactgaaaaatacaacgttatggaacatagacataatgatatgcattatgaatgtatgactccttgtcaagttacttcagactcagataaagagaagacaatagcatttcttctaaaagaattggatattctcagaacaagcaataaaaagcttcagcagaaattggctaaagaagataaagaacagagaaaactaaagtttaagctggaactccaagagaaagaaacagaagctaaaattgctgaaaagacagcagctctggttgaagaagtgtattttgcgcagaaggaacgtgatgaagctgttatgtctagactgcaattagccattgaggagagagatgaagcaattgcacgagccaagcatatggaaatgtctctaaaagtgctagaaaatattaaccctgaagaaaatgacatgacattacaggaattactgaacagaataaacaatgcagacacagggatagctattcagaagaatggagctataattgtggatagaatctacaagaccaaggaatgtaaaatgagaataactgcagaagaaatgagtgcactaatagaagaacgggatgctgccttgtctaagtgcaaacggttagagcaggagcttcatcatgtgaaagagcagaaccagacttcagcaaacaacatgagacatctgactgctgaaaacaatcaagaacgtgctctgaaggcaaagttgttatctatgcaacaagccagagaaactgcagttcaacagtacaaaaaactggaagaggaaatccagacccttcgagtttactacagtttacacaaatctttatctcaagaagaaaatctgaaggatcagtttaactatacccttagtacatatgaagaagctttaaaaaacagagagaacattgtttccatcactcaacaacaaaatgaggaactggctactcaactgcaacaagctctgacagagcgagcaaatatggaattacaacttcaacatgccagagaggcctcccaagtggccaatgaaaaagttcaaaagttggaaaggctggtggatgtactgaggaagaaggttggaaccgggaccatgaggacagtgatctgattgaaaaaaaacgacagtctggggaagcgatcacatctggtgaccaggctgcttcattcaacactgtgtaaacaccaaagccttaacttagcaaacagttgttagaagtgggacactccaaccacattccaagctgagataaaatcaaatcacaaatgtttaaccactttgctgctgacttgagttatttatccaaatatattaactatagacttttaccaatgggtagctataaggttacagcttattttgtaactattttatatctcaatatctttaatataaatctttttactgagagatcattatagaaacatgttaaagttggttaggatcatatcttcacatatggccctttctgaatcaaagtgcggcaaagtaaatattgtctaagctttaatccactgtgttaggtcaaaacttcaaatacatgcatttttcaatatagggtatatttcttaactgatgagagaggcttagacatgagtgtgtagtcttccttcaatgcgtgtatgtaatctttgttagtataaaagatattaaatataggtgccaagaattaaatgtataatttgtttaataagagatggatatattaaaattacattcatcaaggcatgatttttgtttcactacaaataatgcaaactgttttcaataaaaagaggagactgttaatgtgtacttataaattcacattgtcagtattttttaatattgggtctgaataattatctgaattctacttaagctataagtctctgtcatttttgcttgaaaattagcatgcctctgtcttaaaagagaccatcaaacctattaagtattcttattgtttatctttttttaattgccatttgatttttattgtggaggaggaggatctaatatataatattcaatacaattgtaatgtagaaatataagaatttagaaaaaagtaaacttgccatttggttaaggttacctgctttttattttattccagaaataagatagttacagcatagcagtcatatgaagttatgaatagaactgagatttttatgtaattagttataggcaaaatactttcatatttttagattagacagacgaaagaccaagaggaaatgactgtgcctggaacaggatgaaatagacaagtagagatttaattagcaaaaattttgtagggaagtaaaattttttctaagtctatacgtttttaattcatctttaagattgagctaaattatctaccattgcctatttacaggataagtacattcaggacaatttattgtaccattctttcatataccatagcagattatccatttcaatttttttttactccacaggaaaatgtaagctactttgtcatagatcacaaaagaatcataatgctaacaaactctatttcttccttattaaatctgtatccattaaagtaacttttttaactatgagaattagaaaataagggacaacaggggttaaaaataaactgatttaatttgctctatagtcctaaagagaattatatcctctcatagaccaatgactctataatagagaaatatgtaatgatttggtcatgcatggagtcttgtctctgggctctatttgaaacgtgtaacagctccctatgtgaagaaacattatctttaaagtcatctgggaggtgcaggtaagtaaagagaaacaatttttgtcacaaagtagtccattcctgatctcacttaaaataaatcacaagtaaatttgaattttcggtttaatgttgaaagcagatgaacttttcttgagttattttgtcttttagaatacacaaaatatagtataaagacatttcacaatttccaaacaaatctttctacgcttaaatgatcaaattagaaaaaccaattcctataattaatatgcagaacttttatagaatatgatattataaagttaaatttgcaaaataattctaacatccactattgttcagtataggtaatctcccaaaaatatcacatcctcttgaaaatgaattgtctacaaaatttcaaatgcaaagtattacagccaaatattatcttaattaatttcttacacttaaaagtgtccatcaacagtgtgtcagatggtctttatatattttttctgtatgaaggaatagccttgcctactgaagataggttctctatgtattcaacaataatgcaactttagaagtattccacactgctgagaaatgttgctttgagtttgctttacacatcatcaactctaaatcctatagtaacatgagaattcacttcttcttgtaaaaataagtaatttacaggaaaggcaaaatgctaatactaacatttgtagcacttgatgatttacaaagtccttttacatctgttttttcatttgatcctatcgacaatcataataataataaattatatatataacccatataataacgatggtgatgataattttagtattactgtcattataattattattatattcattctacagatgaggaaacagactcagtaagccttggaatttgccaaggactggctaggacctagaactaagatcttataaccacactccatgcaactatgagtctctaaatctctctgtaagaaaaaaatttcaaagtaaagattttactcttgcaatttctgttgtgatagtaccatctctttcacatactacatacaaattccctaataatcaaaagattgtacacatttttttcaatgaagtacaataatgtgaactgcatgtgtaaacagcatcacattattaccacctctctatggtattatagtggcagtatgctttgcctcagccttcactaattaggaatattgtgacaattcattgctaataaaacataacatgagtctctttgtactgtttttaatttggcctgatgctaaaacctatcagcttagttttttaacatggtagtctaaacttcaaggcttgctctatctcctagagcaatttagagctaaaaccagtaataagcaaagttattggttataagcaaggtataagcagttaaagcaaagttattaattattaatatatgagaatttaaaattttataaataagttagaaattattaatgtattttaaatatggagtaaaatattttgctaatttttttcaatgataaagttgatcctttgtatatttccttattcaaataaattcagtcatcttcttatcaggttgcttatttatataatttgtttattttattaaaaatctagaatattaaagatttatacttttaatattgaatatagtttcgtagaaaaacattttatatgtactattcttaaagatcacaattatttttaaactttctattttcaaatacttgtgattaataaggcattctatgatgaaatagccatggcttatatatttttgtcttttcacatatgatgtgtttggaacccaaattttttactgattttattgtgttgttggtaactagtatttacagctaacctatctattcatattttacatatatatatatatatatacatgcacacacaccgatacatttaccttttaaaaaaatgatttataagtgaactgttaggctccagtgatttcagtgttttgttcatgttttattggaaatgcacgtggtttcttaggcttttaaacaaatacatggaatggttgaaagatttattttgctcgtgcttagctaaatatgtcatctctagaaaagatgtggtttgttttggcactgttttaaaaactcaaatattttaaacatttgttaagttggagcttgcacatttaaaccagcagcatacgttccagaagagcatctcaagttaccaaattttttgtaatccttttactagaaaaatcttttttgaagagtttttcttgtgcttgcttcggcagcatatatactgaaattagaaaaagaaaacttttcttttttattatatattttagtgtaagttaagttaaacttctaaaagttgaattatttaatgtaggacttcataaatagtatttgacaatgataaatgtgtatttttgagaatcattaaaatgtatacaatgatattcctttgcagaagtcttaatatgcataatttttaatctaattgtcttctaaatatagttttggtgtatgctggtattttagaagccaccaatttctggactatctgattattaacaaagatgtattttaatgcacaaactcaaatgtttaaaatatatatttactttgtactcaaataaaatcccctattgcaaatcctatacatatttcaatgcaattcttatacatcgatcttaatcaaatttataaatgtacaatcctgaagacagtgtactagatatgcactataaaatatattgcagtaaggaaacagattaagttcactgtcaaactgtctgacttccttaacaaatttaataaagataaatgtcaatatgaacaaatttgttaggtaccttaggaatctttcaaaactatttagatataaaataaaattatagtaataaaatattgaagagaaatatcatttttagtgaatatggttagaaagaacataagaagtgagatcaaattattttaattaaaaaaataggccaggtgcgatggctcacgcctgtaatcccagcattttgggaggccgaggcgggcggatcacaaggtcaggagattgagaccatcctggctaacacggtgaaaccccgtctctactaaaaaaagtacaaaaaagaagttagccgggcgtggtggcgggcgcctgtagtcccagctacttgggaggctgaggcaggagaatggcgtgaacccggaaggcagagcttgcagtgagccgagatcacgccattgcactccagcctgggtgacagagtgagactgtctcaaataataataataataataataataataataataataataatagactgactcaaatctaccataaagcacctctactcattttggaatatgtacgtggaattttgcttcaatagctgaaatctaaaaacactctttctgttgcatttgattattcaatcatgataaggtaaatgtaaacagactgtgtagcactctatcacctggagtgaacttagaatttacagcttagagtacatgactaaaagaggaatggagtggaagtgggcagtaggtgtctttggggcaaaaattctataaactggtgttatctaaactatcacattactttgttaaattattgtttcatcacgtatgacctttgtgatttgtcacacattttacttctacatatgcacataattgtaatttttttaactttaaaaagtcaattatgtttaagaaaatttttaaaataagaatgaacgtatgtgatatttactgtga

SEQ ID NO: 154169 - DNA, 6258 bp, Homo sapiens
  Payload ID: 10296
  Gene Symbol: MIPOL1
  Gene Name: mirror-image polydactyly 1
  Uniprot ID: Q8TD10
  ENST ID: ENST00000396294
  CDS Start-End: 643-1971
ccctgcggcgcgccgccgccccgtaggccccacgcgccgccccgctcctccgccggatcgtctgtgggtgagtctcgagccaggaggctctgagccagtggcgattggctgacgcggtggctgcgcactcggcctgagaaactcggcaagcgcgcagtgtcgactccccggtctatgccaggcgcatctcaggaacgaggtctcactatattgcccagactggtctcgaactcctgggctcaaacagtccccctgcgttggcctcccaaagtgatggaattacaggtgtgaatcactgcatctgactatggcaaggatctctgtcactgagagtttggcttagagattaaagctccttctatcttgtgatgccaccatcgcaaggttctcaaggttgttgtgggagaagagaaggctaaaggagctcatagaatgcctttaatgctaatccaaaagtaaatgagaaacttagaaaaagattgccaattccaaatcaacatatttagagaaaattggaaaaggagaagcttactacagctttatttgaggactttttaaagaacgctgggttctatctgtgagctgcaaatcttggagcaaaaaccagagacattgccagagcaaacaagaacagaaatacaaatggagaactggtcaaaagacataacccacagttatcttgaacaagaaactacggggataaataaaagtacgcagccagatgagcaactgactatgaattctgagaaaagtatgcatcggaaatccactgaattagttaatgaaataacatgtgagaacacagaatggccagggcagagatcaacgaattttcagatcatcagttcttatccagatgatgagtctgtttactgcactactgaaaaatacaacgttatggaacatagacataatgatatgcattatgaatgtatgactccttgtcaagttacttcagactcagataaagagaagacaatagcatttcttctaaaagaattggatattctcagaacaagcaataaaaagcttcagcagaaattggctaaagaagataaagaacagagaaaactaaagtttaagctggaactccaagagaaagaaacagaagctaaaattgctgaaaagacagcagctctggttgaagaagtgtattttgcgcagaaggaacgtgatgaagctgttatgtctagactgcaattagccattgaggagagagatgaagcaattgcacgagccaagcatatggaaatgtctctaaaagtgctagaaaatattaaccctgaagaaaatgacatgacattacaggaattactgaacagaataaacaatgcagacacagggatagctattcagaagaatggagctataattgtggatagaatctacaagaccaaggaatgtaaaatgagaataactgcagaagaaatgagtgcactaatagaagaacgggatgctgccttgtctaagtgcaaacggttagagcaggagcttcatcatgtgaaagagcagaaccagacttcagcaaacaacatgagacatctgactgctgaaaacaatcaagaacgtgctctgaaggcaaagttgttatctatgcaacaagccagagaaactgcagttcaacagtacaaaaaactggaagaggaaatccagacccttcgagtttactacagtttacacaaatctttatctcaagaagaaaatctgaaggatcagtttaactatacccttagtacatatgaagaagctttaaaaaacagagagaacattgtttccatcactcaacaacaaaatgaggaactggctactcaactgcaacaagctctgacagagcgagcaaatatggaattacaacttcaacatgccagagaggcctcccaagtggccaatgaaaaagttcaaaagttggaaaggctggtggatgtactgaggaagaaggttggaaccgggaccatgaggacagtgatctgattgaaaaaaaacgacagtctggggaagcgatcacatctggtgaccaggctgcttcattcaacactgtgtaaacaccaaagccttaacttagcaaacagttgttagaagtgggacactccaaccacattccaagctgagataaaatcaaatcacaaatgtttaaccactttgctgctgacttgagttatttatccaaatatattaactatagacttttaccaatgggtagctataaggttacagcttattttgtaactattttatatctcaatatctttaatataaatctttttactgagagatcattatagaaacatgttaaagttggttaggatcatatcttcacatatggccctttctgaatcaaagtgcggcaaagtaaatattgtctaagctttaatccactgtgttaggtcaaaacttcaaatacatgcatttttcaatatagggtatatttcttaactgatgagagaggcttagacatgagtgtgtagtcttccttcaatgcgtgtatgtaatctttgttagtataaaagatattaaatataggtgccaagaattaaatgtataatttgtttaataagagatggatatattaaaattacattcatcaaggcatgatttttgtttcactacaaataatgcaaactgttttcaataaaaagaggagactgttaatgtgtacttataaattcacattgtcagtattttttaatattgggtctgaataattatctgaattctacttaagctataagtctctgtcatttttgcttgaaaattagcatgcctctgtcttaaaagagaccatcaaacctattaagtattcttattgtttatctttttttaattgccatttgatttttattgtggaggaggaggatctaatatataatattcaatacaattgtaatgtagaaatataagaatttagaaaaaagtaaacttgccatttggttaaggttacctgctttttattttattccagaaataagatagttacagcatagcagtcatatgaagttatgaatagaactgagatttttatgtaattagttataggcaaaatactttcatatttttagattagacagacgaaagaccaagaggaaatgactgtgcctggaacaggatgaaatagacaagtagagatttaattagcaaaaattttgtagggaagtaaaattttttctaagtctatacgtttttaattcatctttaagattgagctaaattatctaccattgcctatttacaggataagtacattcaggacaatttattgtaccattctttcatataccatagcagattatccatttcaatttttttttactccacaggaaaatgtaagctactttgtcatagatcacaaaagaatcataatgctaacaaactctatttcttccttattaaatctgtatccattaaagtaacttttttaactatgagaattagaaaataagggacaacaggggttaaaaataaactgatttaatttgctctatagtcctaaagagaattatatcctctcatagaccaatgactctataatagagaaatatgtaatgatttggtcatgcatggagtcttgtctctgggctctatttgaaacgtgtaacagctccctatgtgaagaaacattatctttaaagtcatctgggaggtgcaggtaagtaaagagaaacaatttttgtcacaaagtagtccattcctgatctcacttaaaataaatcacaagtaaatttgaattttcggtttaatgttgaaagcagatgaacttttcttgagttattttgtcttttagaatacacaaaatatagtataaagacatttcacaatttccaaacaaatctttctacgcttaaatgatcaaattagaaaaaccaattcctataattaatatgcagaacttttatagaatatgatattataaagttaaatttgcaaaataattctaacatccactattgttcagtataggtaatctcccaaaaatatcacatcctcttgaaaatgaattgtctacaaaatttcaaatgcaaagtattacagccaaatattatcttaattaatttcttacacttaaaagtgtccatcaacagtgtgtcagatggtctttatatattttttctgtatgaaggaatagccttgcctactgaagataggttctctatgtattcaacaataatgcaactttagaagtattccacactgctgagaaatgttgctttgagtttgctttacacatcatcaactctaaatcctatagtaacatgagaattcacttcttcttgtaaaaataagtaatttacaggaaaggcaaaatgctaatactaacatttgtagcacttgatgatttacaaagtccttttacatctgttttttcatttgatcctatcgacaatcataataataataaattatatatataacccatataataacgatggtgatgataattttagtattactgtcattataattattattatattcattctacagatgaggaaacagactcagtaagccttggaatttgccaaggactggctaggacctagaactaagatcttataaccacactccatgcaactatgagtctctaaatctctctgtaagaaaaaaatttcaaagtaaagattttactcttgcaatttctgttgtgatagtaccatctctttcacatactacatacaaattccctaataatcaaaagattgtacacatttttttcaatgaagtacaataatgtgaactgcatgtgtaaacagcatcacattattaccacctctctatggtattatagtggcagtatgctttgcctcagccttcactaattaggaatattgtgacaattcattgctaataaaacataacatgagtctctttgtactgtttttaatttggcctgatgctaaaacctatcagcttagttttttaacatggtagtctaaacttcaaggcttgctctatctcctagagcaatttagagctaaaaccagtaataagcaaagttattggttataagcaaggtataagcagttaaagcaaagttattaattattaatatatgagaatttaaaattttataaataagttagaaattattaatgtattttaaatatggagtaaaatattttgctaatttttttcaatgataaagttgatcctttgtatatttccttattcaaataaattcagtcatcttcttatcaggttgcttatttatataatttgtttattttattaaaaatctagaatattaaagatttatacttttaatattgaatatagtttcgtagaaaaacattttatatgtactattcttaaagatcacaattatttttaaactttctattttcaaatacttgtgattaataaggcattctatgatgaaatagccatggcttatatatttttgtcttttcacatatgatgtgtttggaacccaaattttttactgattttattgtgttgttggtaactagtatttacagctaacctatctattcatattttacatatatatatatatatatacatgcacacacaccgatacatttaccttttaaaaaaatgatttataagtgaactgttaggctccagtgatttcagtgttttgttcatgttttattggaaatgcacgtggtttcttaggcttttaaacaaatacatggaatggttgaaagatttattttgctcgtgcttagctaaatatgtcatctctagaaaagatgtggtttgttttggcactgttttaaaaactcaaatattttaaacatttgttaagttggagcttgcacatttaaaccagcagcatacgttccagaagagcatctcaagttaccaaattttttgtaatccttttactagaaaaatcttttttgaagagtttttcttgtgcttgcttcggcagcatatatactgaaattagaaaaagaaaacttttcttttttattatatattttagtgtaagttaagttaaacttctaaaagttgaattatttaatgtaggacttcataaatagtatttgacaatgataaatgtgtatttttgagaatcattaaaatgtatacaatgatattcctttgcagaagtcttaatatgcataatttttaatctaattgtcttctaaatatagttttggtgtatgctggtattttagaagccaccaatttctggactatctgattattaacaaagatgtattttaatgcacaaactcaaatgtttaaaatatatatttactttgtactcaaataaaatcccctattgcaaatcct

SEQ ID NO: 154170 - DNA, 2389 bp, Homo sapiens
  Payload ID: 10296
  Gene Symbol: MIPOL1
  Gene Name: mirror-image polydactyly 1
  ENST ID: ENST00000539062
  CDS Start-End: 462-1697
gtggcgattggctgacgcggtggctgcgcactcggcctgagaaactcggcaagcgcgcagtgtcgactccccggtctatgccaggcgcatctcagctaatccaaaagtaaatgagaaacttagaaaaagattgccaattccaaatcaacatatttagagaaaattggaaaaggagaagcttactacagctttatttgaggactttttaaagaacgctgggttctatctgtgagctgcaaatcttggagcaaaaaccagagacattgccagagcaaacaagaacagaaatacaaatggagaactggtcaaaagtttgctacttcgcatatccctacttgaccttttttggagcaaatgcctttgtgaagtcttcctagagtcttccagacataacccacagttatcttgaacaagaaactacggggataaataaaagtacgcagccagatgagcaactgactatgaattctgagaaaagtatgcatcggaaatccactgaattagttaatgaaataacatgtgagaacacagaatggccagggcagagatcaacgaattttcagatcatcagttcttatccagatgatgagtctgtttactgcactactgaaaaatacaacgttatggaacatagacataatgatatgcattatgaatgtatgactccttgtcaagttacttcagactcagataaagagaagacaatagcatttcttctaaaagaattggatattctcagaacaagcaataaaaagcttcagcagaaattggctaaagaagataaagaacagagaaaactaaagtttaagctggaactccaagagaaagaaacagaagctaaaattgctgaaaagacagcagctctggttgaagaagtgtattttgcgcagaaggaacgtgatgaagctgttatgtctagactgcaattagccattgaggagagagatgaagcaattgcacgagccaagcatatggaaatgtctctaaaagtgctagaaaatattaaccctgaagaaaatgacatgacattacaggaattactgaacagaataaacaatgcagacacagggatagctattcagaagaatggagctataattgtggatagaatctacaagaccaaggaatgtaaaatgagaataactgcagaagaaatgagtgcactaatagaagaacgggatgctgccttgtctaagtgcaaacggttagagcaggagcttcatcatgtgaaagagcagaaccagacttcagcaaacaacatgagacatctgactgctgaaaacaatcaagaacgtgctctgaaggcaaagttgttatctatgcaacaagccagagaaactgcagttcaacagtacaaaaaactggaagaggaaatccagacccttcgagtttactacagtttacacaaatctttatctcaagaagaaaatctgaaggatcagtttaactatacccttagtacatatgaagaagctttaaaaaacagagagaacattgtttccatcactcaacaacaaaatgaggaactggctactcaactgcaacaagctctgacagagcgagcaaatatggaattacaacttcaacatgccagagaggcctcccaagtggccaatgaaaaagttcaaaagttggaaaggctggtggatgtactgaggaagaaggttggaaccgggaccatgaggacagtgatctgattgaaaaaaaacgacagtctggggaagcgatcacatctggtgaccaggctgcttcattcaacactgtgtaaacaccaaagccttaacttagcaaacagttgttagaagtgggacactccaaccacattccaagctgagataaaatcaaatcacaaatgtttaaccactttgctgctgacttgagttatttatccaaatatattaactatagacttttaccaatgggtagctataaggttacagcttattttgtaactattttatatctcaatatctttaatataaatctttttactgagagatcattatagaaacatgttaaagttggttaggatcatatcttcacatatggccctttctgaatcaaagtgcggcaaagtaaatattgtctaagctttaatccactgtgttaggtcaaaacttcaaatacatgcatttttcaatatagggtatatttcttaactgatgagagaggcttagacatgagtgtgtagtcttccttcaatgcgtgtatgtaatctttgttagtataaaagatattaaatataggtgccaagaattaaatgtataatttgtttaataagagatggatatattaaaattacattcatcaaggcatgatttttgtttcactacaaataatgcaaactgttttcaataaaaagaggagactgttaatgtgtacttataaa

SEQ ID NO: 154171 - DNA, 2073 bp, Homo sapiens
  Payload ID: 10296
  Gene Symbol: MIPOL1
  Gene Name: mirror-image polydactyly 1
  ENST ID: ENST00000545536
  CDS Start-End: 419-1693
ggaacgaggtctcactatattgcccagactggtctcgaactcctgggctcaaacagtccccctgcgttggcctcccaaagtgatggaattacaggtgtgaatcactgcatctgactatggcaaggatctctgtcactgagctaatccaaaagtaaatgagaaacttagaaaaagattgccaattccaaatcaacatatttagagaaaattggaaaaggagaagcttactacagctttatttgaggactttttaaagaacgctgggttctatctgtgagctgcaaatcttggagcaaaaaccagagacattgccagagcaaacaagaacagaaatacaaatggagaactggtcaaaagttatcttgaacaagaaactacggggataaataaaagtacgcagccagatgagcaactgactatgaattctgagaaaagtatgcatcggaaatccactgaattagttaatgaaataacatgtgagaacacagaatggccagggcagagatcaacgaattttcagatcatcagttcttatccagatgatgagtctgtttactgcactactgaaaaatacaacgttatggaacatagacataatgatatgcattatgaatgtatgactccttgtcaagttacttcagactcagataaagagaagacaatagcatttcttctaaaagaattggatattctcagaacaagcaataaaaagcttcagcagaaattggctaaagaagataaagaacagagaaaactaaagtttaagctggaactccaagagaaagaaacagaagctaaaattgctgaaaagacagcagctctggttgaagaagtgtattttgcgcagaaggaacgtgatgaagctgttatgtctagactgcaattagccattgaggagagagatgaagcaattgcacgagccaagcatatggaaatgtctctaaaagtgctagaaaatattaaccctgaagaaaatgacatgacattacaggaattactgaacagaataaacaatgcagacacagggatagctattcagaagaatggagctataattgtggatagaatctacaagaccaaggaatgtaaaatgagaataactgcagaagaaatgagtgcactaatagaagaacgggatgctgccttgtctaagtgcaaacggttagagcaggagcttcatcatgtgaaagagcagaaccagacttcagcaaacaacatgagacatctgactgctgaaaacaatcaagaacgtgctctgaaggcaaagttgttatctatgcaacaagccagagaaactgcagttcaacagtacaaaaaactggaagaggaaatccagacccttcgagtttactacagtttacacaaatctttatctcaagaagaaaatctgaaggatcagtttaactatacccttagtacatatgaagaagctttaaaaaacagagagaacattgtttccatcactcaacaacaaaatgaggaactggctactcaactgcaacaagctctgacagagcgagcaaatatggaattacaacttcaacatgccagagaggcctcccaagtggccaatgaaaaagttcaaaaatctcaaatacaaatctatttcattccaaataaaaaagatgaaagagaaaaattcctaatggataaaagaagaaagattgttgcacattcaaaacagaattcttgatagatacaaaatcatccaataaacttcagctagttttcagcattatatgcagttgatttgtccattcctcagtggaacttccaaatcatctaaaccagctttgtatgacactaagaataccctcattccttcagtgtctagctctgtgctgtgtttatttgcagaggaccctcatgcatggatccatataaatgaggcaaactgtgaagcagactagactgtgccgcttaccgtaaagtctttgagagaggaagattgtgtatatgaaaactgctaggcatgatatttacttataaggaagatttctatgtgtataacatcaagcaagatttttggttgaggttttatgctttcagtaaagaaaataaaagaagaaaacc

SEQ ID NO: 154172 - DNA, 5954 bp, Homo sapiens
  Payload ID: 10296
  Gene Symbol: MIPOL1
  Gene Name: mirror-image polydactyly 1
  Uniprot ID: Q8TD10
  ENST ID: ENST00000537471
  CDS Start-End: 339-1667
ggaacgaggtctcactatattgcccagactggtctcgaactcctgggctcaaacagtccccctgcgttggcctcccaaagtgatggaattacaggtgtgaatcactgcatctgactatggcaaggatctctgtcactgagctaatccaaaagtaaatgagaaacttagaaaaagattgccaattccaaatcaacatatttagagaaaattggaaaaggagaagcttactacagctttatttgaggactttttaaagaacgctgggttctatctgtgagctgcaaatcttggagcaaaaaccagagacattgccagagcaaacaagaacagaaatacaaatggagaactggtcaaaagacataacccacagttatcttgaacaagaaactacggggataaataaaagtacgcagccagatgagcaactgactatgaattctgagaaaagtatgcatcggaaatccactgaattagttaatgaaataacatgtgagaacacagaatggccagggcagagatcaacgaattttcagatcatcagttcttatccagatgatgagtctgtttactgcactactgaaaaatacaacgttatggaacatagacataatgatatgcattatgaatgtatgactccttgtcaagttacttcagactcagataaagagaagacaatagcatttcttctaaaagaattggatattctcagaacaagcaataaaaagcttcagcagaaattggctaaagaagataaagaacagagaaaactaaagtttaagctggaactccaagagaaagaaacagaagctaaaattgctgaaaagacagcagctctggttgaagaagtgtattttgcgcagaaggaacgtgatgaagctgttatgtctagactgcaattagccattgaggagagagatgaagcaattgcacgagccaagcatatggaaatgtctctaaaagtgctagaaaatattaaccctgaagaaaatgacatgacattacaggaattactgaacagaataaacaatgcagacacagggatagctattcagaagaatggagctataattgtggatagaatctacaagaccaaggaatgtaaaatgagaataactgcagaagaaatgagtgcactaatagaagaacgggatgctgccttgtctaagtgcaaacggttagagcaggagcttcatcatgtgaaagagcagaaccagacttcagcaaacaacatgagacatctgactgctgaaaacaatcaagaacgtgctctgaaggcaaagttgttatctatgcaacaagccagagaaactgcagttcaacagtacaaaaaactggaagaggaaatccagacccttcgagtttactacagtttacacaaatctttatctcaagaagaaaatctgaaggatcagtttaactatacccttagtacatatgaagaagctttaaaaaacagagagaacattgtttccatcactcaacaacaaaatgaggaactggctactcaactgcaacaagctctgacagagcgagcaaatatggaattacaacttcaacatgccagagaggcctcccaagtggccaatgaaaaagttcaaaagttggaaaggctggtggatgtactgaggaagaaggttggaaccgggaccatgaggacagtgatctgattgaaaaaaaacgacagtctggggaagcgatcacatctggtgaccaggctgcttcattcaacactgtgtaaacaccaaagccttaacttagcaaacagttgttagaagtgggacactccaaccacattccaagctgagataaaatcaaatcacaaatgtttaaccactttgctgctgacttgagttatttatccaaatatattaactatagacttttaccaatgggtagctataaggttacagcttattttgtaactattttatatctcaatatctttaatataaatctttttactgagagatcattatagaaacatgttaaagttggttaggatcatatcttcacatatggccctttctgaatcaaagtgcggcaaagtaaatattgtctaagctttaatccactgtgttaggtcaaaacttcaaatacatgcatttttcaatatagggtatatttcttaactgatgagagaggcttagacatgagtgtgtagtcttccttcaatgcgtgtatgtaatctttgttagtataaaagatattaaatataggtgccaagaattaaatgtataatttgtttaataagagatggatatattaaaattacattcatcaaggcatgatttttgtttcactacaaataatgcaaactgttttcaataaaaagaggagactgttaatgtgtacttataaattcacattgtcagtattttttaatattgggtctgaataattatctgaattctacttaagctataagtctctgtcatttttgcttgaaaattagcatgcctctgtcttaaaagagaccatcaaacctattaagtattcttattgtttatctttttttaattgccatttgatttttattgtggaggaggaggatctaatatataatattcaatacaattgtaatgtagaaatataagaatttagaaaaaagtaaacttgccatttggttaaggttacctgctttttattttattccagaaataagatagttacagcatagcagtcatatgaagttatgaatagaactgagatttttatgtaattagttataggcaaaatactttcatatttttagattagacagacgaaagaccaagaggaaatgactgtgcctggaacaggatgaaatagacaagtagagatttaattagcaaaaattttgtagggaagtaaaattttttctaagtctatacgtttttaattcatctttaagattgagctaaattatctaccattgcctatttacaggataagtacattcaggacaatttattgtaccattctttcatataccatagcagattatccatttcaatttttttttactccacaggaaaatgtaagctactttgtcatagatcacaaaagaatcataatgctaacaaactctatttcttccttattaaatctgtatccattaaagtaacttttttaactatgagaattagaaaataagggacaacaggggttaaaaataaactgatttaatttgctctatagtcctaaagagaattatatcctctcatagaccaatgactctataatagagaaatatgtaatgatttggtcatgcatggagtcttgtctctgggctctatttgaaacgtgtaacagctccctatgtgaagaaacattatctttaaagtcatctgggaggtgcaggtaagtaaagagaaacaatttttgtcacaaagtagtccattcctgatctcacttaaaataaatcacaagtaaatttgaattttcggtttaatgttgaaagcagatgaacttttcttgagttattttgtcttttagaatacacaaaatatagtataaagacatttcacaatttccaaacaaatctttctacgcttaaatgatcaaattagaaaaaccaattcctataattaatatgcagaacttttatagaatatgatattataaagttaaatttgcaaaataattctaacatccactattgttcagtataggtaatctcccaaaaatatcacatcctcttgaaaatgaattgtctacaaaatttcaaatgcaaagtattacagccaaatattatcttaattaatttcttacacttaaaagtgtccatcaacagtgtgtcagatggtctttatatattttttctgtatgaaggaatagccttgcctactgaagataggttctctatgtattcaacaataatgcaactttagaagtattccacactgctgagaaatgttgctttgagtttgctttacacatcatcaactctaaatcctatagtaacatgagaattcacttcttcttgtaaaaataagtaatttacaggaaaggcaaaatgctaatactaacatttgtagcacttgatgatttacaaagtccttttacatctgttttttcatttgatcctatcgacaatcataataataataaattatatatataacccatataataacgatggtgatgataattttagtattactgtcattataattattattatattcattctacagatgaggaaacagactcagtaagccttggaatttgccaaggactggctaggacctagaactaagatcttataaccacactccatgcaactatgagtctctaaatctctctgtaagaaaaaaatttcaaagtaaagattttactcttgcaatttctgttgtgatagtaccatctctttcacatactacatacaaattccctaataatcaaaagattgtacacatttttttcaatgaagtacaataatgtgaactgcatgtgtaaacagcatcacattattaccacctctctatggtattatagtggcagtatgctttgcctcagccttcactaattaggaatattgtgacaattcattgctaataaaacataacatgagtctctttgtactgtttttaatttggcctgatgctaaaacctatcagcttagttttttaacatggtagtctaaacttcaaggcttgctctatctcctagagcaatttagagctaaaaccagtaataagcaaagttattggttataagcaaggtataagcagttaaagcaaagttattaattattaatatatgagaatttaaaattttataaataagttagaaattattaatgtattttaaatatggagtaaaatattttgctaatttttttcaatgataaagttgatcctttgtatatttccttattcaaataaattcagtcatcttcttatcaggttgcttatttatataatttgtttattttattaaaaatctagaatattaaagatttatacttttaatattgaatatagtttcgtagaaaaacattttatatgtactattcttaaagatcacaattatttttaaactttctattttcaaatacttgtgattaataaggcattctatgatgaaatagccatggcttatatatttttgtcttttcacatatgatgtgtttggaacccaaattttttactgattttattgtgttgttggtaactagtatttacagctaacctatctattcatattttacatatatatatatatatatacatgcacacacaccgatacatttaccttttaaaaaaatgatttataagtgaactgttaggctccagtgatttcagtgttttgttcatgttttattggaaatgcacgtggtttcttaggcttttaaacaaatacatggaatggttgaaagatttattttgctcgtgcttagctaaatatgtcatctctagaaaagatgtggtttgttttggcactgttttaaaaactcaaatattttaaacatttgttaagttggagcttgcacatttaaaccagcagcatacgttccagaagagcatctcaagttaccaaattttttgtaatccttttactagaaaaatcttttttgaagagtttttcttgtgcttgcttcggcagcatatatactgaaattagaaaaagaaaacttttcttttttattatatattttagtgtaagttaagttaaacttctaaaagttgaattatttaatgtaggacttcataaatagtatttgacaatgataaatgtgtatttttgagaatcattaaaatgtatacaatgatattcctttgcagaagtcttaatatgcataatttttaatctaattgtcttctaaatatagttttggtgtatgctggtattttagaagccaccaatttctggactatctgattattaacaaagatgtattttaatgcacaaactcaaatgtttaaaatatatatttactttgtactcaaataaaatcccctattgcaaatcct

SEQ ID NO: 154173 - DNA, 2282 bp, Homo sapiens
  Payload ID: 10296
  Gene Symbol: MIPOL1
  Gene Name: mirror-image polydactyly 1
  ENST ID: ENST00000556451
  CDS Start-End: 622-1896
ggtggctgcgcactcggcctgagaaactcggcaagcgcgcagtgtcgactccccggtctatgccaggcgcatctcagataccagcattgccaccggtgggtagaacactaagtgggctcttggagtccctgattccagaacttgactcttggatgacatttctggacctgctctgggccagagaggagaccacttcccttaagggaacgaggtctcactatattgcccagactggtctcgaactcctgggctcaaacagtccccctgcgttggcctcccaaagtgatggaattacaggtgtgaatcactgcatctgactatggcaaggatctctgtcactgagctaatccaaaagtaaatgagaaacttagaaaaagattgccaattccaaatcaacatatttagagaaaattggaaaaggagaagcttactacagctttatttgaggactttttaaagaacgctgggttctatctgtgagctgcaaatcttggagcaaaaaccagagacattgccagagcaaacaagaacagaaatacaaatggagaactggtcaaaagttatcttgaacaagaaactacggggataaataaaagtacgcagccagatgagcaactgactatgaattctgagaaaagtatgcatcggaaatccactgaattagttaatgaaataacatgtgagaacacagaatggccagggcagagatcaacgaattttcagatcatcagttcttatccagatgatgagtctgtttactgcactactgaaaaatacaacgttatggaacatagacataatgatatgcattatgaatgtatgactccttgtcaagttacttcagactcagataaagagaagacaatagcatttcttctaaaagaattggatattctcagaacaagcaataaaaagcttcagcagaaattggctaaagaagataaagaacagagaaaactaaagtttaagctggaactccaagagaaagaaacagaagctaaaattgctgaaaagacagcagctctggttgaagaagtgtattttgcgcagaaggaacgtgatgaagctgttatgtctagactgcaattagccattgaggagagagatgaagcaattgcacgagccaagcatatggaaatgtctctaaaagtgctagaaaatattaaccctgaagaaaatgacatgacattacaggaattactgaacagaataaacaatgcagacacagggatagctattcagaagaatggagctataattgtggatagaatctacaagaccaaggaatgtaaaatgagaataactgcagaagaaatgagtgcactaatagaagaacgggatgctgccttgtctaagtgcaaacggttagagcaggagcttcatcatgtgaaagagcagaaccagacttcagcaaacaacatgagacatctgactgctgaaaacaatcaagaacgtgctctgaaggcaaagttgttatctatgcaacaagccagagaaactgcagttcaacagtacaaaaaactggaagaggaaatccagacccttcgagtttactacagtttacacaaatctttatctcaagaagaaaatctgaaggatcagtttaactatacccttagtacatatgaagaagctttaaaaaacagagagaacattgtttccatcactcaacaacaaaatgaggaactggctactcaactgcaacaagctctgacagagcgagcaaatatggaattacaacttcaacatgccagagaggcctcccaagtggccaatgaaaaagttcaaaaatctcaaatacaaatctatttcattccaaataaaaaagatgaaagagaaaaattcctaatggataaaagaagaaagattgttgcacattcaaaacagaattcttgatagatacaaaatcatccaataaacttcagctagttttcagcattatatgcagttgatttgtccattcctcagtggaacttccaaatcatctaaaccagctttgtatgacactaagaataccctcattccttcagtgtctagctctgtgctgtgtttatttgcagaggaccctcatgcatggatccatataaatgaggcaaactgtgaagcagactagactgtgccgcttaccgtaaagtctttgagagaggaagattgtgtatatgaaaactgctaggcatgatatttacttataaggaagatttctatgtgtataacatcaagcaagatttttggttgaggttttatgctttcagtaaagaaaataaaagaagaaaaccaattaa

SEQ ID NO: 154174 - DNA, 775 bp, Homo sapiens
  Payload ID: 10296
  Gene Symbol: MIPOL1
  Gene Name: mirror-image polydactyly 1
  ENST ID: ENST00000556753
  CDS Start-End: 391-775
atgccaggcgcatctcaggtaaacggttgggcagggaggtttgggcgacggagaatgatagtggtgggcacagatcagccctggagttttcggccgcagacttttccttggagaaggagaaggggccccgcggaatctgtacttagtgaatgctgaccccgcgtggccgggagtgatggggctctctcgaagctaatccaaaagtaaatgagaaacttagaaaaagattgccaattccaaatcaacatatttagagaaaattggaaaaggagaagcttactacagctttatttgaggactttttaaagaacgctgggttctatctgtgagctgcaaatcttggagcaaaaaccagagacattgccagagcaaacaagaacagaaatacaaatggagaactggtcaaaagacataacccacagttatcttgaacaagaaactacggggataaataaaagtacgcagccagatgagcaactgactatgaattctgagaaaagtatgcatcggaaatccactgaattagttaatgaaataacatgtgagaacacagaatggccagggcagagatcaacgaattttcagatcatcagttcttatccagatgatgagtctgtttactgcactactgaaaaatacaacgttatggaacatagacataatgatatgcattatgaatgtatgactccttgtcaagttacttcagactcagataaagagaagacaatagcatttcttctaaaagaattggatattctcagaacaagcaataaaa

SEQ ID NO: 154175 - DNA, 732 bp, Homo sapiens
  Payload ID: 10296
  Gene Symbol: MIPOL1
  Gene Name: mirror-image polydactyly 1
  ENST ID: ENST00000556615
  CDS Start-End: 421-732
ccctgcggcgcgccgccgccccgtaggccccacgcgccgccccgctcctccgccggatcgtctgtgggtgagtctcgagccaggaggctctgagccagtggcgattggctgacgcggtggctgcgcactcggcctgagaaactcggcaagcgcgcagtgtcgactccccggtctatgccaggcgcatctcagctaatccaaaagtaaatgagaaacttagaaaaagattgccaattccaaatcaacatatttagagaaaattggaaaaggagaagcttactacagctttatttgaggactttttaaagaacgctgggttctatctgtgagtttatttatctagagttggctttattttagctgcaaatcttggagcaaaaaccagagacattgccagagcaaacaagaacagaaatacaaatggagaactggtcaaaagacataacccacagttatcttgaacaagaaactacggggataaataaaagtacgcagccagatgagcaactgactatgaattctgagaaaagtatgcatcggaaatccactgaattagttaatgaaataacatgtgagaacacagaatggccagggcagagatcaacgaattttcagatcatcagttcttatccagatgatgagtctgtttactgcactactgaaaaatacaacgttatggaacatagacataatgatatgcattatgaatgtatgactccttgtcaagttact

SEQ ID NO: 154176 - DNA, 7434 bp, Homo sapiens
  Payload ID: 10296
  Gene Symbol: MIPOL1
  Gene Name: mirror-image polydactyly 1
  ENST ID: ENST00000555870
  CDS Start-End: 435-977
gcactcggcctgagaaactcggcaagcgcgcagtgtcgactccccggtctatgccaggcgcatctcagctaatccaaaagtaaatgagaaacttagaaaaagattgccaattccaaatcaacatatttagagaaaattggaaaaggagaagcttactacagctttatttgaggactttttaaagaacgctgggttctatctgtgagctgcaaatcttggagcaaaaaccagagacattgccagagcaaacaagaacagaaatacaaatggagaactggtcaaaagtttgctacttcgcatatccctacttgaccttttttggagcaaatgcctttgtgaagtcttcctagagtcttccagacataacccacagttatcttgaacaagaaactacggggataaataaaagtacgcagccagatgagcaactgactatgaattctgagaaaagtatgcatcggaaatccactgaattagttaatgaaataacatgtgagaacacagaatggccagggcagagatcaacgaattttcagatcatcagttcttatccagatgatgagtctgtttactgcactactgaaaaatacaacgttatggaacatagacataatgatatgcattatgaatgtatgactccttgtcaagttacttcagactcagataaagagaagacaatagcatttcttctaaaagaattggatattctcagaacaagcaataaaaagcttcagcagaaattggctaaagaagataaagaacagagaaaactaaagtttaagctggaactccaagagaaagaaacagaagctaaaattgctgaaaagacagcaggcaaagttgttatctatgcaacaagccagagaaactgcagttcaacagtacaaaaaactggaagaggaaatccagacccttcgagtttactacagtttacacaaatctttatctcaagaagaaaatctgaaggatcagtttaactatacccttagtacatatgaagaagctttaaaaaacagagagaacattgtttccatcactcaacaacaaaatgaggaactggctactcaactgcaacaagctctgacagagcgagcaaatatggaattacaacttcaacatgccagagaggcctcccaagtggccaatgaaaaagttcaaaaatctcatcaactatcatcatcatttcatttaaaaaaacaatttttatacaccaagaagtagaaataatatcatctcagataatgttttaaattaaataactttactgaatggccaagataaccaaataggaacagctctagtctgcagctcccagtgttgatcgacacagaagatgggtgatttctgtatttccacctgagatacctggttcatctcgttgggactggttggacagtgcatgcagcccaccgagggtgagccaaagcagggcagggtgtcacctcacctgggaagcacaaggtgtcgggggatttctttttcctagccaagggaagccgtgacagactgtacctggaaaatcggtacactcccacccaaatactgtgcttttcccacagtcttaccaacctgcagaccaggagattctctctcatgcctggcttggtgggtcccacgcccatggagcatggctcactgctagcatggcagtctgagatccacctgtgaggctgcagcctggcagggggaggggcgtctgccattgctgaggcttgaaggtaaacagagtggctgggcagctcaaactgggtggagcccaccgcagctcagcaaggcctactgcctctatggactccatctctgagggcaggacatagctgaacaaaaggcagcagacaacttctgcagacttaaacgtccctgtctgacagctctgaagagggaagtggttatctcagcatggcatttgagctctgagaagggacagactgcctcctcaagtgggtccctgacacccctgtagtctaactgggagacacctcccagtaggggccgacagacacctcatacaagcgagtgcccctctaggacgaagcttccagaggaaggatcaggcagcaatatttgctcttctgcaatatgtgcagttctacagcctctgctggtgatacccaggcaaacagggtttgggtggacctccagcaaactccaacagacctgcagctgagggaccagagtgttagaataaaaactaacaaacagaaaggaatagcatcaacatcagcaaaaagcacatccacaccaaaacctcatctgtaggtcaccaacatcaaagaccaaaggtagataaaaccatgaagatgggaagaaaccagagcagaaaatctgaaaattctaaaaaccagagcacctcttctgtgccaaaggctcacagctcctcaccagcaatggaacaaagctagatgcagaatgactttgatgagttggcagaagtaggcttcagaaggtcggtaataacaaaattctctgagctaaaggagcatgttcaaacccattacaaggaagctaaaaaccttgaaaaaaggttacatgaatggctaactagaataaacagtgtagagaagaccttaaatgacctgatggagatgaaaaccatggcaggagaacttcatgatgcatgcacaagcttcaataggcgatgcaatcaagtgcaagaaaggatatcagtgattgaagatcaaattaatgaaataaagtgagaaggcaagattagagaaaagtaaaaagaaacaaacaaagcctccaagaaatatgggattacgtgaaaagaccaaatcttgattggtgtacctgaaagtgacggggagaatgaaaccaagttggagaacactcttcaggatattatccaggagaaattcccccacctagcaaggcaggccaacattcaaattcaggaaatatacagaacatcacaaagatactccttgagaagagcaaacccatgaaacataattgtcaaattcaccaaggttgaaatgaaggaaaaaatgttaagggtagccaggaaggtcgggttacccagaaagggaagctgactaacagtggatttctcggcagaaaccctacaagccagaagagagtaggggccaatattcaacattcttaaagaaaagaattttcaacccagaatttcatatccagccaaactaagctccataagtgaaggagaaataaaatcctttacagacaagcaaatgttgagagattttgtcaccaccaggcctgccttacaagagctcctgaaggaagcactaaacatggaaaggaacaattggaacaagccactgcaaaaaacatgccaaattgtaaagaccatcgatgctaggaaaaaactgcatcaatttacgggcaaaataaccagctaacatcataacgacaggttcaaattcactcataacaatattaaccttaaatggaaatgggctaaatgccccaattaaaagacacagactggcaaattggataaagagtcaagacccatcagtgtgctgtattcagaagacccatcttacatgcagaggcacaaataggcttaaaatatagggatggaggaagatctaccaagcaaatggaaaacaaaaaaagcagggtttgcagtcctagtctctgataaaacagactttaaaccaacaaagatcaaaagagacaaagaaggccattacataatggtaaagggatcacttcaacaagaagagctaactatcctaaatatatatgcacccaatacaggagcacccagattcataaaacaagtccatggagacctacaaagagacttagactcccacacagtgataatgggagactttaacaccccactgtcaatattagacagatcaacgagagaggaggttaacaaagatatccaggacttgaactcagctcggcaccaagcagacctaatagacatctacagaactctccaccccaaatcaacagaatatactttcttctcagcaccacatcacacttattctaaaactgaccacataattggaagtaaagcactcctcagcaaatgtaaaagaatagaaatcacaaaaaactgtctctcagaccacagtgcaatcaaattagaactcaggattaagaaactcactcaaaactgaacaactacgtggaaactgaacaatcagctcctgaatgactactgggtaaataacgaaatgaaggcagaaataaagatgttctttgaaaccaatgagaacaaagacacaacataccagaatctctgggacacaattaaagcagtgttaagagggaaatttatagcactaaatgcccacaagagaaagcaagaaagatctaaaattgacaccctaccatcacaattaaaagaactgagaagcaagagcaaacaaattcaaaagctagcacaaggtaagaaataactaagatcagagcagaactgaagaagatggagacgcaaaaaacccttcaaaaaatcaatgaatccaggagctggttttttgaaaagatcaacaaaattgatagactgctagccagactaataaagaagagagagaagaatcaaatagacacaataaaaaatgacaaaggggatatcaccaccaatcccacagaaatacaaactaccatcagataatactataaacacctctacacaaataaactagaaaatctagaagaaatggataaattcctggacacatacaccctcccaagactaacccaggaggaagttgatcctctaaatagaccaataacaggctctgaaattgaggcaataattaatagcctaccaccaaaaaaagtccagaaccagacagattcacagctgaattctaccaaaggtacaaagaggagctggtaccatcccttctgaaactattccagtcaatagaaaaaggaggaatcctccctaactcatttcatgaggccagcatcatcctaataccaaagcctgtcagagacacaacaacaaaaaagataattttagaccaatatccctggtgaacatcgctgtgaaaatcctcaataaaatactggcaacccaaatccagcagcacatcaaaaagcttatccaccatgatcaagtcagcttcatccctgggatgcaagcctggttcaacatatgcacatcaataaacgtaatccatcacataaaaagaaccaatgacaaaaaccacatgattatctcattagatgcagaaaaggcctttgacaaaattcaacagcctttatgctaaaaactttatgcaataaactggatattgatggaacatatctcaaagtaataagagctatttatgacaaacccacagccaatatcatactgaatgggcaaaaactggaagcattccctttgaagactggcacaagacaaggatgttctctctcaccactcctattcaacatagtattggaagttctggccaggaatcaggcaagagaaagaaataaagggtattcaattaagaaaagaggaagtcaaattgtccctgtttgcatatgacatgattgtatatttagaaaaccccattgtctcagcccaaaacctctttaagatgataagcaacttcagcaaagtctcaggatataaaatcaatgtgcaaaaatcacaggcattcctatacaccaaaaacagacaaacagccaaatcatgagggaattcccattcacaattgctacaaagagaataaaatacctgtgaatccaacttacaagggatgtgaaggaccccttcaaagagagctacaaaccactgctcaatgaaataaatgaggacacagacaaatagaagtacattccatgctcacggataggaataatcaatatcgtgaaaatggccatactgcctaaggtaatttatagattcagtgccattcccatcaagctaccaataactttcttcacagaattggaaaaaactactttaaagttcatatggaaccaaaaaagagcccatagccaagacaatcctaagcaaaaacaacaaagctggagacatcatgctacctgacttcaaacaatagtgctaggctactataaccaaaacagcatggtactggtaccaaaacagaggtatagatcaatggaacagaacagagccctcagaaataacaccgcacatctacaaccatctgatctttgacaaacctgacaaaaacaagcaatggggaaaggattccctatttaataaatggtgctgggaaaactggctagccatatgaagaaaactaaaactggattcccttacaccttatacaaaaattaattcaagatgaattaaaaacttaaatgtaagacctaaaaccataaaaactctagaagaaaacctaggcaataccattcaggacgtaggcgtgggcaaagacttcatgactaaaacaccaaaagcaatggcaacaaaaaccaaaattgacaaatgggatctaattaaactaaagagcttctgcacagcaaaagaaactatcatcagagtgaacaggcaacctacagaatgggagaaaatttttgcaatctacccatctgacaatgggctaatatccagaatgtacataatttattggaacttaaacaattacaagaaaaaaacaaacatccccatcaaaaagtgggccaaggatatgaatagacccttctcaaaagaagatatttatgcagtcaacagacatatgaaaaaatgctcatcatcactggtcatcagagaaatgcaaatcagagccacaatgagataaccatctcatgccagttagaatggcgatcattaaaaagtcaataaacaacagaagctggagaggatgtggagaaataggaacgcttttacactgctggtgggagtgtaaattagttcaatcatggtggaagacagtgtgacgattcctcaaggatctagaactagaaataccatttgacccagccatcccattactggatatatacccaaagcattataaatcattttatgataaagatacatgcacacatatgcttattgcggcactattcacaataggaaacacttggaaccacccaagtgcccatcaatgatagactggattaagaaaatgtggcacatatacaccatggaatactatgcagccataaaaaagaatgagttcatgtactttgcagggagatcagtgaagctggaaaccatcattctcagctaactatcacaaggacagaaaaccaaacaccacatgctttcatttgtaggtgtgaatcaaactatgagaacacttggacacagggtagggaacatcacacaccgggacctctcagggactgggggtctgggagagggatagcattaagataaatacctaatgtaaatgacgagttgatgggtgcagcaaaccaatatggcacatgtatacctatgtagcaaacctgcacattgtgcacatgtaccctagaacctaaagtataataaaaattaataaataaagtaactttaactctgaaaaa

SEQ ID NO: 154177 - DNA, 2505 bp, Homo sapiens
  Payload ID: 10297
  Gene Symbol: MIS12
  Gene Name: MIS12 kinetochore complex component
  Uniprot ID: Q9H081
  ENST ID: ENST00000381165
  CDS Start-End: 554-1171
ctcgccgagatgacctgggcacctctgcgttgaatcggcaaatactgatcaagccgcatttattctgctctcaggaactctaagtctagcagagaagatgaggcggtagaagttcatcaatggcttggctggaggacaagcaaattgaggacattggcaacggagtgatcaaaatgatagatcatgaggcctaaaatgaataaggaaagaagagaagtggcagaggctgagaacagaaagagagggtggaggggctgtaaatcttgaagattagggtataatatgagtatatgggtaagaattggaagaattgtgtaggaggcagtagtcaaaaagtagaagcagtttggaagagtagttacaaatatcaagagccaggtggctaaaaggtggagctataggtcattgaagctcaagaaactgagtctctagggcattggttaagtcatctgtctagacttcaaagttgtctaggatgataattcagaagactgatctgtgccaaagtcacaggtttttcacgactgaaaacaacatagcaaaataagccaagatgtctgtggatccaatgacctacgaggcccagttctttggcttcacgccacaaacgtgcatgcttcggatctacattgcatttcaagactacctatttgaagtgatgcaggccgttgaacaggttattctgaagaagctggatggcatcccagactgtgacattagcccagtgcagattcgcaaatgcacagagaagtttctttgcttcatgaaaggacattttgataacctttttagcaaaatggagcaactgtttttgcagctgattttacgtattccctcaaacatcttgcttcctgaagataaatgtaaggagacaccttatagtgaggaagattttcagcatctccagaaagaaattgaacagttacaggagaagtacaagactgaattatgtactaagcaggcccttcttgcagaattagaagagcaaaaaattgttcaggccaaactcaaacagacgttgactttctttgatgagcttcataatgttggcagagatcatgggactagtgattttagggagagtttagtatccctggttcagaactccagaaaactacagaacattagagacaatgtggaaaaggaatcgaaacgactgaaaatatcttaattgctcagtagtcaaaaggaggagcctgtcaaaaagtagaatcataaggactgttcaaaccataaggactgttcaaatcataccagtgactgttcaaaccaaccatactttttattagatttgctttgtcaactctttcttgtattctgtgttttcctcttttttggtccactttgctgaggtatgaagtgtactactttgaactaggctgaagcatctgagtcttctaataagtgggaagggatccaacaaagaagccatgaccagttaaagatatttgcagagttacaccttggtcataagtcctttgtgaccttgattattttggcttactctttggatgagaccagacaagaaaaggattaaacgggtggctcctttaatattattattattgtttttgagacaaggtccctttctgtcacccaggttagagtagatttcagtggcacaatcttggctcactgcaacctctgtgtcctgggctcaagtgatcctcctgcctcagcctcccaagtagctaggaccacaggtgcgtgtcaccatgcttggctaatttttttgcagaaacgaggcctcactatattgtccaggctgagtggctcttttattaaccagtcattacactgcggaacagccaacatagagtacttgctctcgtcctgtgaattttctttcatgagggagtcaatatgtagtggaaagaagcatgtagcaaaaaagacaaccttgatctttaataaaaaagaagttggtttatttccaaaataaatcccctgacaaaaaacctggtgatgttaagcaattgactgtcttagagtccagcagaagaccttagacaaaaaaagcagaacccactggagtagaaaaggaagcatgtagcatatactcagtagtgaaatttaattttactgactgttaggtatctatgccaatttgttttcatacttcagttggttttggaatctgccttatacctaatatttatttattcacactcataagcatcaaatatttaatgccctcagtgggaaatttgtgtttaaactcaatggaatctaatatttctttatgtcgttagtccctgtaaaatgttaggtcacccaaggaaaggggagaaatagcaatggttgttcctaaggtattgcttgccctccatgtcttcctaaagagcagaacttggagtttctcctttatgtagagaagaagtaacttagggtgtatttgcaatgaaatattcatagatattgaaagcttgtgtttacatgaaatatgtttattatcaagaagtcctttttccaattctgtacattaaatatatgtgttttaaaggg

SEQ ID NO: 154178 - DNA, 945 bp, Homo sapiens
  Payload ID: 10297
  Gene Symbol: MIS12
  Gene Name: MIS12 kinetochore complex component
  ENST ID: ENST00000576570
  CDS Start-End: 873-945
ctctcttctccaccagccaacgtccgggaaaaacgagtaagtacaggttccttctgccaatccccgccggccacagctaactttcccgcccggcccctttctgtcataattgaggtgtccacaaccagccaatcaggaacgcgagagtatcccgcgtttgctttcgctcgccgaggcgcgtatcagtcggaattttggggagccaaccgcgccgtctgtccctggcaagccagcggcggtttaaaggaggtggcgggaagcctgtgtgtgcttcaaatcgtcaccctcatggtcgctccgagtctcgctctgttgcccaggctggggtgcagtggcacaatctcggctcaccgcaaccttcgcctctcgggttccagtgattctcctgcctcagcctcccgagtagctgggattgcaagtatccaccatcacgcctggatggcttggctggaggacaagcaaattgaggacattggcaacggagtgatcaaaatgatagatcatgaggcctaaaatgaataaggaaagaagagaagtggcagaggctgagaacagaaagagagggtggaggggctgtaaatcttgaagattagggtataatatgagtatatgggtaagaattggaagaattgtgtaggaggcagtagtcaaaaagtagaagcagtttggaagagtagttacaaatatcaagagccaggtggctaaaaggtggagctataggtcattgaagctcaagaaactgagtctctagggcattggttaagtcatctgtctagacttcaaagttgtctaggatgataattcagaagactgatctgtgccaaagtcacaggtttttcacgactgaaaacaacatagcaaaataagccaagatgtctgtggatccaatgacctacgaggcccagttctttggcttcacgccacaaacgtgcatgcttcggatct

SEQ ID NO: 154179 - DNA, 2204 bp, Homo sapiens
  Payload ID: 10297
  Gene Symbol: MIS12
  Gene Name: MIS12 kinetochore complex component
  Uniprot ID: Q9H081
  ENST ID: ENST00000573759
  CDS Start-End: 330-947
accagccaacgtccgggaaaaacgagtaagtacaggttccttctgccaatccccgccggccacagctaactttcccgcccggcccctttctgtcataattgaggtgtccacaaccagccaatcaggaacgcgagagtatcccgcgtttgctttcgctcgccgaggcgcgtatcagtcggaattttggggagccaaccgcgccgtctgtccctggcaagccagcggcggtttaaaggaggtggcgggaagcctgtgtgtgcttcaaatcgtcaccctcatggtcgctccggtttttcacgactgaaaacaacatagcaaaataagccaagatgtctgtggatccaatgacctacgaggcccagttctttggcttcacgccacaaacgtgcatgcttcggatctacattgcatttcaagactacctatttgaagtgatgcaggccgttgaacaggttattctgaagaagctggatggcatcccagactgtgacattagcccagtgcagattcgcaaatgcacagagaagtttctttgcttcatgaaaggacattttgataacctttttagcaaaatggagcaactgtttttgcagctgattttacgtattccctcaaacatcttgcttcctgaagataaatgtaaggagacaccttatagtgaggaagattttcagcatctccagaaagaaattgaacagttacaggagaagtacaagactgaattatgtactaagcaggcccttcttgcagaattagaagagcaaaaaattgttcaggccaaactcaaacagacgttgactttctttgatgagcttcataatgttggcagagatcatgggactagtgattttagggagagtttagtatccctggttcagaactccagaaaactacagaacattagagacaatgtggaaaaggaatcgaaacgactgaaaatatcttaattgctcagtagtcaaaaggaggagcctgtcaaaaagtagaatcataaggactgttcaaaccataaggactgttcaaatcataccagtgactgttcaaaccaaccatactttttattagatttgctttgtcaactctttcttgtattctgtgttttcctcttttttggtccactttgctgaggtatgaagtgtactactttgaactaggctgaagcatctgagtcttctaataagtgggaagggatccaacaaagaagccatgaccagttaaagatatttgcagagttacaccttggtcataagtcctttgtgaccttgattattttggcttactctttggatgagaccagacaagaaaaggattaaacgggtggctcctttaatattattattattgtttttgagacaaggtccctttctgtcacccaggttagagtagatttcagtggcacaatcttggctcactgcaacctctgtgtcctgggctcaagtgatcctcctgcctcagcctcccaagtagctaggaccacaggtgcgtgtcaccatgcttggctaatttttttgcagaaacgaggcctcactatattgtccaggctgagtggctcttttattaaccagtcattacactgcggaacagccaacatagagtacttgctctcgtcctgtgaattttctttcatgagggagtcaatatgtagtggaaagaagcatgtagcaaaaaagacaaccttgatctttaataaaaaagaagttggtttatttccaaaataaatcccctgacaaaaaacctggtgatgttaagcaattgactgtcttagagtccagcagaagaccttagacaaaaaaagcagaacccactggagtagaaaaggaagcatgtagcatatactcagtagtgaaatttaattttactgactgttaggtatctatgccaatttgttttcatacttcagttggttttggaatctgccttatacctaatatttatttattcacactcataagcatcaaatatttaatgccctcagtgggaaatttgtgtttaaactcaatggaatctaatatttctttatgtcgttagtccctgtaaaatgttaggtcacccaaggaaaggggagaaatagcaatggttgttcctaaggtattgcttgccctccatgtcttcctaaagagcagaacttggagtttctcctttatgtagagaagaagtaacttagggtgtatttgcaatgaaatattcatagatattgaaagctt

SEQ ID NO: 154180 - DNA, 551 bp, Homo sapiens
  Payload ID: 10297
  Gene Symbol: MIS12
  Gene Name: MIS12 kinetochore complex component
  ENST ID: ENST00000576988
  CDS Start-End: 177-551
aacgccaagcaaccgcaatccgtagagacctaaggaacgcacatccgccaatcacgagttgcgtcgccaccgcccccccccagcgccccatctccccaccctctcttctccaccagccaacgtccgggaaaaacgagtttttcacgactgaaaacaacatagcaaaataagccaagatgtctgtggatccaatgacctacgaggcccagttctttggcttcacgccacaaacgtgcatgcttcggatctacattgcatttcaagactacctatttgaagtgatgcaggccgttgaacaggttattctgaagaagctggatggcatcccagactgtgacattagcccagtgcagattcgcaaatgcacagagaagtttctttgcttcatgaaaggacattttgataacctttttagcaaaatggagcaactgtttttgcagctgattttacgtattccctcaaacatcttgcttcctgaagataaatgtaaggagacaccttatagtgaggaagattttcagcatctccagaaagaaattgaacagttacag

SEQ ID NO: 154181 - DNA, 2691 bp, Homo sapiens
  Payload ID: 10297
  Gene Symbol: MIS12
  Gene Name: MIS12 kinetochore complex component
  Uniprot ID: Q9H081
  ENST ID: ENST00000611091
  CDS Start-End: 746-1363
atctccccaccctctcttctccaccagccaacgtccgggaaaaacgagtaagtacaggttccttctgccaatccccgccggccacagctaactttcccgcccggcccctttctgtcataattgaggtgtccacaaccagccaatcaggaacgcgagagtatcccgcgtttgctttcgctcgccgaggcgcgtatcagtcggaattttggggagccaaccgcgccgtctgtccctggcaagccagcggcggtttaaaggaggtggcgggaagcctgtgtgtgcttcaaatcgtcaccctcatggtcgctccgatggcttggctggaggacaagcaaattgaggacattggcaacggagtgatcaaaatgatagatcatgaggcctaaaatgaataaggaaagaagagaagtggcagaggctgagaacagaaagagagggtggaggggctgtaaatcttgaagattagggtataatatgagtatatgggtaagaattggaagaattgtgtaggaggcagtagtcaaaaagtagaagcagtttggaagagtagttacaaatatcaagagccaggtggctaaaaggtggagctataggtcattgaagctcaagaaactgagtctctagggcattggttaagtcatctgtctagacttcaaagttgtctaggatgataattcagaagactgatctgtgccaaagtcacaggtttttcacgactgaaaacaacatagcaaaataagccaagatgtctgtggatccaatgacctacgaggcccagttctttggcttcacgccacaaacgtgcatgcttcggatctacattgcatttcaagactacctatttgaagtgatgcaggccgttgaacaggttattctgaagaagctggatggcatcccagactgtgacattagcccagtgcagattcgcaaatgcacagagaagtttctttgcttcatgaaaggacattttgataacctttttagcaaaatggagcaactgtttttgcagctgattttacgtattccctcaaacatcttgcttcctgaagataaatgtaaggagacaccttatagtgaggaagattttcagcatctccagaaagaaattgaacagttacaggagaagtacaagactgaattatgtactaagcaggcccttcttgcagaattagaagagcaaaaaattgttcaggccaaactcaaacagacgttgactttctttgatgagcttcataatgttggcagagatcatgggactagtgattttagggagagtttagtatccctggttcagaactccagaaaactacagaacattagagacaatgtggaaaaggaatcgaaacgactgaaaatatcttaattgctcagtagtcaaaaggaggagcctgtcaaaaagtagaatcataaggactgttcaaaccataaggactgttcaaatcataccagtgactgttcaaaccaaccatactttttattagatttgctttgtcaactctttcttgtattctgtgttttcctcttttttggtccactttgctgaggtatgaagtgtactactttgaactaggctgaagcatctgagtcttctaataagtgggaagggatccaacaaagaagccatgaccagttaaagatatttgcagagttacaccttggtcataagtcctttgtgaccttgattattttggcttactctttggatgagaccagacaagaaaaggattaaacgggtggctcctttaatattattattattgtttttgagacaaggtccctttctgtcacccaggttagagtagatttcagtggcacaatcttggctcactgcaacctctgtgtcctgggctcaagtgatcctcctgcctcagcctcccaagtagctaggaccacaggtgcgtgtcaccatgcttggctaatttttttgcagaaacgaggcctcactatattgtccaggctgagtggctcttttattaaccagtcattacactgcggaacagccaacatagagtacttgctctcgtcctgtgaattttctttcatgagggagtcaatatgtagtggaaagaagcatgtagcaaaaaagacaaccttgatctttaataaaaaagaagttggtttatttccaaaataaatcccctgacaaaaaacctggtgatgttaagcaattgactgtcttagagtccagcagaagaccttagacaaaaaaagcagaacccactggagtagaaaaggaagcatgtagcatatactcagtagtgaaatttaattttactgactgttaggtatctatgccaatttgttttcatacttcagttggttttggaatctgccttatacctaatatttatttattcacactcataagcatcaaatatttaatgccctcagtgggaaatttgtgtttaaactcaatggaatctaatatttctttatgtcgttagtccctgtaaaatgttaggtcacccaaggaaaggggagaaatagcaatggttgttcctaaggtattgcttgccctccatgtcttcctaaagagcagaacttggagtttctcctttatgtagagaagaagtaacttagggtgtatttgcaatgaaatattcatagatattgaaagcttgtgtttacatgaaatatgtttattatcaagaagtcctttttccaattctgtacattaaatatatgtgtttt

SEQ ID NO: 154182 - DNA, 4777 bp, Homo sapiens
  Payload ID: 10298
  Gene Symbol: MIS18BP1
  Gene Name: MIS18 binding protein 1
  Uniprot ID: Q6P0N0
  ENST ID: ENST00000310806
  CDS Start-End: 460-3858
caactagaggagctcgccccctgcctgtgacagcttagggtcgcctactttttgtggacacactgccgtccacggagtgcagaggccgcctgcagttttcttgcgtccctgtgagacgcacggtggcgcaattcccgagcgtgccaatcccgggctggctggagggcgggctcttcaaatttgaattgcggaagtgttttgtgtgttagagaacgtcgcggaggaggtaagcgtcgcttggcgcctggccgccgcgggcaggatacaccgtgggcctgaggcgcgagcccggcggcgtgcggccctctctccgcgcggagccgagccggaactgcggcagtctctccctgccaggctcttcatccaaggtttctgtggatcccttctgaagttctatctgaaaattgcgcttaagtgaattttctgttagaagaacttggttgctactttcttgtcaagatgattgcaacacctttgaaacattcaagaatttacttacctccagaggcatcttctcaaaggagaaatctacccatggatgcaatcttttttgacagcattccttcaggcacacttactcctgtaaaagatttggtgaaatatcagaactcctccttaaaattgaatgaccataaaaagaatcagttcctaaaaatgacaacttttaacaataaaaatatatttcaatcaactatgctaacagaggctactacctctaacagttctcttgatatcagtgctataaagcccaacaaggatggattaaaaaataaagcaaactatgaatcaccaggaaaaatatttctaagaatgaaagaaaaagtactgcgtgacaagcaagaacagccatcaagaaacagtagtttgttggaaccacagaaaagtggaaataatgaaaccttcactcctaacagagttgaaaaaaaaaaattgcagcatacctacctatgtgaagaaaaggaaaacaacaaatcattccagtcagatgacagttcactaagagcctcagtccaaggagttcctctagaatcatcaaataatgatattttcctcccggtcaaacaaaagattcagtgccagcaggaaaagaaagcaccactgcacaatttaacttacgaacttccaactctgaaccaagaacaggaaaattttttggctgtagaagcccgaaacaagacattaactagagctcagttggctaaacaaatttttcactcaaaggagagtatagttgcaaccactaaatccaaaaaggacacgtttgttttagaaagcgttgattctgctgatgaacaatttcaaaatactaatgctgagactctcagtactaattgtattcctattaaaaatggcagcctgttaatggtttctgatagtgagaggacaacagaagggacttcgcaacagaaagttaaggaaggaaatggaaaaacagtgcctggagagacaggtcttccaggttccatgaaagatacatgtaaaattgtacttgcaacaccaagacttcatataacaatacctcggaggtcaaaaagaaatatttcaaagctttctcctccaagaatatttcaaactgttacaaatggacttaaaaaaaatcaggtagttcagctacaggaatggatgattaaaagcatcaataataatactgctatatgtgtagaaggaaaattgatagacgtcactaacatatattggcacagtaatgtaattatagagcggattgagcacaacaaacttaggactatatcaggcaacgtttatatattaaaaggcatgatagaccaaatttccatgaaagaagcaggatatccaaattatctcataaggaaatttatgtttggatttccagaaaattggaaagagcacattgataattttctggaacaattaagggctggtgaaaagaacagggaaaagaccaaacaaaaacagaaaactggaagatctgtccgtgacataaggaaatcaatgaaaaatgatgcacgagaaaaccaaacagatactgctcaaagagccaccaccacttacgattttgattgtgataatttggaactgaagagtaataagcacagtgagtcaccaggagctacagaattaaacatgtgccacagtaattgccaaaataaaccaacattaaggttcccagatgaccaagtaaataatactattcaaaatggaggaggagatgacttatctaatcaggaattaattggaaaaaaagaatataaaatgtcttcaaagaaactaaaaattggtgaaagaacaaatgaaaggataataaaaagtcagaagcaagagacaactgaagaattggatgtatccattgatattctaacctcaagggaacagtttttctcagatgaagaaagaaaatacatggccatcaatcagaagaaagcttatattttagtaacaccacttaaatctagaaaagtgatagagcaaagatgcatgaggtataatctgtccgctggcaccatcaaagcagtaacagattttgtaataccagagtgtcaaaaaaaaagtcccatcagcaagtccatggggactttagaaaatacatttgaaggtcataaaagtaaaaacaaggaagattgcgatgaacgtgacttacttactgtcaaccggaaaataaaaatatctaaccttgaaaaggaacaaatgctcacctctgactttaagaaaaataccagactattaccaaaattgaagaaaatagaaaatcaggtagctatgtcattttataagcatcagtcctcaccagatttgtcaagtgaagaaagtgaaacagaaaaggaaattaaaaggaaagctgaagttaagaaaaccaaagcaggaaacaccaaagaagcagtggttcacctgagaaagagcacaagaaacacaagtaatattccagtgattttggaacctgaaactgaagaaagtgaaaatgaattttatatcaaacaaaagaaagctagaccttccgtcaaagaaactcttcagaagtctggtgttaggaaagagtttccaattactgaggcagtaggatctgataagacaaataggcatcccttagaatgcttacctggtttaattcaggataaggaatggaatgagaaggagttacagaaacttcattgtgcttttgcatctcttccaaagcacaaacctggtttctggtcagaggtagctgcggctgtaggttctcgatctcctgaagaatgccagaggaaatacatggaaaatcccagaggaaaaggatcccagaaacatgtcactaagaagaagccagccaattccaaaggccaaaatggcaagagaggtgatgctgatcagaaacaaactattaagataactgccaaagtgggaactcttaaaaggaagcaacagatgagggaatttctggaacagttgccaaaagatgaccatgatgattttttcagtacaacacctttacagcatcaaagaatactgttgccaagtttccaggacagtgaagatgatgatgatattctgccaaatatggacaaaaatccaacaactccatcatcagttatctttccattggtaaaaactcctcaatgtcagcatgtcagtcctggcatgctaggttctataaataggaatgactgtgataaatatgtttttcgtatgcaaaaatatcataaaagtaatggtggtattgtctggggcaacatcaagaaaaaattagttgaaactgatttctcaactccaacaccaagaaggaaaaccccatttaacacagacttaggagaaaactctggtattggaaaacttttcactaatgctgtggaatctttagatgaagaagagaaagattattatttttcgaactctgattctgcatagtaaaatgagaaaatatgattcctgggatttttaccataaagcagacagtgtttgtattttcaactggagtacatgtattttctttgtaaagtagcttcctatgaaaatgtggacttttttgaaggtttcatatgtttgtgttcaaagtaaaatatcctcattgctgcagcttactaaaaatgtaaagaaaattgtttttgctcgtgtagatatctgtaaatttgtttttgcatattaaaatatatatagataattttttaataagcatccaagtctgtttactttaagaaaaccatttcccaaacagatttttttttatttcaagaaaattttgctaccatttaagtaagagaaggtgagaaggatgacagaggttgtattggtagctattgaattcatgaaaacttttaagttagcatttgttagcagttattatccaagccagagtaggatttgttaccagttgttatccaaacctaatgtttaaattacacattgttgaaattaaattacacattgttgacatgcttctctcctgattgtttttattttaaacttgtgataggcatatctatgaaacctttgtaaatttagtttattgctttaccattattttactaggtaaaattagagaacagattttgttctctaatttttaagccttatttacatatgcagaaacagcttaaatattttgactagattagacaaacagttaatagatccaccattaggaatcaatatattatgtcataataaacatcctttttctttcactgaaatttcttttagaaataaacttatttttgcttgttatgttttgaaacttgacataggatattttccctctggctacacattcacctacccttgttctctatttagattattcaaataaagttagtttgcttttatagta

SEQ ID NO: 154183 - DNA, 808 bp, Homo sapiens
  Payload ID: 10298
  Gene Symbol: MIS18BP1
  Gene Name: MIS18 binding protein 1
  ENST ID: ENST00000451174
  CDS Start-End: 343-808
ggtaagcgtcgcttggcgcctggccgccgcgggcaggatacaccgtgggcctgaggcgcgagcccggcggcgtgcggccctctctccgcgcggagccgagccggaactgcggcagtctctccctgccaggctcttcatccaaggggcagggacattaggaaacagaaagctctgttttggttcttggagcctttcaacgtgaccacaattatctgactttaaatgaagacagttctgcatgtccattacaggtttctgtggatcccttctgaagttctatctgaaaattgcgcttaagtgaattttctgttagaagaacttggttgctactttcttgtcaagatgattgcaacacctttgaaacattcaagaatttacttacctccagaggcatcttctcaaaggagaaatctacccatggatgcaatcttttttgacagcattccttcaggcacacttactcctgtaaaagatttggtgaaatatcagaactcctccttaaaattgaatgaccataaaaagaatcagttcctaaaaatgacaacttttaacaataaaaatatatttcaatcaactatgctaacagaggctactacctctaacagttctcttgatatcagtgctataaagcccaacaaggatggattaaaaaataaagcaaactatgaatcaccaggaaaaatatttctaagaatgaaagaaaaagtactgcgtgacaagcaagaacagccatcaagaaacagtagtttgttggaaccacagaaaagtggaaataatgaaaccttcactcctaacagagttgaaaaaa

SEQ ID NO: 154184 - DNA, 2131 bp, Homo sapiens
  Payload ID: 10298
  Gene Symbol: MIS18BP1
  Gene Name: MIS18 binding protein 1
  ENST ID: ENST00000454990
  CDS Start-End: 256-1746
gttagagaacgtcgcggaggaggtaagcgtcgcttggcgcctggccgccgcgggcaggatacaccgtgggcctgaggcgcgagcccggcggcgtgcggccctctctccgcgcggagccgagccggaactgcggcagtctctccctgccaggctcttcatccaaggtttctgtggatcccttctgaagttctatctgaaaattgcgcttaagtgaattttctgttagaagaacttggttgctactttcttgtcaagatgattgcaacacctttgaaacattcaagaatttacttacctccagaggcatcttctcaaaggagaaatctacccatggatgcaatcttttttgacagcattccttcaggcacacttactcctgtaaaagatttggtgaaatatcagaactcctccttaaaattgaatgaccataaaaagaatcagttcctaaaaatgacaacttttaacaataaaaatatatttcaatcaactatgctaacagaggctactacctctaacagttctcttgatatcagtgctataaagcccaacaaggatggattaaaaaataaagcaaactatgaatcaccaggaaaaatatttctaagaatgaaagaaaaagtactgcgtgacaagcaagaacagccatcaagaaacagtagtttgttggaaccacagaaaagtggaaataatgaaaccttcactcctaacagagttgaaaaaaaaaaattgcagcatacctacctatgtgaagaaaaggaaaacaacaaatcattccagtcagatgacagttcactaagagcctcagtccaaggagttcctctagaatcatcaaataatgatattttcctcccggtcaaacaaaagattcagtgccagcaggaaaagaaagcaccactgcacaatttaacttacgaacttccaactctgaaccaagaacaggaaaattttttggctgtagaagcccgaaacaagacattaactagagctcagttggctaaacaaatttttcactcaaaggagagtatagttgcaaccactaaatccaaaaaggacacgtttgttttagaaagcgttgattctgctgatgaacaatttcaaaatactaatgctgagactctcagtactaattgtattcctattaaaaatggcagcctgttaatggtttctgatagtgagaggacaacagaagggacttcgcaacagaaagttaaggaaggaaatggaaaaacagtgcctggagagacaggtcttccaggttccatgaaagatacatgtaaaattgtacttgcaacaccaagacttcatataacaatacctcggaggtcaaaaagaaatatttcaaagctttctcctccaagaatatttcaaactgttacaaatggacttaaaaaaaatcaggtagttcagctacaggaatggatgattaaaagcatcaataataatactgctatatgtgtagaaggaaaattgatagacgtcactaacatatattggcacagtaatgtaattatagagcggattgagcacaacaaacttaggactatatcaggcaacgtttatatattaaaaggcatgatagaccaaatttccatgaaagaagcaggatatccaaattatctcataaggaaatttatgtttggatttccagaaaattggaaagagcacattgataattttctggaacaattaagagatggggtttcgtcatgttggccagactggtctcgaactcctggctacaagtgatccgcctgtctcagcctcccaaagtgttgggattacaggcatgagccactgtgcctggcctgagggctggtgaaaagaacagggaaaagaccaaacaaaaacagaaaactggaagatctgtccgtgacataaggaaatcaatgaaaaatgatgcacgagaaaaccaaacagatactgctcaaagagccaccaccacttacgattttgattgtgataatttggaactgaagagtaataagcacagtgagtcaccaggagctacagaattaaacatgtgccacagtaattgccaaaataaaccaacattaaggttcccagatgaccaagtaaataatactattcaaaatggaggaggagatgacttatctaatcaggaattaattgg

SEQ ID NO: 154185 - DNA, 898 bp, Homo sapiens
  Payload ID: 10298
  Gene Symbol: MIS18BP1
  Gene Name: MIS18 binding protein 1
  ENST ID: ENST00000453142
  CDS Start-End: 1-588
gctgtagaagcccgaaacaagacattaactagagctcagttggctaaacaaatttttcactcaaaggagagtatagttgcaaccactaaatccaaaaaggacacgtttgttttagaaagcgttgattctgctgatgaacaatttcaaaatactaatgctgagactctcagtactaattgtattcctattaaaaatggcagcctgttaatggtttctgatagtgagaggacaacagaagggacttcgcaacagaaagttaaggaaggaaatggaaaaacagtgcctggagagacaggtcttccaggttccatgaaagatacatgtaaaattgtacttgcaacaccaagacttcatataacaatacctcggaggtcaaaaagaaatatttcaaagctttctcctccaagaatatttcaaactgttacaaatggacttaaaaaaaatcaggtagttcagctacaggaatggatgattaaaagcatcaataataatactgctatatgtgtagaaggaaaattgatgatatccaaattatctcataaggaaatttatgtttggatttccagaaaattggaaagagcacattgataattttctggaacaattaagagatggggtttcgtcatgttggccagactggtctcgaactcctggctacaagtgatccgcctgtctcagcctcccaaagtgttgggattacaggcatgagccactgtgcctggcctgagggctggtgaaaagaacagggaaaagaccaaacaaaaacagaaaactggaagatctgtccgtgacataaggaaatcaatgaaaaatgatgcacgagaaaaccaaacagatactgctcaaagagccaccaccacttacgattttgattgtgataatttggaactgaagagta

SEQ ID NO: 154186 - DNA, 585 bp, Homo sapiens
  Payload ID: 10298
  Gene Symbol: MIS18BP1
  Gene Name: MIS18 binding protein 1
  ENST ID: ENST00000554093
  CDS Start-End: 1-235
tgaagaaagtgaaaatgaattttatatcaaacaaaagaaagctagaccttccgtcaaagaaactcttcagaagtctggtgttaggaaagagtttccaattactgaggcagtaggatctgataagacaaataggcatcccttagaatgcttacctggtttaattcaggataaggaatggaatgagaaggagttacagaaacttcattgcacaaacctggtttctggtcagaggtagctgcggctgtaggttctcgatctcctgaagaatgccagaggaaatacatggaaaatcccagaggaaaaggatcccagaaacatgtcactaagaagaagccagccaattccaaaggccaaaatggcaagagaggtgatgctgatcagaaacaaactattaagataactgccaaagtgggaactcttaaaaggaagcaacagatgagggaatttctggaacagttgccaaaagatgaccatgatgattttttcagtacaacacctttacagcatcaaagaatactgttgccaagtttccaggacagtgaagatgatgatgatattctgccaaatatggacaaaaatccaaca

SEQ ID NO: 154187 - DNA, 1950 bp, Homo sapiens
  Payload ID: 10298
  Gene Symbol: MIS18BP1
  Gene Name: MIS18 binding protein 1
  ENST ID: ENST00000627697
  CDS Start-End: 460-1950
caactagaggagctcgccccctgcctgtgacagcttagggtcgcctactttttgtggacacactgccgtccacggagtgcagaggccgcctgcagttttcttgcgtccctgtgagacgcacggtggcgcaattcccgagcgtgccaatcccgggctggctggagggcgggctcttcaaatttgaattgcggaagtgttttgtgtgttagagaacgtcgcggaggaggtaagcgtcgcttggcgcctggccgccgcgggcaggatacaccgtgggcctgaggcgcgagcccggcggcgtgcggccctctctccgcgcggagccgagccggaactgcggcagtctctccctgccaggctcttcatccaaggtttctgtggatcccttctgaagttctatctgaaaattgcgcttaagtgaattttctgttagaagaacttggttgctactttcttgtcaagatgattgcaacacctttgaaacattcaagaatttacttacctccagaggcatcttctcaaaggagaaatctacccatggatgcaatcttttttgacagcattccttcaggcacacttactcctgtaaaagatttggtgaaatatcagaactcctccttaaaattgaatgaccataaaaagaatcagttcctaaaaatgacaacttttaacaataaaaatatatttcaatcaactatgctaacagaggctactacctctaacagttctcttgatatcagtgctataaagcccaacaaggatggattaaaaaataaagcaaactatgaatcaccaggaaaaatatttctaagaatgaaagaaaaagtactgcgtgacaagcaagaacagccatcaagaaacagtagtttgttggaaccacagaaaagtggaaataatgaaaccttcactcctaacagagttgaaaaaaaaaaattgcagcatacctacctatgtgaagaaaaggaaaacaacaaatcattccagtcagatgacagttcactaagagcctcagtccaaggagttcctctagaatcatcaaataatgatattttcctcccggtcaaacaaaagattcagtgccagcaggaaaagaaagcaccactgcacaatttaacttacgaacttccaactctgaaccaagaacaggaaaattttttggctgtagaagcccgaaacaagacattaactagagctcagttggctaaacaaatttttcactcaaaggagagtatagttgcaaccactaaatccaaaaaggacacgtttgttttagaaagcgttgattctgctgatgaacaatttcaaaatactaatgctgagactctcagtactaattgtattcctattaaaaatggcagcctgttaatggtttctgatagtgagaggacaacagaagggacttcgcaacagaaagttaaggaaggaaatggaaaaacagtgcctggagagacaggtcttccaggttccatgaaagatacatgtaaaattgtacttgcaacaccaagacttcatataacaatacctcggaggtcaaaaagaaatatttcaaagctttctcctccaagaatatttcaaactgttacaaatggacttaaaaaaaatcaggtagttcagctacaggaatggatgattaaaagcatcaataataatactgctatatgtgtagaaggaaaattgatagacgtcactaacatatattggcacagtaatgtaattatagagcggattgagcacaacaaacttaggactatatcaggcaacgtttatatattaaaaggcatgatagaccaaatttccatgaaagaagcaggatatccaaattatctcataaggaaatttatgtttggatttccagaaaattggaaagagcacattgataattttctggaacaattaagagatggggtttcgtcatgttggccagactggtctcgaactcctggctacaagtga

SEQ ID NO: 154188 - DNA, 1575 bp, Homo sapiens
  Payload ID: 10299
  Gene Symbol: MIS18A
  Gene Name: MIS18 kinetochore protein A
  Uniprot ID: Q9NYP9
  ENST ID: ENST00000290130
  CDS Start-End: 56-757
agcagcggcggttttttttcccatggcgctctggggcgcgggcgatttgtaggtaatggcaggcgttcggtcactgaggtgtagcagaggatgcgctggcggctgtgagtgcggcgacaagggcaaatgcagcgactcctcgctgttgggcaagagactctccgaagactcgagccgccaccagctgttgcagaagtgggcgagcatgtggagctccatgagcgaagacgcgtcggtggccgacatggagagggcgcagctggaggaggaggcggcggctgcggaggagaggccgctggtgttcctgtgctccggctgccggcggccgctgggcgactcgctgagctgggtggccagccaggaggacaccaactgcatcctgcttcgctgtgtttcctgtaatgtttctgtggataaggaacagaagctatccaaacgtgaaaaggaaaatggttgcgtccttgagactttgtgctgcgcggggtgctcactcaatcttggctacgtgtacagatgcacgcccaagaatcttgattacaagagagacttgttttgcctcagtgttgaagccattgaaagttatgttttagggtcctctgaaaagcaaattgtgtcagaagataaagagctttttaatcttgaaagcagagttgaaatagaaaagtctctaacacagatggaagatgtcttgaaagcattacaaatgaagctgtgggaggccgaatccaaattgtcctttgccacttgtaaaagctgaactctagtctgtgtcctccattctgcccccgcccttcctccccttatttgttaaatgaagcaacatagtgagacgtcgtctctacaaaaaaaaaaagaaaaaaaaaattagccaggcatgcgaaacgctgaggtgggaggatcagatgagcttgggaggttgaggctgcagtgagccttggtcatgccactactgtgttctagtctgggcaacagagtgagaccttctctcaaaaaaaaaacccaaaattgtagaattacttctatagctatattttatgataaagaagtgattgtttctcaaaatcgcattttaaagacgttttatggtacttgttggaattgggacttaggagttttgattttgataagaaactgggataattttctgaactttttttcctctgtatcacatttatttactatttttaaaaactttgacatttaacacttgggacaacatttattataaatgataagaaaaatcttagaggtttgtctacccacagtgtcatggaatcttctctgaaaactaatccataaagttccctggagaaattggtcagaatgatctgtcagaaccatttgaaaacttgctcaagagcagttgcttatatatagtaggattttactttttcctgcttatgtactactatatgcttaaaaaacctggaggaatacttaccaaagaggagtaaccatctctgagggtgggattctgggggaatttttgtttttttctgttttctataatgtgaaacttttgtagtatgtatttttctaattgaagagaataaagattaaaacaaagtgctttaa

SEQ ID NO: 154189 - DNA, 2431 bp, Homo sapiens
  Payload ID: 10300
  Gene Symbol: MSTO1
  Gene Name: misato 1, mitochondrial distribution and morphology regulator
  Uniprot ID: Q9BUK6
  ENST ID: ENST00000245564
  CDS Start-End: 25-1737
ggcggccccgtggagcagcgcagtatggcgggcggggcccgggaggtgctcacactgcagttgggacattttgccggtttcgtgggcgcgcactggtggaaccagcaggatgctgcgctgggccgagcgaccgattccaaggagcccccgggagagctgtgccccgacgtcctgtatcgtacgggccggacgctgcacggccaggagacctacacgccgcgactcatcctcatggatctgaagggtagtttgagctccctaaaagaggaaggtggactctacagggacaaacagttggatgctgcaatagcatggcaggggaagctcaccacacacaaagaggaactctatcccaagaacccttatctccaagactttctgagtgcagagggagtgctgagtagtgatggtgtctggagggtcaaatccattcccaatggcaaaggttcctcaccactccccaccgctacaactccaaaaccacttatccctacagaggccagcatcagggtctggtcagacttcctcagagtccatctccatccccggagcatctgtatgattcagaagtacaaccacgatggggaagcaggtcggctggaggcttttggccaaggggaaagtgtcctaaaggaacccaagtaccaggaagagctggaggacaggctgcatttctacgtggaggaatgtgactacttgcagggcttccagatcctgtgtgacctgcacgatggcttctctggggtaggcgcgaaggcggcagagctgctacaagatgaatattcagggcggggaataataacctggggcctgctacctggtccctaccatcgtggggaggcccagagaaacatctatcgtctattaaacacagcttttggtctcgtgcacctgactgctcacagctctcttgtctgccccttgtccttgggtgggagcctgggcctgcgacccgagccacctgtcagcttcccttacctgcattatgatgccactctgcccttccactgcagtgccatcctggctacagccctggacacagtcactgttccttatcgcctgtgttcctctccagtttccatggttcatctggctgacatgctgagcttctgtgggaaaaaggtggtgacagcaggagcaatcatccctttccccttggctccaggccagtcccttcctgattccctgatgcagtttggaggagccaccccatggaccccactgtctgcatgtggggagccttctggaacacgttgctttgcccagtcagtggtgctgaggggtatagacagagcatgccacacaagccagctcaccccagggacacctccaccctctgcccttcatgcatgtaccactggggaagaaatcttggctcagtatttacaacagcagcagcctggagtcatgagttcttcccatctgctgctgactccctgcagggtggctcctccttacccccacctcttctcaagctgcagtccaccgggtatggttctggatggttcccccaagggagcagcagtggagagcatcccagtgtttggggcactgtgttcctcttcgtccctgcaccagaccctggaagccttggccagagacctcaccaaactcgacttgcggcgctgggccagcttcatggatgctggagtggagcacgatgacgtagcagagctgctgcaggagctacaaagcctggcccagtgctaccagggtggtgacagcctcgtggactaaagttcccagtgtgggagaaaggagctagtttgcaataaaaacagctggatgcaggagcccagtgtcttcatgcagaggagctcaatgtcgcgggactagctacaccaacatatgcactttttacatttagaaacactgtgattagaccacagaacaataaatatgtgccatcagaccaaaaaaaagtagagaaaggagctgaactccactctcgatgctacttacagaggacatctgtaaagtcttcataaaagaccttgaatgatgcctaggatggcagagcccctgggtcctactccatcctccagcctttgtccttgtcctggcctcctgctctccagatctgtaaactgggctcaaggactgtacaagcagagtacaactacccgcctccccggtgccagggcgcctgttgggtttggtcctgtgtagatgattcccagagtctcattcatccagctcctcttcagacagaaggtccccatggtcagacagctggtctgcattgctggtactggttgcatcatcctcatcctcagagctggcttcacaggcagtgtggaagagctgcatgagttctcgaaaatggtgggaaacctaagaaaggaggagggctgtattcactgatccttagtaacatgttaacatttatgaagcactatatattgatttgcaaaatcttttgtttattcca

SEQ ID NO: 154190 - DNA, 2245 bp, Homo sapiens
  Payload ID: 10300
  Gene Symbol: MSTO1
  Gene Name: misato 1, mitochondrial distribution and morphology regulator
  Uniprot ID: Q9BUK6
  ENST ID: ENST00000368341
  CDS Start-End: 9-1583
agcgcagtatggcgggcggggcccgggaggtgctcacactgcagttgggacattttgccggtttcgtgggcgcgcactggtggaaccagcaggatgctgcgctgggccgagcgaccgattccaaggagcccccgggagagctgtgccccgacgtcctgtatcgtacgggccggacgctgcacggccaggagacctacacgccgcgactcatcctcatggatctgaagggtagtttgagctccctaaaagaggaaggtggactctacagggacaaacagttggatgctgcaatagcatggcaggggaagctcaccacacacaaaggttcctcaccactccccaccgctacaactccaaaaccacttatccctacagaggccagcatcagggtctggtcagacttcctcagagtccatctccatccccggagcatctgtatgattcagaagtacaaccacgatggggaagcaggtcggctggaggcttttggccaaggggaaagtgtcctaaaggaacccaagtaccaggaagagctggaggacaggctgcatttctacgtggaggaatgtgactacttgcagggcttccagatcctgtgtgacctgcacgatggcttctctggggtaggcgcgaaggcggcagagctgctacaagatgaatattcagggcggggaataataacctggggcctgctacctggtccctaccatcgtggggaggcccagagaaacatctatcgtctattaaacacagcttttggtctcgtgcacctgactgctcacagctctcttgtctgccccttgtccttgggtgggagcctgggcctgcgacccgagccacctgtcagcttcccttacctgcattatgatgccactctgcccttccactgcagtgccatcctggctacagccctggacacagtcactgttccttatcgcctgtgttcctctccagtttccatggttcatctggctgacatgctgagcttctgtgggaaaaaggtggtgacagcaggagcaatcatccctttccccttggctccaggccagtcccttcctgattccctgatgcagtttggaggagccaccccatggaccccactgtctgcatgtggggagccttctggaacacgttgctttgcccagtcagtggtgctgaggggtatagacagagcatgccacacaagccagctcaccccagggacacctccaccctctgcccttcatgcatgtaccactggggaagaaatcttggctcagtatttacaacagcagcagcctggagtcatgagttcttcccatctgctgctgactccctgcagggtggctcctccttacccccacctcttctcaagctgcagtccaccggcagtggagagcatcccagtgtttggggcactgtgttcctcttcgtccctgcaccagaccctggaagccttggccagagacctcaccaaactcgacttgcggcgctgggccagcttcatggatgctggagtggagcacgatgacgtagcagagctgctgcaggagctacaaagcctggcccagtgctaccagggtggtgacagcctcgtggactaaagttcccagtgtgggagaaaggagctagtttgcaataaaaacagctggatgcaggagcccagtgtcttcatgcagaggagctcaatgtcgcgggactagctacaccaacatatgcactttttacatttagaaacactgtgattagaccacagaacaataaatatgtgccatcagaccaaaaaaaagtagagaaaggagctgaactccactctcgatgctacttacagaggacatctgtaaagtcttcataaaagaccttgaatgatgcctaggatggcagagcccctgggtcctactccatcctccagcctttgtccttgtcctggcctcctgctctccagatctgtaaactgggctcaaggactgtacaagcagagtacaactacccgcctccccggtgccagggcgcctgttgggtttggtcctgtgtagatgattcccagagtctcattcatccagctcctcttcagacagaaggtccccatggtcagacagctggtctgcattgctggtactggttgcatcatcctcatcctcagagctggcttcacaggcagtgtggaagagctgcatgagttctcgaaaatggtgggaaacctaagaaaggaggagggctgtattcactgatccttagtaacatgttaacatttatgaagcactat

SEQ ID NO: 154191 - DNA, 2346 bp, Homo sapiens
  Payload ID: 10300
  Gene Symbol: MSTO1
  Gene Name: misato 1, mitochondrial distribution and morphology regulator
  Uniprot ID: Q9BUK6
  ENST ID: ENST00000490743
  CDS Start-End: 32-331
gaggcgcggcggccccgtggagcagcgcagtatggcgggcggggcccgggaggtgctcacactgcagttgggacattttgccggtttcgtgggcgcgcactggtggaaccagcaggatgctgcgctgggccgagcgaccgattccaaggagcccccgggagagctgtgccccgacgtcctgtatcgtacgggccggacgctgcacggccaggagacctacacgccgcgactcatcctcatggatctgaagggtagtttgagctccctaaaagaggaaggtggactctacagggacaaacagttggatgctgcaatagcatgggagtgctgagtagtgatggtgtctggagggtcaaatccattcccaatggcaaaggttcctcaccactccccaccgctacaactccaaaaccacttatccctacagaggccagcatcagggtctggtcagacttcctcagagtccatctccatccccggagcatctgtatgattcagaagtacaaccacgatggggaagcaggtcggctggaggcttttggccaaggggaaagtgtcctaaaggaacccaagtaccaggaagagctggaggacaggctgcatttctacgtggaggaatgtgactacttgcagggcttccagatcctgtgtgacctgcacgatggcttctctggggtaggcgcgaaggcggcagagctgctacaagatgaatattcagggcggggaataataacctggggcctgctacctggtccctaccatcgtggggaggcccagagaaacatctatcgtctattaaacacagcttttggtctcgtgcacctgactgctcacagctctcttgtctgccccttgtccttgggtgggagcctgggcctgcgacccgagccacctgtcagcttcccttacctgcattatgatgccactctgcccttccactgcagtgccatcctggctacagccctggacacagtcactgttccttatcgcctgtgttcctctccagtttccatggttcatctggctgacatgctgagcttctgtgggaaaaaggtggtgacagcaggagcaatcatccctttccccttggctccaggccagtcccttcctgattccctgatgcagtttggaggagccaccccatggaccccactgtctgcatgtggggagccttctggaacacgttgctttgcccagtcagtggtgctgaggggtatagacagagcatgccacacaagccagctcaccccagggacacctccaccctctgcccttcatgcatgtaccactggggaagaaatcttggctcagtatttacaacagcagcagcctggagtcatgagttcttcccatctgctgctgactccctgcagggtggctcctccttacccccacctcttctcaagctgcagtccaccgggtatggttctggatggttcccccaagggagcagcagtggagagcatcccagtgtttggggcactgtgttcctcttcgtccctgcaccagaccctggaagccttggccagagacctcaccaaactcgacttgcggcgctgggccagcttcatggatgctggagtggagcacgatgacgtagcagagctgctgcaggagctacaaagcctggcccagtgctaccagggtggtgacagcctcgtggactaaagttcccagtgtgggagaaaggagctagtttgcaataaaaacagctggatgcaggagcccagtgtcttcatgcagaggagctcaatgtcgcgggactagctacaccaacatatgcactttttacatttagaaacactgtgattagaccacagaacaataaatatgtgccatcagaccaaaaaaaagtagagaaaggagctgaactccactctcgatgctacttacagaggacatctgtaaagtcttcataaaagaccttgaatgatgcctaggatggcagagcccctgggtcctactccatcctccagcctttgtccttgtcctggcctcctgctctccagatctgtaaactgggctcaaggactgtacaagcagagtacaactacccgcctccccggtgccagggcgcctgttgggtttggtcctgtgtagatgattcccagagtctcattcatccagctcctcttcagacagaaggtccccatggtcagacagctggtctgcattgctggtactggttgcatcatcctcatcctcagagctggcttcacaggcagtgtggaagagctgcatgagttctcgaaaatggtgggaaacctaagaaaggaggagggctgtattcactgatccttagtaacatgttaacatttatgaagcactatatattgatttgcaaaa

SEQ ID NO: 154192 - DNA, 514 bp, Homo sapiens
  Payload ID: 10300
  Gene Symbol: MSTO1
  Gene Name: misato 1, mitochondrial distribution and morphology regulator
  ENST ID: ENST00000462250
  CDS Start-End: 1-236
catgccacacaagccagctcaccccagggacacctccaccctctgcccttcatgcatgtaccactggggaagaaatcttggctcagtatttacaacagcagcagcctggagtcatgagttcttcccatctgctgctgactccctgcagggtggctcctccttacccccacctcttctcaagctgcagtccaccgggtatggttctggatggttcccccaagggagcaggtatgtaggaggtgaagaaaactgagatttcaagtatgggagagtttttactatctccattcctggattaaaagtgctgaaaaagtccacagttaaacattcctttattcaccctatggctcccaagaaaagcattcttcctctggagtactggtgtactaaggggacaatacaccaaatttgttgagtttacaatcaagtctactaaggttggacttccttatcagtttggcagagtcccagggcagaataatcatccatctacaggtctctgtttcctctccct

SEQ ID NO: 154193 - DNA, 4863 bp, Homo sapiens
  Payload ID: 10301
  Gene Symbol: MINK1
  Gene Name: misshapen-like kinase 1
  Uniprot ID: Q8N4C8
  ENST ID: ENST00000347992
  CDS Start-End: 185-4096
ggagatagcgcctgtcagtcggtgggtcggtcctcgcgccggccctccccctccccggtctccgggggaggcgcggtggagtccgcccccggggttctccgatgggggagaagcggcgacggcggcagtggagtaaccgagccggagcgtgagcggccccggtgccccgttccccacggaggccatgggcgacccagcccccgcccgcagcctggacgacatcgacctgtccgccctgcgggaccctgctgggatctttgagcttgtggaggtggtcggcaatggaacctacggacaggtgtacaagggtcggcatgtcaagacggggcagctggctgccatcaaggtcatggatgtcacggaggacgaggaggaagagatcaaacaggagatcaacatgctgaaaaagtactctcaccaccgcaacatcgccacctactacggagccttcatcaagaagagccccccgggaaacgatgaccagctctggctggtgatggagttctgtggtgctggttcagtgactgacctggtaaagaacacaaaaggcaacgccctgaaggaggactgtatcgcctatatctgcagggagatcctcaggggtctggcccatctccatgcccacaaggtgatccatcgagacatcaaggggcagaatgtgctgctgacagagaatgctgaggtcaagctagtggattttggggtgagtgctcagctggaccgcaccgtgggcagacggaacactttcattgggactccctactggatggctccagaggtcatcgcctgtgatgagaaccctgatgccacctatgattacaggagtgatatttggtctctaggaatcacagccatcgagatggcagagggagccccccctctgtgtgacatgcaccccatgcgagccctcttcctcattcctcggaaccctccgcccaggctcaagtccaagaagtggtctaagaagttcattgacttcattgacacatgtctcatcaagacttacctgagccgcccacccacggagcagctactgaagtttcccttcatccgggaccagcccacggagcggcaggtccgcatccagcttaaggaccacattgaccgatcccggaagaagcggggtgagaaagaggagacagaatatgagtacagcggcagcgaggaggaagatgacagccatggagaggaaggagagccaagctccatcatgaacgtgcctggagagtcgactctacgccgggagtttctccggctccagcaggaaaataagagcaactcagaggctttaaaacagcagcagcagctgcagcagcagcagcagcgagaccccgaggcacacatcaaacacctgctgcaccagcggcagcggcgcatagaggagcagaaggaggagcggcgccgcgtggaggagcaacagcggcgggagcgggagcagcggaagctgcaggagaaggagcagcagcggcggctggaggacatgcaggctctgcggcgggaggaggagcggcggcaggcggagcgcgagcaggaatacaagcggaagcagctggaggagcagcggcagtcagaacgtctccagaggcagctgcagcaggagcatgcctacctcaagtccctgcagcagcagcaacagcagcagcagcttcagaaacagcagcagcagcagctcctgcctggggacaggaagcccctgtaccattatggtcggggcatgaatcccgctgacaaaccagcctgggcccgagaggtagaagagagaacaaggatgaacaagcagcagaactctcccttggccaagagcaagccaggcagcacggggcctgagccccccatcccccaggcctccccagggcccccaggacccctttcccagactcctcctatgcagaggccggtggagccccaggagggaccgcacaagagcctggtggcacaccgggtcccactgaagccatatgcagcacctgtaccccgatcccagtccctgcaggaccagcccacccgaaacctggctgccttcccagcctcccatgaccccgaccctgccatccccgcacccactgccacgcccagtgcccgaggagctgtcatccgccagaattcagaccccacctctgaaggacctggccccagcccgaatcccccagcctgggtccgcccagataacgaggccccacccaaggtgcctcagaggacctcatctatcgccactgcccttaacaccagtggggccggagggtcccggccagcccaggcagtccgtgccagtaaccccgacctcaggaggagcgaccctggctgggaacgctcggacagcgtccttccagcctctcacgggcacctcccccaggctggctcactggagcggaaccgcgtgggagtctcctccaaaccggacagctcccctgtgctctcccctgggaataaagccaagcccgacgaccaccgctcacggccaggccggcccgcaagctataagcgagcaattggtgaggactttgtgttgctgaaagagcggactctggacgaggcccctcggcctcccaagaaggccatggactactcgtcgtccagcgaggaggtggaaagcagtgaggacgacgaggaggaaggcgaaggcgggccagcagaggggagcagagatacccctgggggccgcagcgatggggatacagacagcgtcagcaccatggtggtccacgacgtcgaggagatcaccgggacccagcccccatacgggggcggcaccatggtggtccagcgcacccctgaagaggagcggaacctgctgcatgctgacagcaatgggtacacaaacctgcctgacgtggtccagcccagccactcacccaccgagaacagcaaaggccaaagcccaccctcgaaggatgggagtggtgactaccagtctcgtgggctggtaaaggcccctggcaagagctcgttcacgatgtttgtggatctagggatctaccagcctggaggcagtggggacagcatccccatcacagccctagtgggtggagagggcactcggctcgaccagctgcagtacgacgtgaggaagggttctgtggtcaacgtgaatcccaccaacacccgggcccacagtgagacccctgagatccggaagtacaagaagcgattcaactccgagatcctctgtgcagccctttggggggtcaacctgctggtgggcacggagaacgggctgatgttgctggaccgaagtgggcagggcaaggtgtatggactcattgggcggcgacgcttccagcagatggatgtgctggaggggctcaacctgctcatcaccatctcagggaaaaggaacaaactgcgggtgtattacctgtcctggctccggaacaagattctgcacaatgacccagaagtggagaagaagcagggctggaccaccgtgggggacatggagggctgcgggcactaccgtgttgtgaaatacgagcggattaagttcctggtcatcgccctcaagagctccgtggaggtgtatgcctgggcccccaaaccctaccacaaattcatggccttcaagtcctttgccgacctcccccaccgccctctgctggtcgacctgacagtagaggaggggcagcggctcaaggtcatctatggctccagtgctggcttccatgctgtggatgtcgactcggggaacagctatgacatctacatccctgtgcacatccagagccagatcacgccccatgccatcatcttcctccccaacaccgacggcatggagatgctgctgtgctacgaggacgagggtgtctacgtcaacacgtacgggcgcatcattaaggatgtggtgctgcagtggggggagatgcctacttctgtggcctacatctgctccaaccagataatgggctggggtgagaaagccattgagatccgctctgtggagacgggccacctcgacggggtcttcatgcacaaacgagctcagaggctcaagttcctgtgtgagcggaatgacaaggtgttttttgcctcagtccgctctgggggcagcagccaagtttacttcatgactctgaaccgtaactgcatcatgaactggtgacggggccctgggctggggctgtcccacactggacccagctctccccctgcagccaggcttcccgggccgcccctctttcccctccctgggcttttgcttttactggtttgatttcactggagcctgctgggaacgtgacctctgacccctgatgctttcgtgatcacgtgaccatcctcttccccaacatgtcctcttcccaaaactgtgcctgtccccagcttctggggagggacacagcttccccttcccaggaattgagtgggcctagcccctccccccttttctccatttgagaggagagtgcttggggcttgaaccccttaccccactgctgctgactgggcagggccctggacccctttatttgcacgtcaggggagccggctccccccttgaatgtaccagaccctggggggggtcactgggccctagatttttggggggtcaccagccactccaggggcagggaccatttcttcattttctgaaagcactttaatgattccccttcccccaaactccagggaatggaggggggaccccgccagccaaaacattccccccattcccgacccccctctcctcttctagcccatgcccttccccggtggagggagggagcagggagccctcactctccacgccccttgcttgcatctgtatatagtgtgagcagcaagtaacccttctccctccccccccacccctcctcaatgtagtggccttggatatcctgtttgttaataaagacaattcaaccagct

SEQ ID NO: 154194 - DNA, 4961 bp, Homo sapiens
  Payload ID: 10301
  Gene Symbol: MINK1
  Gene Name: misshapen-like kinase 1
  Uniprot ID: Q8N4C8
  ENST ID: ENST00000355280
  CDS Start-End: 197-4195
ggctggctccggggagatagcgcctgtcagtcggtgggtcggtcctcgcgccggccctccccctccccggtctccgggggaggcgcggtggagtccgcccccggggttctccgatgggggagaagcggcgacggcggcagtggagtaaccgagccggagcgtgagcggccccggtgccccgttccccacggaggccatgggcgacccagcccccgcccgcagcctggacgacatcgacctgtccgccctgcgggaccctgctgggatctttgagcttgtggaggtggtcggcaatggaacctacggacaggtgtacaagggtcggcatgtcaagacggggcagctggctgccatcaaggtcatggatgtcacggaggacgaggaggaagagatcaaacaggagatcaacatgctgaaaaagtactctcaccaccgcaacatcgccacctactacggagccttcatcaagaagagccccccgggaaacgatgaccagctctggctggtgatggagttctgtggtgctggttcagtgactgacctggtaaagaacacaaaaggcaacgccctgaaggaggactgtatcgcctatatctgcagggagatcctcaggggtctggcccatctccatgcccacaaggtgatccatcgagacatcaaggggcagaatgtgctgctgacagagaatgctgaggtcaagctagtggattttggggtgagtgctcagctggaccgcaccgtgggcagacggaacactttcattgggactccctactggatggctccagaggtcatcgcctgtgatgagaaccctgatgccacctatgattacaggagtgatatttggtctctaggaatcacagccatcgagatggcagagggagccccccctctgtgtgacatgcaccccatgcgagccctcttcctcattcctcggaaccctccgcccaggctcaagtccaagaagtggtctaagaagttcattgacttcattgacacatgtctcatcaagacttacctgagccgcccacccacggagcagctactgaagtttcccttcatccgggaccagcccacggagcggcaggtccgcatccagcttaaggaccacattgaccgatcccggaagaagcggggtgagaaagaggagacagaatatgagtacagcggcagcgaggaggaagatgacagccatggagaggaaggagagccaagctccatcatgaacgtgcctggagagtcgactctacgccgggagtttctccggctccagcaggaaaataagagcaactcagaggctttaaaacagcagcagcagctgcagcagcagcagcagcgagaccccgaggcacacatcaaacacctgctgcaccagcggcagcggcgcatagaggagcagaaggaggagcggcgccgcgtggaggagcaacagcggcgggagcgggagcagcggaagctgcaggagaaggagcagcagcggcggctggaggacatgcaggctctgcggcgggaggaggagcggcggcaggcggagcgcgagcaggaatacaagcggaagcagctggaggagcagcggcagtcagaacgtctccagaggcagctgcagcaggagcatgcctacctcaagtccctgcagcagcagcaacagcagcagcagcttcagaaacagcagcagcagcagctcctgcctggggacaggaagcccctgtaccattatggtcggggcatgaatcccgctgacaaaccagcctgggcccgagaggtagaagagagaacaaggatgaacaagcagcagaactctcccttggccaagagcaagccaggcagcacggggcctgagccccccatcccccaggcctccccagggcccccaggacccctttcccagactcctcctatgcagaggccggtggagccccaggagggaccgcacaagagcctggtggcacaccgggtcccactgaagccatatgcagcacctgtaccccgatcccagtccctgcaggaccagcccacccgaaacctggctgccttcccagcctcccatgaccccgaccctgccatccccgcacccactgccacgcccagtgcccgaggagctgtcatccgccagaattcagaccccacctctgaaggacctggccccagcccgaatcccccagcctgggtccgcccagataacgaggccccacccaaggtgcctcagaggacctcatctatcgccactgcccttaacaccagtggggccggagggtcccggccagcccaggcagtccgtgccagacctcgcagcaactccgcctggcaaatctatctgcaaaggcgggcagagcggggcaccccaaagcctccagggccccctgctcagccccctggcccgcccaacgcctctagtaaccccgacctcaggaggagcgaccctggctgggaacgctcggacagcgtccttccagcctctcacgggcacctcccccaggctggctcactggagcggaaccgcgtgggagtctcctccaaaccggacagctcccctgtgctctcccctgggaataaagccaagcccgacgaccaccgctcacggccaggccggcccgcagactttgtgttgctgaaagagcggactctggacgaggcccctcggcctcccaagaaggccatggactactcgtcgtccagcgaggaggtggaaagcagtgaggacgacgaggaggaaggcgaaggcgggccagcagaggggagcagagatacccctgggggccgcagcgatggggatacagacagcgtcagcaccatggtggtccacgacgtcgaggagatcaccgggacccagcccccatacgggggcggcaccatggtggtccagcgcacccctgaagaggagcggaacctgctgcatgctgacagcaatgggtacacaaacctgcctgacgtggtccagcccagccactcacccaccgagaacagcaaaggccaaagcccaccctcgaaggatgggagtggtgactaccagtctcgtgggctggtaaaggcccctggcaagagctcgttcacgatgtttgtggatctagggatctaccagcctggaggcagtggggacagcatccccatcacagccctagtgggtggagagggcactcggctcgaccagctgcagtacgacgtgaggaagggttctgtggtcaacgtgaatcccaccaacacccgggcccacagtgagacccctgagatccggaagtacaagaagcgattcaactccgagatcctctgtgcagccctttggggggtcaacctgctggtgggcacggagaacgggctgatgttgctggaccgaagtgggcagggcaaggtgtatggactcattgggcggcgacgcttccagcagatggatgtgctggaggggctcaacctgctcatcaccatctcagggaaaaggaacaaactgcgggtgtattacctgtcctggctccggaacaagattctgcacaatgacccagaagtggagaagaagcagggctggaccaccgtgggggacatggagggctgcgggcactaccgtgttgtgaaatacgagcggattaagttcctggtcatcgccctcaagagctccgtggaggtgtatgcctgggcccccaaaccctaccacaaattcatggccttcaagtcctttgccgacctcccccaccgccctctgctggtcgacctgacagtagaggaggggcagcggctcaaggtcatctatggctccagtgctggcttccatgctgtggatgtcgactcggggaacagctatgacatctacatccctgtgcacatccagagccagatcacgccccatgccatcatcttcctccccaacaccgacggcatggagatgctgctgtgctacgaggacgagggtgtctacgtcaacacgtacgggcgcatcattaaggatgtggtgctgcagtggggggagatgcctacttctgtggcctacatctgctccaaccagataatgggctggggtgagaaagccattgagatccgctctgtggagacgggccacctcgacggggtcttcatgcacaaacgagctcagaggctcaagttcctgtgtgagcggaatgacaaggtgttttttgcctcagtccgctctgggggcagcagccaagtttacttcatgactctgaaccgtaactgcatcatgaactggtgacggggccctgggctggggctgtcccacactggacccagctctccccctgcagccaggcttcccgggccgcccctctttcccctccctgggcttttgcttttactggtttgatttcactggagcctgctgggaacgtgacctctgacccctgatgctttcgtgatcacgtgaccatcctcttccccaacatgtcctcttcccaaaactgtgcctgtccccagcttctggggagggacacagcttccccttcccaggaattgagtgggcctagcccctccccccttttctccatttgagaggagagtgcttggggcttgaaccccttaccccactgctgctgactgggcagggccctggacccctttatttgcacgtcaggggagccggctccccccttgaatgtaccagaccctggggggggtcactgggccctagatttttggggggtcaccagccactccaggggcagggaccatttcttcattttctgaaagcactttaatgattccccttcccccaaactccagggaatggaggggggaccccgccagccaaaacattccccccattcccgacccccctctcctcttctagcccatgcccttccccggtggagggagggagcagggagccctcactctccacgccccttgcttgcatctgtatatagtgtgagcagcaagtaacccttctccctccccccccacccctcctcaatgtagtggccttggatatcctgtttgttaataaagacaattcaaccagc

SEQ ID NO: 154195 - DNA, 3939 bp, Homo sapiens
  Payload ID: 10301
  Gene Symbol: MINK1
  Gene Name: misshapen-like kinase 1
  Uniprot ID: Q8N4C8
  ENST ID: ENST00000453408
  CDS Start-End: 1-3939
atgggcgacccagcccccgcccgcagcctggacgacatcgacctgtccgccctgcgggaccctgctgggatctttgagcttgtggaggtggtcggcaatggaacctacggacaggtgtacaagggtcggcatgtcaagacggggcagctggctgccatcaaggtcatggatgtcacggaggacgaggaggaagagatcaaacaggagatcaacatgctgaaaaagtactctcaccaccgcaacatcgccacctactacggagccttcatcaagaagagccccccgggaaacgatgaccagctctggctggtgatggagttctgtggtgctggttcagtgactgacctggtaaagaacacaaaaggcaacgccctgaaggaggactgtatcgcctatatctgcagggagatcctcaggggtctggcccatctccatgcccacaaggtgatccatcgagacatcaaggggcagaatgtgctgctgacagagaatgctgaggtcaagctagtggattttggggtgagtgctcagctggaccgcaccgtgggcagacggaacactttcattgggactccctactggatggctccagaggtcatcgcctgtgatgagaaccctgatgccacctatgattacaggagtgatatttggtctctaggaatcacagccatcgagatggcagagggagccccccctctgtgtgacatgcaccccatgcgagccctcttcctcattcctcggaaccctccgcccaggctcaagtccaagaagtggtctaagaagttcattgacttcattgacacatgtctcatcaagacttacctgagccgcccacccacggagcagctactgaagtttcccttcatccgggaccagcccacggagcggcaggtccgcatccagcttaaggaccacattgaccgatcccggaagaagcggggtgagaaagaggagacagaatatgagtacagcggcagcgaggaggaagatgacagccatggagaggaaggagagccaagctccatcatgaacgtgcctggagagtcgactctacgccgggagtttctccggctccagcaggaaaataagagcaactcagaggctttaaaacagcagcagcagctgcagcagcagcagcagcgagaccccgaggcacacatcaaacacctgctgcaccagcggcagcggcgcatagaggagcagaaggaggagcggcgccgcgtggaggagcaacagcggcgggagcgggagcagcggaagctgcaggagaaggagcagcagcggcggctggaggacatgcaggctctgcggcgggaggaggagcggcggcaggcggagcgcgagcaggaatacaagcggaagcagctggaggagcagcggcagtcagaacgtctccagaggcagctgcagcaggagcatgcctacctcaagtccctgcagcagcagcaacagcagcagcagcttcagaaacagcagcagcagcagctcctgcctggggacaggaagcccctgtaccattatggtcggggcatgaatcccgctgacaaaccagcctgggcccgagaggtagaagagagaacaaggatgaacaagcagcagaactctcccttggccaagagcaagccaggcagcacggggcctgagccccccatcccccaggcctccccagggcccccaggacccctttcccagactcctcctatgcagaggccggtggagccccaggagggaccgcacaagtccctgcaggaccagcccacccgaaacctggctgccttcccagcctcccatgaccccgaccctgccatccccgcacccactgccacgcccagtgcccgaggagctgtcatccgccagaattcagaccccacctctgaaggacctggccccagcccgaatcccccagcctgggtccgcccagataacgaggccccacccaaggtgcctcagaggacctcatctatcgccactgcccttaacaccagtggggccggagggtcccggccagcccaggcagtccgtgccagacctcgcagcaactccgcctggcaaatctatctgcaaaggcgggcagagcggggcaccccaaagcctccagggccccctgctcagccccctggcccgcccaacgcctctagtaaccccgacctcaggaggagcgaccctggctgggaacgctcggacagcgtccttccagcctctcacgggcacctcccccaggctggctcactggagcggaaccgcgtgggagtctcctccaaaccggacagctcccctgtgctctcccctgggaataaagccaagcccgacgaccaccgctcacggccaggccggcccgcagactttgtgttgctgaaagagcggactctggacgaggcccctcggcctcccaagaaggccatggactactcgtcgtccagcgaggaggtggaaagcagtgaggacgacgaggaggaaggcgaaggcgggccagcagaggggagcagagatacccctgggggccgcagcgatggggatacagacagcgtcagcaccatggtggtccacgacgtcgaggagatcaccgggacccagcccccatacgggggcggcaccatggtggtccagcgcacccctgaagaggagcggaacctgctgcatgctgacagcaatgggtacacaaacctgcctgacgtggtccagcccagccactcacccaccgagaacagcaaaggccaaagcccaccctcgaaggatgggagtggtgactaccagtctcgtgggctggtaaaggcccctggcaagagctcgttcacgatgtttgtggatctagggatctaccagcctggaggcagtggggacagcatccccatcacagccctagtgggtggagagggcactcggctcgaccagctgcagtacgacgtgaggaagggttctgtggtcaacgtgaatcccaccaacacccgggcccacagtgagacccctgagatccggaagtacaagaagcgattcaactccgagatcctctgtgcagccctttggggggtcaacctgctggtgggcacggagaacgggctgatgttgctggaccgaagtgggcagggcaaggtgtatggactcattgggcggcgacgcttccagcagatggatgtgctggaggggctcaacctgctcatcaccatctcagggaaaaggaacaaactgcgggtgtattacctgtcctggctccggaacaagattctgcacaatgacccagaagtggagaagaagcagggctggaccaccgtgggggacatggagggctgcgggcactaccgtgttgtgaaatacgagcggattaagttcctggtcatcgccctcaagagctccgtggaggtgtatgcctgggcccccaaaccctaccacaaattcatggccttcaagtcctttgccgacctcccccaccgccctctgctggtcgacctgacagtagaggaggggcagcggctcaaggtcatctatggctccagtgctggcttccatgctgtggatgtcgactcggggaacagctatgacatctacatccctgtgcacatccagagccagatcacgccccatgccatcatcttcctccccaacaccgacggcatggagatgctgctgtgctacgaggacgagggtgtctacgtcaacacgtacgggcgcatcattaaggatgtggtgctgcagtggggggagatgcctacttctgtggcctacatctgctccaaccagataatgggctggggtgagaaagccattgagatccgctctgtggagacgggccacctcgacggggtcttcatgcacaaacgagctcagaggctcaagttcctgtgtgagcggaatgacaaggtgttttttgcctcagtccgctctgggggcagcagccaagtttacttcatgactctgaaccgtaactgcatcatgaactggtga

SEQ ID NO: 154196 - DNA, 770 bp, Homo sapiens
  Payload ID: 10301
  Gene Symbol: MINK1
  Gene Name: misshapen-like kinase 1
  ENST ID: ENST00000576037
  CDS Start-End: 1-486
ctcccccaccgccctctgctggtcgacctgacagtagaggaggggcagcggctcaaggtcatctatggctccagtgctggcttccatgctgtggatgtcgactcggggaacagctatgacatctacatccctgtgcacatccagagccagatcacgccccatgccatcatcttcctccccaacaccgacggcatggagatgctgctgtgctacgaggacgagggtgtctacgtcaacacgtacgggcgcatcattaaggatgtggtgctgcagtggggggagatgcctacttctgtggcctacatctgctccaaccagataatgggctggggtgagaaagccattgagatccgctctgtggagacgggccacctcgacggggtcttcatgcacaaacgagctcagaggctcaagttcctgtgtgagcggaatgacaaggtgggaggctccttccctctgaaagccctgctgtcccggctgccatgaccctaggcccctgggcagagttctggggagaggatggtggtggtggcttcctgaaagcgggcccctctgggagctcagagggcagtcagccactaccactgccctgcgctcccttcagattccgaggacttcccagctggcccccagggggcgagtggtgcaccctctcccctaacatcccagcctgcctttcctccgggtgaggggcactgtgagtctcctcctgcagtctctgtgtctccctcaactcttctgccaccccttcttcccttctttccctctcc

SEQ ID NO: 154197 - DNA, 675 bp, Homo sapiens
  Payload ID: 10301
  Gene Symbol: MINK1
  Gene Name: misshapen-like kinase 1
  ENST ID: ENST00000577021
  CDS Start-End: 1-161
tcgacctgtccgccctgcgggaccctgctgggatctttgagcttgtggaggtggtcggcaatggaacctacggacaggtgtacaagggtcggcatgtcaagacggggcagctggctgccatcaaggtcatggatgtcacggagctcctcccatctgcttaggacgaggaggaagagatcaaacaggagatcaacatgctgaaaaagtactctcaccaccgcaacatcgccacctactacggagccttcatcaagaagagccccccgggaaacgatgaccagctctggctggtgatggagttctgtggtgctggttcagtgactgacctggtaaagaacacaaaaggcaacgccctgaaggaggactgtatcgcctatatctgcagggagatcctcaggggtctggcccatctccatgcccacaaggtgatccatcgagacatcaaggggcagaatgtgctgctgacagagaatgctgaggtcaagctagtggattttggggtgagtgctcagctggaccgcaccgtgggcagacggaacactttcattgggactccctactggatggctccagaggtcatcgcctgtgatgagaaccctgatgccacctatgattacaggagtgatatttggtctctaggaatcacagccatcgagatggcagagggagcccccc

SEQ ID NO: 154198 - DNA, 4569 bp, Homo sapiens
  Payload ID: 10301
  Gene Symbol: MINK1
  Gene Name: misshapen-like kinase 1
  ENST ID: ENST00000571207
  CDS Start-End: 1-1145
tcaggggtctggcccatctccatgcccacaaggtgatccatcgagacatcaaggggcagaatgtgctgctgacagagaatgctgaggtcaagctagtggattttggggtgagtgctcagctggaccgcaccgtgggcagacggaacactttcattgggactccctactggatggctccagaggtcatcgcctgtgatgagaaccctgatgccacctatgattacaggagtgatatttggtctctaggaatcacagccatcgagatggcagagggagccccccctctgtgtgacatgcaccccatgcgagccctcttcctcattcctcggaaccctccgcccaggctcaagtccaagaagtggtctaagaagttcattgacttcattgacacatgtctcatcaagacttacctgagccgcccacccacggagcagctactgaagtttcccttcatccgggaccagcccacggagcggcaggtccgcatccagcttaaggaccacattgaccgatcccggaagaagcggggtgagaaagaggagacagaatatgagtacagcggcagcgaggaggaagatgacagccatggagaggaaggagagccaagctccatcatgaacgtgcctggagagtcgactctacgccgggagtttctccggctccagcaggaaaataagagcaactcagaggctttaaaacagcagcagcagctgcagcagcagcagcagcgagaccccgaggcacacatcaaacacctgctgcaccagcggcagcggcgcatagaggagcagaaggaggagcggcgccgcgtggaggagcaacagcggcgggagcgggagcagcggaagctgcaggagaaggagcagcagcggcggctggaggacatgcaggctctgcggcgggaggaggagcggcggcaggcggagcgcgagcaggaatatattcgtcacaggctagaggaggagcagcgacagctcgagatccttcagcaacagctgctccaggaacaggccctgctgctggtaacgggtccctcagcgtcctctgggaagatgcttttcagagcttctttgctggaacgggatgggaacacttcaagggaagggattcacccaggacatcaagggaatacatctcctctctaggcagttggagaaaagagagggcatgcctgctctaactcccagggccacaccctgctgagccctctctccctacccttgggcccaggaatacaagcggaagcagctggaggagcagcggcagtcagaacgtctccagaggcagctgcagcaggagcatgcctacctcaagtccctgcagcagcagcaacagcagcagcagcttcagaaacagcagcagcagcagctcctgcctggggacaggaagcccctgtaccattatggtcggggcatgaatcccgctgacaaaccagcctgggcccgagaggtagaagagagaacaaggatgaacaagcagcagaactctcccttggccaagagcaagccaggcagcacggggcctgagccccccatcccccaggcctccccagggcccccaggacccctttcccagactcctcctatgcagaggccggtggagccccaggagggaccgcacaagagcctggtggcacaccgggtcccactgaagccatatgcagcacctgtaccccgatcccagtccctgcaggaccagcccacccgaaacctggctgccttcccagcctcccatgaccccgaccctgccatccccgcacccactgccacgcccagtgcccgaggagctgtcatccgccagaattcagaccccacctctgaaggacctggccccagcccgaatcccccagcctgggtccgcccagataacgaggccccacccaaggtgcctcagaggacctcatctatcgccactgcccttaacaccagtggggccggagggtcccggccagcccaggcagtccgtgccagtaaccccgacctcaggaggagcgaccctggctgggaacgctcggacagcgtccttccagcctctcacgggcacctcccccaggctggctcactggagcggaaccgcgtgggagtctcctccaaaccggacagctcccctgtgctctcccctgggaataaagccaagcccgacgaccaccgctcacggccaggccggcccgcaagctataagcgagcaattggtgaggactttgtgttgctgaaagagcggactctggacgaggcccctcggcctcccaagaaggccatggactactcgtcgtccagcgaggaggtggaaagcagtgaggacgacgaggaggaaggcgaaggcgggccagcagaggggagcagagatacccctgggggccgcagcgatggggatacagacagcgtcagcaccatggtggtccacgacgtcgaggagatcaccgggacccagcccccatacgggggcggcaccatggtggtccagcgcacccctgaagaggagcggaacctgctgcatgctgacagcaatgggtacacaaacctgcctgacgtggtccagcccagccactcacccaccgagaacagcaaaggccaaagcccaccctcgaaggatgggagtggtgactaccagtctcgtgggctggtaaaggcccctggcaagagctcgttcacgatgtttgtggatctagggatctaccagcctggaggcagtggggacagcatccccatcacagccctagtgggtggagagggcactcggctcgaccagctgcagtacgacgtgaggaagggttctgtggtcaacgtgaatcccaccaacacccgggcccacagtgagacccctgagatccggaagtacaagaagcgattcaactccgagatcctctgtgcagccctttggggggtcaacctgctggtgggcacggagaacgggctgatgttgctggaccgaagtgggcagggcaaggtgtatggactcattgggcggcgacgcttccagcagatggatgtgctggaggggctcaacctgctcatcaccatctcagggaaaaggaacaaactgcgggtgtattacctgtcctggctccggaacaagattctgcacaatgacccagaagtggagaagaagcagggctggaccaccgtgggggacatggagggctgcgggcactaccgtgttgtgaaatacgagcggattaagttcctggtcatcgccctcaagagctccgtggaggtgtatgcctgggcccccaaaccctaccacaaattcatggccttcaagtcctttgccgacctcccccaccgccctctgctggtcgacctgacagtagaggaggggcagcggctcaaggtcatctatggctccagtgctggcttccatgctgtggatgtcgactcggggaacagctatgacatctacatccctgtgcacatccagagccagatcacgccccatgccatcatcttcctccccaacaccgacggcatggagatgctgctgtgctacgaggacgagggtgtctacgtcaacacgtacgggcgcatcattaaggatgtggtgctgcagtggggggagatgcctacttctgtggcctacatctgctccaaccagataatgggctggggtgagaaagccattgagatccgctctgtggagacgggccacctcgacggggtcttcatgcacaaacgagctcagaggctcaagttcctgtgtgagcggaatgacaaggtgttttttgcctcagtccgctctgggggcagcagccaagtttacttcatgactctgaaccgtaactgcatcatgaactggtgacggggccctgggctggggctgtcccacactggacccagctctccccctgcagccaggcttcccgggccgcccctctttcccctccctgggcttttgcttttactggtttgatttcactggagcctgctgggaacgtgacctctgacccctgatgctttcgtgatcacgtgaccatcctcttccccaacatgtcctcttcccaaaactgtgcctgtccccagcttctggggagggacacagcttccccttcccaggaattgagtgggcctagcccctccccccttttctccatttgagaggagagtgcttggggcttgaaccccttaccccactgctgctgactgggcagggccctggacccctttatttgcacgtcaggggagccggctccccccttgaatgtaccagaccctggggggggtcactgggccctagatttttggggggtcaccagccactccaggggcagggaccatttcttcattttctgaaagcactttaatgattccccttcccccaaactccagggaatggaggggggaccccgccagccaaaacattccccccattcccgacccccctctcctcttctagcccatgcccttccccggtggagggagggagcagggagccctcactctccacgccccttgcttgcatctgtatatagtgtgagcagcaagtaacccttctccctccccccccacccctcctcaatgtagtggccttggatatcctgtttgttaataaagacaattcaaccagctcccacca

SEQ ID NO: 154199 - DNA, 4941 bp, Homo sapiens
  Payload ID: 10301
  Gene Symbol: MINK1
  Gene Name: misshapen-like kinase 1
  ENST ID: ENST00000574453
  CDS Start-End: 172-507
gtcagtcggtgggtcggtcctcgcgccggccctccccctccccggtctccgggggaggcgcggtggagtccgcccccggggttctccgatgggggagaagcggcgacggcggcagtggagtaaccgagccggagcgtgagcggccccggtgccccgttccccacggaggccatgggcgacccagcccccgcccgcagcctggacgacatcgacctgtccgccctgcgggctttatggttccagttcttctaccattctggaagctccctagaatctcctggaatgcttaatggacctttccagcaccgaaattcaagaattatgactcatcggtcagcagaaaagaccctgctgggatctttgagcttgtggaggtggtcggcaatggaacctacggacaggtgtacaagggtcggcatgtcaagacggggcagctggctgccatcaaggtcatggatgtcacggaggacgaggaggaagagatcaaacaggagatcaacatgctgaaaaagtactctcaccaccgcaacatcgccacctactacggagccttcatcaagaagagccccccgggaaacgatgaccagctctggctggtgatggagttctgtggtgctggttcagtgactgacctggtaaagaacacaaaaggcaacgccctgaaggaggactgtatcgcctatatctgcagggagatcctcaggggtctggcccatctccatgcccacaaggtgatccatcgagacatcaaggggcagaatgtgctgctgacagagaatgctgaggtcaagctagtggattttggggtgagtgctcagctggaccgcaccgtgggcagacggaacactttcattgggactccctactggatggctccagaggtcatcgcctgtgatgagaaccctgatgccacctatgattacaggagtgatatttggtctctaggaatcacagccatcgagatggcagagggagccccccctctgtgtgacatgcaccccatgcgagccctcttcctcattcctcggaaccctccgcccaggctcaagtccaagaagtggtctaagaagttcattgacttcattgacacatgtctcatcaagacttacctgagccgcccacccacggagcagctactgaagtttcccttcatccgggaccagcccacggagcggcaggtccgcatccagcttaaggaccacattgaccgatcccggaagaagcggggtgagaaagaggagacagaatatgagtacagcggcagcgaggaggaagatgacagccatggagaggaaggagagccaagctccatcatgaacgtgcctggagagtcgactctacgccgggagtttctccggctccagcaggaaaataagagcaactcagaggctttaaaacagcagcagcagctgcagcagcagcagcagcgagaccccgaggcacacatcaaacacctgctgcaccagcggcagcggcgcatagaggagcagaaggaggagcggcgccgcgtggaggagcaacagcggcgggagcgggagcagcggaagctgcaggagaaggagcagcagcggcggctggaggacatgcaggctctgcggcgggaggaggagcggcggcaggcggagcgcgagcaggaatacaagcggaagcagctggaggagcagcggcagtcagaacgtctccagaggcagctgcagcaggagcatgcctacctcaagtccctgcagcagcagcaacagcagcagcagcttcagaaacagcagcagcagcagctcctgcctggggacaggaagcccctgtaccattatggtcggggcatgaatcccgctgacaaaccagcctgggcccgagaggtagaagagagaacaaggatgaacaagcagcagaactctcccttggccaagagcaagccaggcagcacggggcctgagccccccatcccccaggcctccccagggcccccaggacccctttcccagactcctcctatgcagaggccggtggagccccaggagggaccgcacaagagcctggtggcacaccgggtcccactgaagccatatgcagcacctgtaccccgatcccagtccctgcaggaccagcccacccgaaacctggctgccttcccagcctcccatgaccccgaccctgccatccccgcacccactgccacgcccagtgcccgaggagctgtcatccgccagaattcagaccccacctctgaaggacctggccccagcccgaatcccccagcctgggtccgcccagataacgaggccccacccaaggtgcctcagaggacctcatctatcgccactgcccttaacaccagtggggccggagggtcccggccagcccaggcagtccgtgccagtaaccccgacctcaggaggagcgaccctggctgggaacgctcggacagcgtccttccagcctctcacgggcacctcccccaggctggctcactggagcggaaccgcgtgggagtctcctccaaaccggacagctcccctgtgctctcccctgggaataaagccaagcccgacgaccaccgctcacggccaggccggcccgcagactttgtgttgctgaaagagcggactctggacgaggcccctcggcctcccaagaaggccatggactactcgtcgtccagcgaggaggtggaaagcagtgaggacgacgaggaggaaggcgaaggcgggccagcagaggggagcagagatacccctgggggccgcagcgatggggatacagacagcgtcagcaccatggtggtccacgacgtcgaggagatcaccgggacccagcccccatacgggggcggcaccatggtggtccagcgcacccctgaagaggagcggaacctgctgcatgctgacagcaatgggtacacaaacctgcctgacgtggtccagcccagccactcacccaccgagaacagcaaaggccaaagcccaccctcgaaggatgggagtggtgactaccagtctcgtgggctggtaaaggcccctggcaagagctcgttcacgatgtttgtggatctagggatctaccagcctggaggcagtggggacagcatccccatcacagccctagtgggtggagagggcactcggctcgaccagctgcagtacgacgtgaggaagggttctgtggtcaacgtgaatcccaccaacacccgggcccacagtgagacccctgagatccggaagtacaagaagcgattcaactccgagatcctctgtgcagccctttggggggtcaacctgctggtgggcacggagaacgggctgatgttgctggaccgaagtgggcagggcaaggtgtatggactcattgggcggcgacgcttccagcagatggatgtgctggaggggctcaacctgctcatcaccatctcagggaaaaggaacaaactgcgggtgtattacctgtcctggctccggaacaagattctgcacaatgacccagaagtggagaagaagcagggctggaccaccgtgggggacatggagggctgcgggcactaccgtgttgtgaaatacgagcggattaagttcctggtcatcgccctcaagagctccgtggaggtgtatgcctgggcccccaaaccctaccacaaattcatggccttcaagtcctttgccgacctcccccaccgccctctgctggtcgacctgacagtagaggaggggcagcggctcaaggtcatctatggctccagtgctggcttccatgctgtggatgtcgactcggggaacagctatgacatctacatccctgtgcacatccagagccagatcacgccccatgccatcatcttcctccccaacaccgacggcatggagatgctgctgtgctacgaggacgagggtgtctacgtcaacacgtacgggcgcatcattaaggatgtggtgctgcagtggggggagatgcctacttctgtggcctacatctgctccaaccagataatgggctggggtgagaaagccattgagatccgctctgtggagacgggccacctcgacggggtcttcatgcacaaacgagctcagaggctcaagttcctgtgtgagcggaatgacaaggtgttttttgcctcagtccgctctgggggcagcagccaagtttacttcatgactctgaaccgtaactgcatcatgaactggtgacggggccctgggctggggctgtcccacactggacccagctctccccctgcagccaggcttcccgggccgcccctctttcccctccctgggcttttgcttttactggtttgatttcactggagcctgctgggaacgtgacctctgacccctgatgctttcgtgatcacgtgaccatcctcttccccaacatgtcctcttcccaaaactgtgcctgtccccagcttctggggagggacacagcttccccttcccaggaattgagtgggcctagcccctccccccttttctccatttgagaggagagtgcttggggcttgaaccccttaccccactgctgctgactgggcagggccctggacccctttatttgcacgtcaggggagccggctccccccttgaatgtaccagaccctggggggggtcactgggccctagatttttggggggtcaccagccactccaggggcagggaccatttcttcattttctgaaagcactttaatgattccccttcccccaaactccagggaatggaggggggaccccgccagccaaaacattccccccattcccgacccccctctcctcttctagcccatgcccttccccggtggagggagggagcagggagccctcactctccacgccccttgcttgcatctgtatatagtgtgagcagcaagtaacccttctccctccccccccacccctcctcaatgtagtggccttggatatcctgtttgttaataaagacaattcaaccagc

SEQ ID NO: 154200 - DNA, 3453 bp, Homo sapiens
  Payload ID: 10302
  Gene Symbol: MIOS
  Gene Name: missing oocyte, meiosis regulator, homolog (Drosophila)
  Uniprot ID: Q9NXC5
  ENST ID: ENST00000340080
  CDS Start-End: 422-3049
gctgggaaactccccttccaaggccgaggcgccgctgcgcgtcctccaggcgtggtggtggggtcgtgggtcccagcccagtggtccaggtcacgggccgcacggccgcggccgccatcttgcccgcgtccgggctcctgcggcgggcggggcggtgtcccggccggaagcggctgtgcggcggccgcgctgccacctcagggaaatttggatatgtgcagtgcatctcctcgaagatgctgatggtggaaatttcttgaaaccgctctcgtaatttgccacgtgctgttgcaaatattctggtgaatgaacacagaatcagcatggctttcctttgctgagaaatcactgatgggaagtgagacttgttaaacttgaaagtgaatggacctgagtggaccctttgatcacatcagtaaacatgagcggtaccaaacctgatattttatgggcaccacaccatgttgatagatttgttgtgtgtgactcagaactaagtctttatcatgtggaatctactgtgaattcagaactcaaagctggatctttacgtttatctgaagactctgcagctacattactgtcaataaattcagatacaccctatatgaaatgtgttgcctggtatcttaattatgatcctgaatgtctgctggcagttggacaagcaaatggtcgagttgtacttacaagccttggtcaagatcataactcaaagttcaaagatttgataggaaaagagtttgttccaaaacatgcacgacaatgtaatacccttgcctggaatccactggatagtaactggctagctgctggtttagataagcacagagctgacttttcagtgctaatatgggatatctgcagcaaatatactcctgatatagttcccatggaaaaagtgaaactttcagcaggtgaaactgaaacaacattattagtaacaaaaccactttatgagttaggacagaatgatgcttgtctgtctctttgttggcttccacgagaccagaaacttctccttgctggtatgcatcgtaacctagctatatttgatcttcggaatacaagccaaaagatgttcgtaaatacaaaagctgttcagggtgtgacggtagacccatatttccacgatcgtgttgcttccttctatgaaggtcaggttgcaatatgggatcttagaaaatttgagaagccagttttgacattgactgagcaaccaaaacccttaacaaaagtagcatggtgtcccactaggactggtctacttgccactttaacaagggatagtaatattattagattgtatgatatgcagcatacacccactcccattggggatgaaactgaacccacaataattgaaagaagtgtgcaaccttgtgacaattacattgcttcctttgcgtggcatccaacaagtcaaaatcgaatgatagttgtaactcccaaccgaacaatgtcagacttcactgtttttgaaaggatatctcttgcctggagcccaattacatctttaatgtgggcttgtggtcgtcatttatatgaatgtacggaagaagaaaatgataattctttagaaaaagatatagcaacgaagatgcgtcttcgggctttatcaaggtatggacttgatacagagcaggtgtggaggaaccacattttagctggaaatgaagatccacagctcaagtcactctggtatactctgcactttatgaagcaatacacagaagatatggatcagaaatctccaggcaacaaaggatcattggtttatgcaggaattaaatcaattgtaaagtcatcgttgggaatggtggaaagcagcagacataattggagtgggttggataagcaaagtgatattcaaaatttaaatgaagagagaatcttagctttacagctttgtgggtggataaagaaaggaacggatgtagacgtggggccatttttgaactcccttgtacaagaaggggaatgggaaagagctgctgctgtggcattgttcaacttggatattcgccgagcaatccaaatcctgaatgaaggggcatcttctgaaaaaggagatctgaatctcaatgtggtagcaatggctttatcgggttatacggatgagaagaactccctttggagagaaatgtgtagcacactgcgattacagctaaataacccgtatttgtgtgtcatgtttgcatttctgacaagtgaaacaggatcttacgatggagttttgtatgaaaacaaagttgcagtacgtgacagagtggcatttgcttgtaaattccttagtgatactcagttaaatagatacatcgaaaagttgaccaatgaaatgaaagaggctggaaatttggaaggaattttgcttacaggccttactaaagatggagtggacttaatggagagttatgttgatagaactggagatgttcaaacagcaagttactgtatgttacagggttcacctttagatgttcttaaagatgaaagggttcagtactggattgagaattatagaaatttattagatgcctggaggttttggcataaacgagctgaatttgatattcacaggagtaagttggatcccagttccaagcctttagcacaagtttttgtgagttgcaatttctgtggcaagtcaatctcctacagctgttcagctgtgcctcatcagggcagaggttttagtcagtatggtgtgagtggctcaccaacgaaatctaaagtcacaagttgtcctggctgtcgaaaaccacttcctcgatgtgcgctttgtctcattaatatgggaacaccagtttctagctgtcctggaggaaccaaatcagatgaaaaagtggacttgagcaaggacaaaaaattagcccaatttaacaactggtttacatggtgtcataattgcaggcacggtggacatgctggacatatgcttagttggttcagggaccatgcagagtgccctgtgtcggcatgcacgtgtaaatgtatgcagttggatacaacagggaatctggtacctgcagagactgtccagccataaaatgttaccaccttaagagaacccttcaagtgtggagctttctagtaggtgtccttcatagctcagaaacatacctcagaacaagccattcatgacttacctgtaatgggaaaataaatcattctatcagatcagcagttttgatgtttgagtgattttgatatgcttcacagagacaaatgctgccaaaataaacatcgaagtatagacatgagttctgttcagcaggttgaaaagtctgatttagaaaaactttctaagttttggttgaaattatgaacactctagaagcagaatttctggaagagccaagaacagactttgagcctatatcttcaaagctgaaactggatatctttcaataaaatatgtgcacttttaaaataaaatgactaattctgtga

SEQ ID NO: 154201 - DNA, 3095 bp, Homo sapiens
  Payload ID: 10302
  Gene Symbol: MIOS
  Gene Name: missing oocyte, meiosis regulator, homolog (Drosophila)
  Uniprot ID: Q9NXC5
  ENST ID: ENST00000405785
  CDS Start-End: 337-2964
gggaaactccccttccaaggccgaggcgccgctgcgcgtcctccaggcgtggtggtggggtcgtgggtcccagcccagtggtccaggtcacgggccgcacggccgcggccgccatcttgcccgcgtccgggctcctgcggcgggcggggcggtgtcccggccggaagcggctgtgcggcggccgcgctgccacctcagtgctgttgcaaatattctggtgaatgaacacagaatcagcatggctttcctttgctgagaaatcactgatgggaagtgagacttgttaaacttgaaagtgaatggacctgagtggaccctttgatcacatcagtaaacatgagcggtaccaaacctgatattttatgggcaccacaccatgttgatagatttgttgtgtgtgactcagaactaagtctttatcatgtggaatctactgtgaattcagaactcaaagctggatctttacgtttatctgaagactctgcagctacattactgtcaataaattcagatacaccctatatgaaatgtgttgcctggtatcttaattatgatcctgaatgtctgctggcagttggacaagcaaatggtcgagttgtacttacaagccttggtcaagatcataactcaaagttcaaagatttgataggaaaagagtttgttccaaaacatgcacgacaatgtaatacccttgcctggaatccactggatagtaactggctagctgctggtttagataagcacagagctgacttttcagtgctaatatgggatatctgcagcaaatatactcctgatatagttcccatggaaaaagtgaaactttcagcaggtgaaactgaaacaacattattagtaacaaaaccactttatgagttaggacagaatgatgcttgtctgtctctttgttggcttccacgagaccagaaacttctccttgctggtatgcatcgtaacctagctatatttgatcttcggaatacaagccaaaagatgttcgtaaatacaaaagctgttcagggtgtgacggtagacccatatttccacgatcgtgttgcttccttctatgaaggtcaggttgcaatatgggatcttagaaaatttgagaagccagttttgacattgactgagcaaccaaaacccttaacaaaagtagcatggtgtcccactaggactggtctacttgccactttaacaagggatagtaatattattagattgtatgatatgcagcatacacccactcccattggggatgaaactgaacccacaataattgaaagaagtgtgcaaccttgtgacaattacattgcttcctttgcgtggcatccaacaagtcaaaatcgaatgatagttgtaactcccaaccgaacaatgtcagacttcactgtttttgaaaggatatctcttgcctggagcccaattacatctttaatgtgggcttgtggtcgtcatttatatgaatgtacggaagaagaaaatgataattctttagaaaaagatatagcaacgaagatgcgtcttcgggctttatcaaggtatggacttgatacagagcaggtgtggaggaaccacattttagctggaaatgaagatccacagctcaagtcactctggtatactctgcactttatgaagcaatacacagaagatatggatcagaaatctccaggcaacaaaggatcattggtttatgcaggaattaaatcaattgtaaagtcatcgttgggaatggtggaaagcagcagacataattggagtgggttggataagcaaagtgatattcaaaatttaaatgaagagagaatcttagctttacagctttgtgggtggataaagaaaggaacggatgtagacgtggggccatttttgaactcccttgtacaagaaggggaatgggaaagagctgctgctgtggcattgttcaacttggatattcgccgagcaatccaaatcctgaatgaaggggcatcttctgaaaaaggagatctgaatctcaatgtggtagcaatggctttatcgggttatacggatgagaagaactccctttggagagaaatgtgtagcacactgcgattacagctaaataacccgtatttgtgtgtcatgtttgcatttctgacaagtgaaacaggatcttacgatggagttttgtatgaaaacaaagttgcagtacgtgacagagtggcatttgcttgtaaattccttagtgatactcagttaaatagatacatcgaaaagttgaccaatgaaatgaaagaggctggaaatttggaaggaattttgcttacaggccttactaaagatggagtggacttaatggagagttatgttgatagaactggagatgttcaaacagcaagttactgtatgttacagggttcacctttagatgttcttaaagatgaaagggttcagtactggattgagaattatagaaatttattagatgcctggaggttttggcataaacgagctgaatttgatattcacaggagtaagttggatcccagttccaagcctttagcacaagtttttgtgagttgcaatttctgtggcaagtcaatctcctacagctgttcagctgtgcctcatcagggcagaggttttagtcagtatggtgtgagtggctcaccaacgaaatctaaagtcacaagttgtcctggctgtcgaaaaccacttcctcgatgtgcgctttgtctcattaatatgggaacaccagtttctagctgtcctggaggaaccaaatcagatgaaaaagtggacttgagcaaggacaaaaaattagcccaatttaacaactggtttacatggtgtcataattgcaggcacggtggacatgctggacatatgcttagttggttcagggaccatgcagagtgccctgtgtcggcatgcacgtgtaaatgtatgcagttggatacaacagggaatctggtacctgcagagactgtccagccataaaatgttaccaccttaagagaacccttcaagtgtggagctttctagtaggtgtccttcatagctcagaaacatacctcagaacaagccattcatgacttacctgtaatgggaaaataaatcattctatcaga

SEQ ID NO: 154202 - DNA, 844 bp, Homo sapiens
  Payload ID: 10302
  Gene Symbol: MIOS
  Gene Name: missing oocyte, meiosis regulator, homolog (Drosophila)
  ENST ID: ENST00000433056
  CDS Start-End: 653-844
cggccgcgctgccacctcaggtcagtgagcgcgacccggttcgcgtctcgactctcgggagcgccgcggccgcagcgaggggccggagatagcctagttgaaaggcccgggcgtctcggcggggagcgcgttccgcgctgtagggtaatcgcgccgggcggccggccgcctggccgggcctcagcgggagccaccgggggctgcgggcggccgtgggacctgcggagacctcctcggggcgcagggaacacgctacagccttcgccgcggcgggcttgtggggagcggcgtcccagcctttcccgggaggctcagccaggtgcctggagcgggagagtcggactcagattcctgctttacctagaatagcaacgtgccctgttcccgttgtaccctcttaaatactatacttcttaaacggcctgtctcccgggaaatttggatatgtgcagtgcatctcctcgaagatgctgatggtggaaatttcttgaaaccgctctcgtaatttgccacgtgctgttgcaaatattctggtgaatgaacacagaatcagcatggctttcctttgctgagaaatcactgatgggaagtgagacttgttaaacttgaaagtgaatggacctgagtggaccctttgatcacatcagtaaacatgagcggtaccaaacctgatattttatgggcaccacaccatgttgatagatttgttgtgtgtgactcagaactaagtctttatcatgtggaatctactgtgaattcagaactcaaagctggatctttacgtttatctgaagactctgcagctacattactgtcaataaattcagatacaccctatatgaaa

SEQ ID NO: 154203 - DNA, 1075 bp, Homo sapiens
  Payload ID: 10302
  Gene Symbol: MIOS
  Gene Name: missing oocyte, meiosis regulator, homolog (Drosophila)
  ENST ID: ENST00000456533
  CDS Start-End: 538-1075
atcttgcccgcgtccgggctcctgcggcgggcggggcggtgtcccggccggaagcggctgtgcggcggccgcgctgccacctcaggtcagtgagcgcgacccggttcgcgtctcgactctcgggagcgccgcggccgcagcgaggggccggagatagcctagttgaaaggcccgggcgtctcggcggggagcgcgttccgcgctgtagggtaatcgcgccgggcggccggccgcctggccgggcctcagcgggagccaccgggggctgcgggcggccgtgggacctgcggagacctcctcggggcgcagggaacacgctacagccttcgccgcggcgggcttgtggggagcggcgtcccagcctttcccgggaggctcagccaggtgcctggagcgggagagtcggactcagattcctgctttacctagaatagcaacgtgccctgttcccgttgtaccctcttaaatactatacttcttaaacggcctgtctcccgtgaatggacctgagtggaccctttgatcacatcagtaaacatgagcggtaccaaacctgatattttatgggcaccacaccatgttgatagatttgttgtgtgtgactcagaactaagtctttatcatgtggaatctactgtgaattcagaactcaaagctggatctttacgtttatctgaagactctgcagctacattactgtcaataaattcagatacaccctatatgaaatgtgttgcctggtatcttaattatgatcctgaatgtctgctggcagttggacaagcaaatggtcgagttgtacttacaagccttggtcaagatcataactcaaagttcaaagatttgataggaaaagagtttgttccaaaacatgcacgacaatgtaatacccttgcctggaatccactggatagtaactggctagctgctggtttagataagcacagagctgacttttcagtgctaatatgggatatctgcagcaaatatactcctgatatagttcccatggaaaaagtgaaactttcagcaggtgaaactgaaacaacattattagtaacaaaaccactttatg

SEQ ID NO: 154204 - DNA, 602 bp, Homo sapiens
  Payload ID: 10302
  Gene Symbol: MIOS
  Gene Name: missing oocyte, meiosis regulator, homolog (Drosophila)
  ENST ID: ENST00000433635
  CDS Start-End: 153-602
gtcacgggccgcacggccgcggccgccatcttgcccgcgtccgggctcctgcggcgggcggggcggtgtcccggccggaagcggctgtgcggcggccgcgctgccacctcagtgaatggacctgagtggaccctttgatcacatcagtaaacatgagcggtaccaaacctgatattttatgggcaccacaccatgttgatagatttgttgtgtgtgactcagaactaagtctttatcatgtggaatctactgtgaattcagaactcaaagctggatctttacgtttatctgaagactctgcagctacattactgtcaataaattcagatacaccctatatgaaatgtgttgcctggtatcttaattatgatcctgaatgtctgctggcagttggacaagcaaatggtcgagttgtacttacaagccttggtcaagatcataactcaaagttcaaagatttgataggaaaagagtttgttccaaaacatgcacgacaatgtaatacccttgcctggaatccactggatagtaactggctagctgctggtttagataagcacagagctgacttttcagtgctaatatgggatatctgcagcaaa

SEQ ID NO: 154205 - DNA, 536 bp, Homo sapiens
  Payload ID: 10302
  Gene Symbol: MIOS
  Gene Name: missing oocyte, meiosis regulator, homolog (Drosophila)
  ENST ID: ENST00000445169
  CDS Start-End: 345-536
cggtgagctctgttctcttctcatatgagtaatgaaaattaagaggatgaatgaaacctcacacatgttgtggactttgctgaataggttagcaaatgactgcaggccttttgtatattttaagggaaatttggatatgtgcagtgcatctcctcgaagatgctgatggtggaaatttcttgaaaccgctctcgtaatttgccacgtgctgttgcaaatattctggtgaatgaacacagaatcagcatggctttcctttgctgagaaatcactgatgggaagtgagacttgttaaacttgaaagtgaatggacctgagtggaccctttgatcacatcagtaaacatgagcggtaccaaacctgatattttatgggcaccacaccatgttgatagatttgttgtgtgtgactcagaactaagtctttatcatgtggaatctactgtgaattcagaactcaaagctggatctttacgtttatctgaagactctgcagctacattactgtcaataaattcagatacaccctatatgaaa

SEQ ID NO: 154206 - DNA, 939 bp, Homo sapiens
  Payload ID: 10303
  Gene Symbol: MITD1
  Gene Name: MIT, microtubule interacting and transport, domain containing 1
  Uniprot ID: Q8WV92
  ENST ID: ENST00000289359
  CDS Start-End: 78-827
acatgaccacttcccggaagcgcagcagacccgctcaacttcatcctgggttgaggcggaggagaacttccagaattatggcgaagtccgggctgaggcaggacccgcagagcacagctgcagccactgtgctaaagcgggcagtagaactagattcggagtcgcggtatccgcaggctctggtgtgttaccaagaggggattgatctgctcctgcaggttctgaaaggtaccaaagataatactaagagatgtaatctcagagaaaaaatttccaaatacatggacagagcggaaaacataaagaagtacttggaccaagaaaaagaagatggaaaatatcacaagcaaattaaaatagaagagaatgcaacaggtttcagttatgagtcactttttcgcgaataccttaatgagacagttacagaagtttggatagaagatccttatattagacatactcatcagctgtataactttcttcgattttgtgagatgcttattaagagaccatgtaaagtaaaaactattcaccttctcacctctctggatgaaggcattgagcaagtgcagcaaagtagaggcctgcaagaaatagaagagtcactcaggagtcacggagtgctgttggaagttcaatactcttcttcaatacatgaccgagaaattaggttcaacaatggatggatgattaagattggaaggggacttgattattttaagaaaccacagagtcgtttttcccttggatattgtgattttgatttaagaccatgtcatgaaacaacagtagacatttttcataagaagcatacaaaaaatatatgatgggtggtagcctaatttgtattatgtctactttaagtgaatattggattttttttaaaagatcacttttataatgtatgaatttaacaataaacttttatatttctactaa

SEQ ID NO: 154207 - DNA, 662 bp, Homo sapiens
  Payload ID: 10303
  Gene Symbol: MITD1
  Gene Name: MIT, microtubule interacting and transport, domain containing 1
  ENST ID: ENST00000409107
  CDS Start-End: 70-662
acttcccggaagcgcagcagacccgctcaacttcatcctgggttgaggcggaggagaacttccagaattatggcgaagtccgggctgaggcaggacccgcagagcacagctgcagccactgtgctaaagcgggcagtagaactagattcggagtcgcggtatccgcaggctctggtgtgttaccaagaggggattgatctgctcctgcaggttctgaaaggtaccaaagataatactaagagatgtaatctcagagaaaaaatttccaaatacatggacagagcggaaaacataaagaagtacttggaccaagaaaaagaagatggaaaatatcacaagcaaattaaaatagaagagaatgcaacaggtttcagttatgagtcactttttcgcgaataccttaatgagacagttacagaagtttggatagaagatccttatattagacatactcatcagggcattgagcaagtgcagcaaagtagaggcctgcaagaaatagaagagtcactcaggagtcacggagtgctgttggaagttcaatactcttcttcaatacatgaccgagaaattaggttcaacaatggatggatgattaagattggaaggggacttgattattttaagaaaccacagagtcgtttttcccttggatattgtga

SEQ ID NO: 154208 - DNA, 999 bp, Homo sapiens
  Payload ID: 10303
  Gene Symbol: MITD1
  Gene Name: MIT, microtubule interacting and transport, domain containing 1
  ENST ID: ENST00000438121
  CDS Start-End: 55-216
agcagacccgctcaacttcatcctgggttgaggcggaggagaacttccagaattatggcgaagtccgggctgaggcaggacccgcagagcacagctgcagccactgtgctaaagcgggcagtagaactagattcggagtcgcggtatccgcaggctctggtgtgttaccaagaggggattgatctgctcctgcaggttctgaaaggtgagcaatgagccaaggcggggaggacctgaggaaaaggagctggttcctgctgtgtctggggtgaagtgaaagagttaaaaatgatttttccacaccacgaagaagcagttaaatacagaaggtaccaaagataatactaagagatgtaatctcagagaaaaaatttccaaatacatggacagagcggaaaacataaagaagtacttggaccaagaaaaagaaggtaaagaggttgttttagaaaatgcatccataaacaactgtgactgtccattcacccaatgtttctggctcctgccctttggagctctgtgtggtctggaccagttgtccctgggagcttacaggatttaatctgtatttccactcccatacaggagttgttcttaattttttgtttgtttgtttgttttggcttttgtttttagttgggggtgggaatatcagacacccctttgaacatctcatgaaagctatacttactggagaatgttccatgccatttttaaggggttcacaaatccctatgaagcttatgtgtggaccctatgttaagaaatactacagggaatactgaatgtaaattgtgtattttatttatatttccctttatgaaatgaccaaaatcatgaaagaagctaaagaaactcctgggatttctctcagattttgttgtgaatcaaaacacctcaggagttaagcattcctaatgattagaggtcaggtaggtattgttccctattattagttccctactcctaagcatccagtttacaaatgtctgtaaatgg

SEQ ID NO: 154209 - DNA, 971 bp, Homo sapiens
  Payload ID: 10303
  Gene Symbol: MITD1
  Gene Name: MIT, microtubule interacting and transport, domain containing 1
  ENST ID: ENST00000422537
  CDS Start-End: 1-696
ctaaagcgggcagtagaactagattcggagtcgcggtatccgcaggctctggtgtgttaccaagaggggattgatctgctcctgcaggttctgaaaggtaccaaagataatactaagagatgtaatctcagagaaaaaatttccaaatacatggacagagcggaaaacataaagaagtacttggaccaagaaaaagaagatggaaaatatcacaagcaaattaaaatagaagagaatgcaacaggtttcagttatgagtcactttttcgcgaataccttaatgagacagttacagaagtttggatagaagatccttatattagacatactcatcagctgtataactttcttcgattttgtgagatgcttattaagagaccatgtaaagtaaaaactattcaccttctcacctctctggatgaaggcattgagcaagtgcagcaaagtagaggcctgcaagaaatagaagagtcactcaggagtcacggagtgctgttggaagttcaatactcttcttcaatacatgaccgagaaattaggttcaacaatggatggatgattaagattggaaggggacttgattattttaagaaaccacagagtcgtttttcccttggatattgtgattttgatttaagaccatgtcatgaaacaacagtagacatttttcataagaagcatacaaaaaatatatgatggattcaggttacattcctgccaaggattttgatgcctaccaattacaacagagggagaattctgccaaaagaatagaattggtttgccttctagattcatatggtcatggatccagtcttccacagccagattttgatagacatcattggaaattgactgtaaaatgagcccattttttactgtttttttaaagccagctgctgggacctggcagttacaaagtaactggaagcaattcttcattgaaaatgggatcagcatgcttttaaaaa

SEQ ID NO: 154210 - DNA, 7439 bp, Homo sapiens
  Payload ID: 10304
  Gene Symbol: MARC1
  Gene Name: mitochondrial amidoxime reducing component 1
  Uniprot ID: Q5VT66
  ENST ID: ENST00000366910
  CDS Start-End: 187-1200
agctgagccaccacctcccactccccgcgccgccccccagaaggacgcactgctctgattggcccggaagggttcaggagctgcccagcctttgggctcggggccaaaggccgcaccttcccccagcggccccgggcgaccagcgcgctccggccttgccgccgccacctcgcggagaagccagccatgggcgccgccggctcctccgcgctggcgcgctttgtcctcctcgcgcaatcccggcccgggtggctcggggttgccgcgctgggcctgaccgcggtggcgctgggggctgtcgcctggcgccgcgcatggcccacgcggcgccggcggctgctgcagcaggtgggcacagtggcgcagctctggatctaccctgtgaaatcctgcaagggggtgccggtgagcgaggcggagtgcacggccatggggctgcgcagcggcaacctgcgggacaggttttggcttgtgatcaaccaggagggaaacatggttactgctcgccaggaacctcgcctggtcctgatttccctgacctgcgatggtgacaccctgactctcagtgcagcctacacaaaggacctactactgcctatcaaaacgcccaccacaaatgcagtgcacaagtgcagagtgcacggcctggagatagagggcagggactgtggcgaggccaccgcccagtggataaccagcttcctgaagtcacagccctaccgcctggtgcacttcgagcctcacatgcgaccgagacgtcctcatcaaatagcagacttgttccgacccaaggaccagattgcttactcagacaccagcccattcttgatcctttctgaggcgtcgctggcggatctcaactccaggctagagaagaaagttaaagcaaccaacttcaggcccaatattgtaatttcaggatgcgatgtctatgcagaggattcttgggatgagcttcttattggtgacgtggaactgaaaagggtgatggcttgttccagatgcattttaaccacagtggacccagacaccggtgtcatgagcaggaaggaaccgctggaaacactgaagagttatcgccagtgtgacccttcagaacgaaagttatatggaaaatcaccactctttgggcagtattttgtgctggaaaacccagggaccatcaaagtgggagaccctgtgtacctgctgggccagtaatgggaaccgtatgtcctggaatattagatgccttttaaaaatgttctcaaaaatgacaacacttgaagcatggtgtttcagaactgagacctctacattttctttaaatttgtgattttcacatttttcgtcttttggacttctggtgtctcaatgcttcaatgtcccagtgcaaaaagtaaagaaatatagtctcaataacttagtaggacttcagtaagtcacttaaatgacaagacaggattctgaaaactccccgtttaactgattatggaatagttctttctcctgcttctccgtttatctaccaagagcgcagacttgcatcctgtcactaccactcgttagagaaagagaagaagagaaagaggaagagtgggtgggctggaagaatatcctagaatgtgttattgcccctgttcatgaggtacgcaatgaaaattaaattgcaccccaaatatggctggaatgccacttcccttttcttctcaagccccgggctagcttttgaaatggcataaagactgaggtgaccttcaggaagcactgcagatattaattttccatagatctggatctggccctgctgcttctcagacagcattggatttcctaaaggtgctcaggaggatggttgtgtagtcatggaggacccctggatccttgccattcccctcagctaatgacggagtgctccttctccagttccgggtgaaaaagttctgaattctgtggaggagaagaaaagtgattcagtgatttcagatagactactgaaaacctttaaagggggaaaaggaaagcatatgtcagttgtttaaaacccaatatctattttttaactgattgtataactctaagatctgatgaagtatattttttattgccattttgtcctttgattatattgggaagttgactaaacttgaaaaatgtttttaaaactgtgaataaatggaagctactttgactagtttcagatcttactaacttcttggcacaaagttagactgtgaaagctgactgaggctgggcacaggggctcatgcctgtaattccagcactttgggaggccaaggtgggagaatggcttgagcccaggagtttgagaccagcccagaaaatataatgggatcctgtcgctacaaaatgtttttaaaatgcactcggtgtggtggtgtgtgcctgcagtcctggctatggctactcgggaggatgaggtagaaggattggttgagcccaggagcgggagattgaggctgcagtgagttatgattgcaccactacactccagcctgagtgatagagtgagaccctatctctaaaaaagaaacaggaaaaaaaaagaaagctgactgaggtgaatgggcaaagccagtaattctgacacctgaccacagctgggtcttctgcataatggacctcctcacccacagcctcccaggcaagcacccatgtttgaaggactatcaagtcaacatgctttttaccaaaagctgcacatttttcactttgattttataaaagaggtcagtaatcgctgaaatctagctgagccctgaagtaaagttctgagcaaagaggtgcatgtgcttgttttatggttggtgaattattacagtttgttttctgcatgcttggcatgaggtgaataattacatcaattttccagagaacctgggccatcaccttccccaacaagtccagttgatgttgaaactacagatagattgagacaaagcgaagtgttcagcaagtagcattactaatgggaccgggggacccgtgggagagtgagtgtacacaggatttaggaaaccatgtgaatatgggctctctgggaatagccaataggtagggagcaatcagaaacccaaggtttggtggctcttcctaggtatttataattagtggcaagtgaaagccttagtcctgaatttctaaccacttgtaagaactaacagccacttctctgtgccccgtccgggcagtaaccatcattctccatggacaggctctcggggtagctagctctgcagggcagcacccacgtggaagggagcacccagaaaccctcctcactgggcagacctgtccttctgtgcctcacagtgtgaggaagattcctgtttgaagagagaagttccagtgacctctagaatctcagagtagttgccaagctttctgtcagtgagatttaaaggccatttacttgtgtttattttatatttaatgagttggttaatgccagagacaaagctgatatcccatttattttggatactgagcatttgcacactattccacttgaaatatagaatcaggaatgtaggccatcccagactttcagatcttacaacagcaaatgacagatgtttgagatcaggccaaaatatccaccctcggtgggcatctcctctgtgtggcaacttatgctgcagccacagtggggagtcacaaactcagagctggaggtcttgaaaaggacaatgtgggccaggctccggaggggctgcctaaaggcttgcttttgtgactctcctgcagaaaatgttagaaacttccaaccgaaagacgagggcagcaacttatacacacgaaggcagaaagaaattggggaaggggaggctgttggaattcaggccgttgtcctatagggagaaatactcctcctctccttctccctttactgataacggggcatggtgaggagatgagcttgtgagggtctgccagtttggtaagagtgcatggggaggttgggtaaattagactagccaaatgggacttcgggaaaccatttatgaggctgtcaccaacagtgatggcaggctgaaattccaggcaagtgctcccagcattccaagagtgtatcaaattaaagcaacccatgatggtggagaacagatacattaaagttccttgaaaatgacagagtggctctcagaccagaccttgattgtgggtataatcggagtgttgctaccacaccctaacactgcatttcccgtgttttattggtccatggaattctgaaagtttgcctttcgggatgcttctaaaaacaattccatggaccagtaagtttggaaagtcctgcgtgcctcacttctcttcaaaggcaaaaggctctggagaggccttcatgaagacatctgtgtttaatgctgcccttcccaaaggtctgtttttgactgtcttttgagaaatgatcctctgatctctaggcagaatgccagtgagccaaggaatcccagttagcaggaggggtgcactcatgggaagactgaagaagttaaaagttcccgccaagtgaaggagacctatcttgggacacttccccttgtcctctcccttgcccctcttgctggagtaaaaggatggaactgggacttgataggttaaaggaggtgtggagaagtgtcttagaccagctctcctgttgtgggccttagggagaagcactctctttcttcgggatcattttccaaacatgcatttttggatggatagggtggatcagggtgagggaagggaaaccaaactctctctaaccttgcccttacagcaatacctgtgatgtaagttacaaaaccacctgtgatgaaagtgctccaggatgcttcatgcaccagggaggggtgccctgtttctcttctgctagcttctcctttcttttttttttttcttcttttttttgagacagtgtctcactctgttgccaggctggagtgcagtggtgagatctcagctcactgcagcctctgcctcccaggttcaagcaattcttctgcctcagcctcccgagtagctggtgtgtctggagttggttccttctggtgggttcttggtctcgctgacttcaagaatgaagccacagaccttcgcagtgagtgttacagctcttaaaggtggcacggacccaaagtgagcagtagcaagatttattgtggagagcgaaagaacaaagcttcggaaggggacccaaatgggctgctgctgctggctggggtggccaccttttattcccttatttgtccctgcccatgtcctgctgattgctccattttacagagtgctgattggtccattttacagagtgctgattggtgcatttacaatcctttagctagacacagagtgccgattggtgagtttttacagtgctgattggtgcatttacaatcctttagctagacacagaacactgactggtgcatttataatcctctagctagaaagaaaagttctccaagtccccactagacccaggaagtccagctggcttcacctctcactgggactacaggtgcacaccaccacacccagctaatttttgtatttttagtagagacggggtttcaccatgttgttcaggatggtctcgaactcttgatctcgtgatctgcccgcctcggcctcccaaagtgctgggattacagttgtgagccaccacgcccggccctagcttttcctttctgttgcaagtcctctcaactagtgttgccttccaccctacaaagcagaattacctcagaagtcctatggccctgactctatctatgtctgcacaaagcactactgtgctttgctgtctgcaagaacagagattgtttgcttcaaccactttctctgaatggatgaatgagttatgatgatatctaaagttacccaatttcaagcaagaggaagaatctggctcggtaccacagatgttcttggaattgggatagtaaaaaagtccctgaggcatcccttggtctgctctgaccacactctcttcacaggaagaggcttgggccacagctctgactataactctgctcttcctccaaacacagctgaggaattgggtggtggggcacctgctcccatgctctgtggcctggctcagagagaagagttgccttaattacattattattcttcctggacaggctgtaggttgtgtaaagtaacaaaaaggactgagaagtgacttcccattcagcctcttccaaggccatttttgataggcaggtcaaattcactcacatttggttatttgttggccagtctagtgcattcacccttgctggtcctcagtcatgctcctttacctttacagagcatcctagactgctcttcctcttaccttccttgtgaaacccacaacccctagtccctccccttccctggcatttgttatgccctctaccaatccctgacctggtattggtcagtctccaatcctggtggatccctgtgggaactaagttaagtctaacttttgtctccctctttagaatttactgggagtactgtaaataaactattgttgttataattatttctgattaacatttttacacctaacaaagtctcagagagattgaatttactgggttgaagggaggagcaccttccacatgacctgcccagcaattaaagccgcttgttagtccgaggcccaggacggccgaggacagctggagagctcttcgttgcaggcagctctggttaacatcaaccgggaaagctctttgtaaacacatgaataattgatcgtccagcgctcacatagctaccgcggatctgagcccgtatgactcatttgcgagccattcctgtcgtctggatgccataacattggaggaatgatgatcgtttcttggaggttcttctgtggccagagttgccaagaccaaggctgtaatggtttgttatgatgacctttgttattccattaggctcaattgctttaaaaaatgatgtgtgcatactttaggaacgtttttaccctttatgttgacctgacatcatagtttatattataaaatgtattaatgacagaagagtgttttcatgtcccaaggacaaattttaacaaccataatctgccctcagtcatcataaatataaatgtattggtcaaacagatctcgttaatgtggccaagataaatgcaagtctatattttaaggcagtcgaagtcctagagaatatatctggagcttttgtggggctaagagatcttgtatatatgctatcaaaaggctgagaaaattaacatgttcccccctctgattttgcattggacagatataaatgtcttggggatgtcaagtaagattgttcacatagtttctggacaccattaatgcctgatggggtgaatcttagttcttaaagctatattctgctcattatgctcacagggcttttgaaaagagaacaaaataaagatttcaagtcttagc

SEQ ID NO: 154211 - DNA, 1760 bp, Homo sapiens
  Payload ID: 10304
  Gene Symbol: MARC1
  Gene Name: mitochondrial amidoxime reducing component 1
  ENST ID: ENST00000407981
  CDS Start-End: 1-790
gttttggcttgtgatcaaccaggagggaaacatggttactgctcgccaggaacctcgcctggtcctgatttccctgacctgcgatggtgacaccctgactctcagtgcagcctacacaaaggacctactactgcctatcaaaacgcccaccacaaatgcagtgcacaagtgcagagtgcacggcctggagatagagggcagggactgtggcgaggccaccgcccagtggataaccagcttcctgaagtcacagccctaccgcctggtgcacttcgagcctcacatgcgaccgagacgtcctcatcaaatagcagacttgttccgacccaaggaccagattgcttactcagacaccagcccattcttgatcctttctgaggcgtcgctggcggatctcaactccaggctagagaagaaagttaaagcaaccaacttcaggcccaatattgtaatttcaggatgcgatgtctatgcagaggtaacactatgcccctttggatctttccttggatttgacttcttttttaaggattcttgggatgagcttcttattggtgacgtggaactgaaaagggtgatggcttgttccagatgcattttaaccacagtggacccagacaccggtgtcatgagcaggaaggaaccgctggaaacactgaagagttatcgccagtgtgacccttcagaacgaaagttatatggaaaatcaccactctttgggcagtattttgtgctggaaaacccagggaccatcaaagtgggagaccctgtgtacctgctgggccagtaatgggaaccgtatgtcctggaatattagatgccttttaaaaatgttctcaaaaatgacaacacttgaagcatggtgtttcagaactgagacctctacattttctttaaatttgtgattttcacatttttcgtcttttggacttctggtgtctcaatgcttcaatgtcccagtgcaaaaagtaaagaaatatagtctcaataacttagtaggacttcagtaagtcacttaaatgacaagacaggattctgaaaactccccgtttaactgattatggaatagttctttctcctgcttctccgtttatctaccaagagcgcagacttgcatcctgtcactaccactcgttagagaaagagaagaagagaaagaggaagagtgggtgggctggaagaatatcctagaatgtgttattgcccctgttcatgaggtacgcaatgaaaattaaattgcaccccaaatatggctggaatgccacttcccttttcttctcaagccccgggctagcttttgaaatggcataaagactgaggtgaccttcaggaagcactgcagatattaattttccatagatctggatctggccctgctgcttctcagacagcattggatttcctaaaggtgctcaggaggatggttgtgtagtcatggaggacccctggatccttgccattcccctcagctaatgacggagtgctccttctccagttccgggtgaaaaagttctgaattctgtggaggagaagaaaagtgattcagtgatttcagatagactactgaaaacctttaaagggggaaaaggaaagcatatgtcagttgtttaaaacccaatatctattttttaactgattgtataactctaagatctgatgaagtatattttttattgccattttgtcctttgattatattgggaagttgactaaacttgaaaaatgtttttaaaactgtgaataaatggaagctactttga

SEQ ID NO: 154212 - DNA, 444 bp, Homo sapiens
  Payload ID: 10304
  Gene Symbol: MARC1
  Gene Name: mitochondrial amidoxime reducing component 1
  ENST ID: ENST00000443880
  CDS Start-End: 1-360
cgaccgagacgtcctcatcaaatagcagacttgttccgacccaaggaccagattgcttactcagacaccagcccattcttgatcctttctgaggcgtcgctggcggatctcaactccaggctagagaagaaagttaaagcaaccaacttcaggcccaatattgtaatttcaggatgcgatgtctatgcagaggattcttgggatgagcttcttattggtgacgtggaactgaaaagggtgatggcttgttccagatgcattttaaccacagtggacccagacaccggtgtcatgagcaggaaggaaccgctggaaacactgaagagggaaagtgacgtacacactgatccccatggttgaaggaatggctggagtctgccgttgttgcttccatgacattttgcccctaatggaaagaatatagcacagttactgcatgggtac

SEQ ID NO: 154213 - DNA, 443 bp, Homo sapiens
  Payload ID: 10304
  Gene Symbol: MARC1
  Gene Name: mitochondrial amidoxime reducing component 1
  ENST ID: ENST00000463976
  CDS Start-End: 1-299
tgcgaccgagacgtcctcatcaaatagcagacttgttccgacccaaggaccagattgcttactcagacaccagcccattcttgatcctttctgaggcgtcgctggcggatctcaactccaggctagagaagaaagttaaagcaaccaacttcaggcccaatattgtaatttcaggatgcgatgtctatgcagaggtaacactatgcccctttggatctttccttggatttgacttcttttttaagatttattcagcacttaataagtgcagacttctgtgtggaggatacaaatgttgatgggtcagagactgtcatcaaggaggcagttcagtatctaaggcttctaaggagaattctgagttgacagggaaaaatggaatcaaagcaattgagttttaaccttttatcctcagaggagccaattatattcttcacttttgc

SEQ ID NO: 154214 - DNA, 1335 bp, Homo sapiens
  Payload ID: 10305
  Gene Symbol: MARC2
  Gene Name: mitochondrial amidoxime reducing component 2
  Uniprot ID: Q969Z3
  ENST ID: ENST00000359316
  CDS Start-End: 264-1037
cgtcgctcccacggcgcccagggtacccccgccgctgtctgcctgtcttcctccattaccgcgcaggcttggtcaccgcattaaggcattcccgctctccgcggaactgctctgccgtctcggcggtgaaagtgtgagagggtccgtagttgggtcaactttgactcctctcgcctgcccggatccttaagggcctcctcgtcctcccggtctccggtcgctgccgggtctgtgcgccggtccgcgcccgccctcgctctgccatgggcgcttccagctcctccgcgctggcccgcctcggcctcccagcccggccctggcccaggtggctcggggtcgccgcgctaggactggccgccgtggccctggggactgtcgcctggcgccgcgcatggcccaggcggcgccggcggctgcagcaggtgggcaccgtggcgaagctctggatctacccggtgaaatcctgcaaaggggtgccggtgagcgaggctgagtgcacggccatggggctgcgcagcggcaacctgcgggacaggttttggctggtgattaaggaagatggacacatggtcactgcccgacaggagcctcgcctcgtgctcatctccatcatttatgagaataactgcctgatcttcagggctccagacatggaccagctggttttgcctagcaagcagccttcctcaaacaaactccacaactgcaggatatttggccttgacattaaaggcagagactgtggcaatgaggcagctaagtggttcaccaacttcttgaaaactgaagcgtatagattggttcaatttgagacaaacatgaagggaagaacatcaagaaaacttctccccactcttgatcagaatttccaggtggcctacccagactactgcccgctcctgatcatgacagatgcctccctggtagatttgaataccaggatggagaagaaaatgaaaatggagaatttcaggccaaatattgtggtgaccggctgtgatgcttttgaggaggcttcagcaaccaggagggattgactgagatcttaacaacagcagcaacgatacatcagcaaatccttattatccagccttcaactatctttaccctggaaaacaatctcgatttttgacttttcaaagttgtgtatgctccaggttaatgcaaggaaagtattagaggggggaatatgaaagtatatatataaattttaggtactgaaggctttaaaaataattaagatcatcaaaaatgctattttgaatgttatcatggctattacacttttacttcctgactttaatattgatgaataaagcaagtttaatgaatcaa

SEQ ID NO: 154215 - DNA, 2134 bp, Homo sapiens
  Payload ID: 10305
  Gene Symbol: MARC2
  Gene Name: mitochondrial amidoxime reducing component 2
  Uniprot ID: Q969Z3
  ENST ID: ENST00000366913
  CDS Start-End: 199-1206
ggcttggtcaccgcattaaggcattcccgctctccgcggaactgctctgccgtctcggcggtgaaagtgtgagagggtccgtagttgggtcaactttgactcctctcgcctgcccggatccttaagggcctcctcgtcctcccggtctccggtcgctgccgggtctgtgcgccggtccgcgcccgccctcgctctgccatgggcgcttccagctcctccgcgctggcccgcctcggcctcccagcccggccctggcccaggtggctcggggtcgccgcgctaggactggccgccgtggccctggggactgtcgcctggcgccgcgcatggcccaggcggcgccggcggctgcagcaggtgggcaccgtggcgaagctctggatctacccggtgaaatcctgcaaaggggtgccggtgagcgaggctgagtgcacggccatggggctgcgcagcggcaacctgcgggacaggttttggctggtgattaaggaagatggacacatggtcactgcccgacaggagcctcgcctcgtgctcatctccatcatttatgagaataactgcctgatcttcagggctccagacatggaccagctggttttgcctagcaagcagccttcctcaaacaaactccacaactgcaggatatttggccttgacattaaaggcagagactgtggcaatgaggcagctaagtggttcaccaacttcttgaaaactgaagcgtatagattggttcaatttgagacaaacatgaagggaagaacatcaagaaaacttctccccactcttgatcagaatttccaggtggcctacccagactactgcccgctcctgatcatgacagatgcctccctggtagatttgaataccaggatggagaagaaaatgaaaatggagaatttcaggccaaatattgtggtgaccggctgtgatgcttttgaggaggatacctgggatgaactcctaattggtagtgtagaagtgaaaaaggtaatggcatgccccaggtgtattttgacaacggtggacccagacactggagtcatagacaggaaacagccactggacaccctgaagagctaccgcctgtgtgatccttctgagagggaattgtacaagttgtctccactttttgggatctattattcagtggaaaaaattggaagcctgagagttggtgaccctgtgtatcggatggtgtagtgatgagtgatggatccactagggtgatatggcttcagcaaccaggagggattgactgagatcttaacaacagcagcaacgatacatcagcaaatccttattatccagccttcaactatctttaccctggaaaacaatctcgatttttgacttttcaaagttgtgtatgctccaggttaatgcaaggaaagtattagaggggggaatatgaaagtatatatataaattttaggtactgaaggctttaaaaataattaagatcatcaaaaatgctattttgaatgttatcatggctattacacttttacttcctgactttaatattgatgaataaagcaagtttaatgaatcaactaaaaagctgcaaaaatgtttttaaaatgtgtgccttttattacctatcagtctatgttttgggagaaatgggaagcaacagatcactgtgtcctgatgtgcaggacgcatgttaccacactcacaaatgcctaatattggtctttatgtggccattgagtcctgttgactttccactcatgtgctttttactctagcattatggaatctgggctgtacttgagtatggaaattctcttatagacttagttttagtactctattacacctttactaagccacataaaagtaatctgtttgtgtgtaactgccagatataccacctggaattccaagtaagataaggaagaggatgacatttaaaagagaatggaattttgagagtaggaatgcaaggaagacagcatgaacatatttttttcagtgcaaataattttttcgtaacaaagaaacgaacaactttggtatgatcttaagcaaaaatactcactgaaatagtatgtggatgaattcacctacttacaattttatggtttctttgtaaataataaatgtgaatctcaatcctgcttta

SEQ ID NO: 154216 - DNA, 585 bp, Homo sapiens
  Payload ID: 10305
  Gene Symbol: MARC2
  Gene Name: mitochondrial amidoxime reducing component 2
  ENST ID: ENST00000425560
  CDS Start-End: 1-519
ggacacatggtcactgcccgacaggagcctcgcctcgtgctcatctccatcatttatgagaataactgcctgatcttcagggctccagacatggaccagctggttttgcctagcaagcagccttcctcaaacaaactccacaactgcaggatatttggccttgacattaaaggcagagactgtggcaatgaggcagctaagtggttcaccaacttcttgaaaactgaagcgtatagattggttcaatttgagacaaacatgaagggaagaacatcaagaaaacttctccccactcttgatcagaatttccaggtggcctacccagactactgcccgctcctgatcatgacagatgcctccctggtagatttgaataccaggatggagaagaaaatgaaaatggagaatttcaggccaaatattgtggtgaccggctgtgatgcttttgaggaggatacctgggatgaactcctaattggtagtgtagaagtgaaaaaggtaatggcatgccccaggtaaggagcctagctagaccccaggactgtggtgtggcccattcattggttcctaagcatcacctaaccc

SEQ ID NO: 154217 - DNA, 758 bp, Homo sapiens
  Payload ID: 10305
  Gene Symbol: MARC2
  Gene Name: mitochondrial amidoxime reducing component 2
  ENST ID: ENST00000469583
  CDS Start-End: 308-592
gaccaccccagaggccgccccattagctcgcttgctttgggcggcgtcgctcccacggcgcccagggtacccccgccgctgtctgcctgtcttcctccattaccgcgcaggcttggtcaccgcattaaggcattcccgctctccgcggaactgctctgccgtctcggcggtgaaagtgtgagagggtccgtagttgggtcaactttgactcctctcgcctgcccggatccttaagggcctcctcgtcctcccggtctccggtcgctgccgggtctgtgcgccggtccgcgcccgccctcgctctgccatgggcgcttccagctcctccgcgctggcccgcctcggcctcccagcccggccctggcccaggtggctcggggtcgccgcgctaggactggccgccgtggccctggggactgtcgcctggcgccgcgcatggcccaggcggcgccggcggctgcagcaggtgggcaccgtggcgaagctctggatctacccggtgaaatcctgcaaaggggtgccggtgagcgaggctgagtgcacggccatggggctgcgcagcggcaacctgcgggacagaatgtgtgcatgaagaggaaaggctgtttgggaggtttcctgatgtaggacccccgcatgccgcggttttggctggtgattaaggaagatggacacatggtcactgcccgacaggagcctcgcctcgtgctcatctccatcatttatgagaataactgcctgatcttcagggctccaga

SEQ ID NO: 154218 - DNA, 11714 bp, Homo sapiens
  Payload ID: 10306
  Gene Symbol: MAVS
  Gene Name: mitochondrial antiviral signaling protein
  Uniprot ID: Q7Z434
  ENST ID: ENST00000428216
  CDS Start-End: 129-1751
gcgggaagggtcctgggccccgggcggcggtcgccaggtctcagggccgggggtacccgagtctcgtttcctctcagtccatccacccttcatggggccagagccctctctccagaatctgagcagcaatgccgtttgctgaagacaagacctataagtatatctgccgcaatttcagcaatttttgcaatgtggatgttgtagagattctgccttacctgccctgcctcacagcaagagaccaggatcgactgcgggccacctgcacactctcagggaaccgggacaccctctggcatctcttcaatacccttcagcggcggcccggctgggtggagtacttcattgcggcactgaggggctgtgagctagttgatctcgcggacgaagtggcctctgtctaccagagctaccagcctcggacctcggaccgtcccccagacccactggagccaccgtcacttcctgctgagaggccagggccccccacacctgctgcggcccacagcatcccctacaacagctgcagagagaaggagccaagttaccccatgcctgtccaggagacccaggcgccagagtccccaggagagaattcagagcaagccctgcagacgctcagccccagagccatcccaaggaatccagatggtggccccctggagtcctcctctgacctggcagccctcagccctctgacctccagcgggcatcaggagcaggacacagaactgggcagtacccacacagcaggtgcgacctccagcctcacaccatcccgtgggcctgtgtctccatctgtctccttccagcccctggcccgttccacccccagggcaagccgcttgcctggacccacagggtcagttgtatctactggcacctccttctcctcctcatcccctggcttggcctctgcaggggctgcagagggtaaacagggtgcagagagtgaccaggccgagcctatcatctgctccagtggggcagaggcacctgccaactctctgccctccaaagtgcctaccaccttgatgcctgtgaacacagtggccctgaaagtgcctgccaacccagcatctgtcagcacagtgccctccaagttgccaactagctcaaagccccctggtgcagtgccttctaatgcgctcaccaatccagcaccatccaaattgcccatcaactcaacccgtgctggcatggtgccatccaaagtgcctactagcatggtgctcaccaaggtgtctgccagcacagtccccactgacgggagcagcagaaatgaggagaccccagcagctccaacacccgccggcgccactggaggcagctcagcctggctagacagcagctctgagaataggggccttgggtcggagctgagtaagcctggcgtgctggcatcccaggtagacagcccgttctcgggctgcttcgaggatcttgccatcagtgccagcacctccttgggcatggggccctgccatggcccagaggagaatgagtataagtccgagggcacctttgggatccacgtggctgagaaccccagcatccagctcctggagggcaaccctgggccacctgcggacccggatggcggccccaggccacaagccgaccggaagttccaggagagggaggtgccatgccacaggccctcacctggggctctgtggctccaggtggctgtgacaggggtgctggtagtcacactcctggtggtgctgtaccggcggcgtctgcactagtgaagccctgggctcttcccaccacccatctgttccgttcctgcagtacacctggcccctctccgaagccccttgtccctttcttggggattgtggaggctgggtcagaggggagttaagggactgcaggcctggcagcaggacatgccttggctgaaccaagtcctgagagcagcatctctgtccccacggtgccttgtgtgggtccccgtccttggctttctgggtcctgggctgcccccagtgctccagaccttccccactggcaatccaggttatcatccatgtcctccagaggagcttcctcctccaggcctcagccctgttggcccaggtggagcaggagggaccactggaacatgtggtgcttgggaatgcctctcctgttgcattggtccctgaaggcctcagggcaggtatgtggtgtgtgggcgactccacaagacctgcctcccatcctggcagcccagcctgagaccgttgcattgaggcaggcaggagcggcagggtggctgctctccaggagcccaactgccttgagttcctgccccactgggccccctcccctgctgggcaatcctgggaaggtctggaggttcctgtggacctcagggaagccaggggcagctgtcaggcctgaggaagacctgtggagctcctctccagcctcctctttccctcccctctggtctccattctcttcagctccctacatgggctggggaggagacacctggtgggcagagctcaggcagaggtttggatttcagctccctcacttccggggctgtgtggctttggcagatgtcagacttctggtcttgcttctccacgtggacagtgagtatctggctcattcttcactgggttcttctgagattgaacctacaggtgtttgccaagtgcctggcccagagcaagtggccactgcttctcccatctctctcctgcccaacctggtagagctgagggcatgagaggcagagtgcacagtggtcaagggtgcagctctgcagcacaggcagcctaggcctgcgtcccaacctgcctctcaccagctctgtgaccttgggcaagggatttatctgtctgtcccttagttttctcacctgtaaaaggaggataagtatatatatatatttcccagtgttgtgaagattaaaggagtttatcgatgtaggtcttaggatgagtcctggcatttaccaagggttggatatatgttattatcactattaagtgttgagggtccaggcatgctgggcaacagggaccccatctctacaaaaaagtttaaaaaattagccaggcgtggtggtgcacctgtcgtcttagctacttgggaggctgaggtgggaggatcacttgagcccagaagcttgaagctgcagtgagctaggatcgtgccactgcactccaacctgggtgagagagcgagaccctgtctcaagaaaaagaaaaatgcagagaaacaggagtcttggctactcctttagaggcagactcagaccctcctgcctcacagctttatctttgtatttgccccttactttatcttgtgccttgagaaattgctggggagagaggtatgtccactgggcagctgtacaggatggaggatatagggcgtttccactcccagcagccaggttccctcaccccaagctcacccactgttggggagattatctacaataacaccagaaacacattggggtggattgggggtatccttatgggttcttttcagggaaccattgctggacaaggcacaggagccacctccatttctgagctctgcaagggacaagaactagagccatcaggggctgggctcactgtggccccaccccaagccgtcagcctccagggatctacaccctgccttggctgctacagctttttcactccactgccctaggggagttcagcaacctaatgatctctatctctgaacatctcttcatcccatgctccaagtccagcaacctgcaccctggaaccaggagtggaccctacccgagctgtctgtattaatccccatcccccaccaccaatcttaaaaagccctctgtccccctaccctaaaccccagttaggtacccatgctgggcaggtcagttaacaatttatgcacaggtactagttttattgtattaccgttccagggtagctttgaaaaaagtatctcaaaaaggcaacatgggccgagcgcagtggctcacgcctgtaatcccagcactttgggaggccaaggtgggcagatcgcctgaggtctggagttcaagaccagcctggccaacagggtgaaaccccgtctctacaaaaataagaaaattagccaggtgtagtggcagacgtctgtaatcccagctattcaggaggctgaggcacgagaattccatgaacccaggatgcggaggttgcagtgagccgagattgtgccactgcgctccagcctgggcgacagagtggtattctgtttcaaaaaaaaaaaaaaaggcagtatgtagccccgaagactgttgcccaagtggtagaatgttagcacactaccagcctaggtaaaaaatacaaaaagtaactgggcatggcggcgcccatctatagtcccagctacatgggaggctgaggtgggaagataagtcacttgagcccgccaggaggcggaggttgtagtgagctgagatcgcaccactgcactccagcctgggtgaccgagtgatactctgtctcaaagaaaaaaaattataattttagcacagtaaccagccatgatgggagataccctgggtaaggcatgtagaaagggttgagggaccttcccagtcccctagccccgcctcccatcctcccatctttttcttttttcttttttttagagaatcacccagcctggagcgaagtggtgcaatcataactcactgtatccttaaactcccgggcttaagcgatcctcctgcctcagccttctgagtaactaggacttcaggtacctgtcaccatgcctggctaattaaatttttttttcttttttttttttgagatggagtcttgctctgtcacccaggctggagtgcagtggcgcgatctcagctcactgcgacctccacctcctgggttcaggccattctcccgcctcagcctccagagtagctgggactacaggcgcctgccaccacgcctggctaatttttttgcacttttagtagagacggggtttcactgtgttagccaggatggtctcgatctcctgaccttgtgatccgcccgcctcggcctcccaaagtgctgggattacaggcgtgagccaccgcgcccagccaaattaaattttttatagagatgaggtcatgctgttatgttgcccaggttggcctcatgagatcttgccttagcctcccaaagtgctgggattacagatgtgagacactgcacccaaaccccaccacttttttttttcctttttctttttttgagacagtcttactccgttgcccaggctggagtgtagtggcatgatctcagctcactgcaacctccgcctcccgggttcaagcaattctcctgcctcagcctcccgagtagctgggattacagaggcctgccaccacacccgactaattttcgtatttttagtagagacggggtttctccatgttggccaggctgttcttgaactcctgacctcaagtgctccacctgcgttggcttcccaaagtgctgggatacaggagtgagccactgcgcctggctgatcccagcacttttcaaatgatgccgctcaaagccgtgacttggcctactttgaacagcaaacttgttgctgctgttgtcaacctgaaggcctctcaaatgccagcttcaagcagggtgtgaattggccagtgtcagatctcaggagtcctgtgttgagagtgtggctttcagctgcggggagctgcacttggtggggaaagccaggcaggtcaccctcacagccagataatgtggaggtcagaacccaaggaagggagtgagacctccactcccagtgggggacctggccacccatccttggggacctgagaaagcgtacttcaccttggggtgaaggctgggtggggccagagggaccagtgccctcctcagtgcttaggggcagagccacctgcagcaatggtatctgcatattagcccctctccaccttctttctcccgctgaatcatttccctcaaagcccaagagctgtcactgcttctttctccctgggaagaatgcgtggactctgcctggtgatagactgaagccagaacagtgccacaccctcgccttaattccttgctaggtgttctcagatttatgagacttcttagtcaaatatgagggaggttggatgtggtggcttgtgcctgtaatcccagcattttgggaagccgaggtgggaggatcccttgaagccaggagtttgagacaagcctgggcaacaaagcaagaccctatctctaaaaaaaaaaaaaaaaaaaaaaaaaaaaaaaaaaaaaaaaaatctaggagatgctctttaccctgcctggcctcaaactattaatagcttcctttgagcaacattatttattatgaactttcaaacacaaaaaagtagagagagtagaataacaaatccccatgagcccatcacccaacttcagtaattatcaattcatggccatcttgttcacccctgcctgcttccctgcttcccctcattctgcagaggttcttttcttttgagacagagtgttgctctgttgcccaggctggagtgcagtggtgcaacttcggctcactgcaacctccgcctcccaggttcaagtgattctcctgcttcagcctctcaagtagctgggattacagatgcccgccaccacacctggctaattttcgtatttttgttagagatggggtttcaccatgttggccaggctggtctcgaactcctgacctcaagtgatccgcccgccttggcctcccaaaatgctgggattacaggtgtgaaccacggtgcctggccactgtacaggttatttatagaagttggagagtgaagggttgagaaagccaaggggcagatgcgggtctggaggattttgtgcctaaggccctctctttgctcccagacagcatgaagtaacaatgaggcatccacctcttggttttgtggcctctgtggatgacgtctctcaccttgaaccagttcagagttggagtagcgcaggatcctgtcttcagaggaggggccgaagcgggttcctctgttgtcaagctctttggaggtgcctggctgctactactgtcccagagaggtgatgatgaatgatgggtgtgtccagtggcagtttgccccactgaggcaggggcttccactaggccctgacagagcccttccagcaggcagaaatccctgtgctaggcaagattcaaactccgtagcatgtctcctgctcccatctcttaggaatggagtccttcaggccttgagtcccacattttccatgatgctccattaagcagctgatagcacccccacctccagggaaagtgagttcagagtccttggtctaatgcatctgtgttgaaattgaggccttcccctgtgttcacctttctgctctttttcttttagcccaaggctatgaaggcctcattcggtgctgggcatggtcactcctagcattcctcactctgttgctaacagcaacagcaataataataagggttacaacttactccataccttactgtctgccaggcattaagctaagtgctttacatatattaagtcatttaatcctcataatgaccctatgaaagagataccatctcaacccaattgacagctggtttgcaagattaggagggatgaaggacccaggggacaatgcgagggaaaactctgaccccggggccccaggctggatgttctttatgcctgtgaaccacagcttatcacatgtctggagttagggaccccacttaaagtgagattttggctggaggtggtggatcatacctataatcccagcactttgggagaccaaggcagaaggactgcttgaggccaggagttcaaaaccagtgtaggtaacagctagaccctatctctacaaaaaatttaaaaattagctgggtgtggtggtatgtgcctcaagttccagctactcaggaggctgaggtgggaggatcacttgagcacaggagtttgaagttacagtgagctatgatggcaccactgcacttcagcctaggcaacagagggagaccctgtctttaaagtacatagaggtttttcacaccaacacatctctgcccagtgtgccaacatctgccacctgctataatagtactataacactcaatatgtaattaatgtagtctcagggatgttatgacaatatgattacaactatcacgtgtgtgcccagccaggctcaatgccccaggctgggcgaggtggggcaggggacacagcctaaaatgccaggcctcaggaagccatttggtttagcagacattgtttattaaaggagttacctatgccagatcgaaggcctaagatgattaagacactatgagtgccttcaagtggttggggacgttcatgattgtggtacagacaaataggctttcacatcattcttttatgtaatcatacaacagatatttgcacctacatgtgcagagcactgtgataggcctcagtgacacagaataatacggcaaagaccccacccgatgagccccctcccaccacccaccagtacagtagggggtggtttaatggagtgttcctggaatatgaagtgggggcaggcattaggggtggcaaagggacaagtgtttatctgatcagttatgtactgtttataataagtaaatcagcagagggggaataatacttagaacctatagagagtaaatctgacaagatgaaatgctgatgaaaatatggaggaaatgaaactctcatgggttttgcagggaatctaagtcagtgctgtgttgtgaatgtaggtgtaccctttgaattcatatgttgaatcctaacccccaaagcaatggcattaagaggtggggcctttggggctgggtatggtggctcatgactgtaatcccagcactttgggatgctggcagggggcagatcacttgaagccaggagtctgagatcagcctggccaacatggtgaaaccccatctgtactaaaaatacaaaaattagccaggtgtgatggcgtacatctgtaatttcagccactcgggaggctgagacaggagaatagcttgaacccagtaggtggagatttcagtgagccgagatcgtgccactgcactccagcctgggtgacagagcgagactccatctcaaaaaaataataaagatgtggggcctgtgggaggtggttaggtcatgagggtggagatcatgaatggggttagcaccttataaaacaggcttgagggagcccttctgtcccttctaccatgtgtggatgcagtgagaaggcaccgtatctctgaagcagagagcccgccctggacactggatctgctggcaccttgatcttggacttcccagcctctagaactgtgagaaataattttttgttgtttacaaattacccaggctaaggtgtttcattgtaacctgaatggaccaagctggtgtgaccctgttggaaaactggcagtatctaccaaaagccgaacatacgtataaactgatccagcagttccactcctgggtatgtacaccacagaaagctatgtccaccgagacattggcaagaatgtttctaaccacacgctgactgtagccccaaacctgaaacaacccaaatgtccatccaccaacccaaatgtccatccacagttgaagctacagtgaagtcacagggtcgaatactactgcacagcaacgaatatgaatgaaaatatcgctatgcacagcaacatggataaatttcacagacatgaggtcaagcaaaagaggtcagagtcctcatcatcaagagagaattcattgtatgattctcttcctacaaaaagtacagaaataagcaaaactgatccatggtgttagaagccaggggaacagttaacaggggagggatactggggaggggcatcctggagtgctggtctacctcatctgggtgttgatttcacgagtattgtcagtttgtttccagactccctgttggagatgtggaaataaaaaccacctaaacaagagcagagaggccatttggtcaaagtttgcaaaggagtcagccatgattgcttgtatttggcaggggtcaaaggcaggcagggactgtgaaatgttatagtggaaaaaaagggaaggctctgggtgtgctgtgattggagattgttggcatggggacagagcggactaactggaggggcatctttggttggttgggggggtatatttggctttctctggttggtctggagttggaagagggggtgtggtggctggggattgggaagaagctggcagccactaagttcagactgttctgggtccgattgctgctgaggctgtggtttggcttccttggcttcccaggctggtcatgggtttctggccagagtctattgtcatatgtggcctggccattgtccagttgtatgttcagtctcttggaaggaagggtattgactctgagaggggccaccatcgctggaatgggggacacacagtacttcctccagctgcctacacccccctagggtcagtggcgcctgcctgtgagggtgagcccaatggctagagggctctgctccaagtcattgcttactacacccacaaacattcttcgttctttaaggcctaacttaaagcccagatcctacaggaaaccttgattagacccctctctttattaagcttcctaagatcaaaccctgcttttgtgtaaatgctgacctccttgcctacattttaaaaacctagagctgggcatgatggccccagcctgtaatcccagtgattcaggagactgaggtgggaggattgctagaagccaggagttcgagaccagcctgggtaacatagctagaccacatctcttaaaataaaatagttaatttagccaggcatgatgatatatgcctgtagtcccaactacttggaaggctgaggtgtgaggatctttgagcccgggaggtcgaggctacagtaagctatgatctcaccactgtactccagcctgggtgacagagcgagacccagactcaaaaaataaaaataaaaaccctgaatatcttccttctacttcttcagtgctgtttttatttaaaaaaaaaaaaaaccagccaaaaccacaactttttactgaagtgtaatgtaaatgctgtaaaaggcagtgaaaggcacaagggaggtggaggggtaggaagggtggaagtggcgggaggaagtggcagggcaggcaaaatgaagggaagccctgggttcttgtcctgcatccgcagccagctcccactttcctcaccctccaggacctgtaaactgtgaggctggaccagttatgtcaaatctgtcctcccccagagctcagtccctctgcccttgggtgtccttggcacaaggcaggctaggctgcaccagcttcctccatctccgtcctgcctcccccatccccaggtgccattcccacaccatctgaatcactgatttcctcgcaatcagacgctatcttccagttaatcacttcgcttgtatttaacataagaaagaaaaaccctttcattatcacatacagctggaaatcggcttcttgcaggaggcgtatccaaaggaattggagaagagataaactggtaattggtgaaagaattactttaattttttttcctacttgctgtcatgatgatgtccttagaattgtgagcccgtggacacttctgtacaataaatctgctattattac

SEQ ID NO: 154219 - DNA, 11596 bp, Homo sapiens
  Payload ID: 10306
  Gene Symbol: MAVS
  Gene Name: mitochondrial antiviral signaling protein
  Uniprot ID: Q7Z434
  ENST ID: ENST00000416600
  CDS Start-End: 421-1620
acatggccaatggccgcgcgctctgcccgccccgcctcctcgctgcgggaagggtcctgggccccgggcggcggtcgccaggtctcagggccgggggtacccgagtctcgtttcctctcagtccatccacccttcatggggccagagccctctctccagaatctgagcagcaatgccgtttgctgaagacaagacctataagtatatctgccgcaatttcagcaatttttgcaatgtggatgttgtagagattctgccttacctgccctgcctcacagcaagagaccagggacctcggaccgtcccccagacccactggagccaccgtcacttcctgctgagaggccagggccccccacacctgctgcggcccacagcatcccctacaacagctgcagagagaaggagccaagttaccccatgcctgtccaggagacccaggcgccagagtccccaggagagaattcagagcaagccctgcagacgctcagccccagagccatcccaaggaatccagatggtggccccctggagtcctcctctgacctggcagccctcagccctctgacctccagcgggcatcaggagcaggacacagaactgggcagtacccacacagcaggtgcgacctccagcctcacaccatcccgtgggcctgtgtctccatctgtctccttccagcccctggcccgttccacccccagggcaagccgcttgcctggacccacagggtcagttgtatctactggcacctccttctcctcctcatcccctggcttggcctctgcaggggctgcagagggtaaacagggtgcagagagtgaccaggccgagcctatcatctgctccagtggggcagaggcacctgccaactctctgccctccaaagtgcctaccaccttgatgcctgtgaacacagtggccctgaaagtgcctgccaacccagcatctgtcagcacagtgccctccaagttgccaactagctcaaagccccctggtgcagtgccttctaatgcgctcaccaatccagcaccatccaaattgcccatcaactcaacccgtgctggcatggtgccatccaaagtgcctactagcatggtgctcaccaaggtgtctgccagcacagtccccactgacgggagcagcagaaatgaggagaccccagcagctccaacacccgccggcgccactggaggcagctcagcctggctagacagcagctctgagaataggggccttgggtcggagctgagtaagcctggcgtgctggcatcccaggtagacagcccgttctcgggctgcttcgaggatcttgccatcagtgccagcacctccttgggcatggggccctgccatggcccagaggagaatgagtataagtccgagggcacctttgggatccacgtggctgagaaccccagcatccagctcctggagggcaaccctgggccacctgcggacccggatggcggccccaggccacaagccgaccggaagttccaggagagggaggtgccatgccacaggccctcacctggggctctgtggctccaggtggctgtgacaggggtgctggtagtcacactcctggtggtgctgtaccggcggcgtctgcactagtgaagccctgggctcttcccaccacccatctgttccgttcctgcagtacacctggcccctctccgaagccccttgtccctttcttggggattgtggaggctgggtcagaggggagttaagggactgcaggcctggcagcaggacatgccttggctgaaccaagtcctgagagcagcatctctgtccccacggtgccttgtgtgggtccccgtccttggctttctgggtcctgggctgcccccagtgctccagaccttccccactggcaatccaggttatcatccatgtcctccagaggagcttcctcctccaggcctcagccctgttggcccaggtggagcaggagggaccactggaacatgtggtgcttgggaatgcctctcctgttgcattggtccctgaaggcctcagggcaggtatgtggtgtgtgggcgactccacaagacctgcctcccatcctggcagcccagcctgagaccgttgcattgaggcaggcaggagcggcagggtggctgctctccaggagcccaactgccttgagttcctgccccactgggccccctcccctgctgggcaatcctgggaaggtctggaggttcctgtggacctcagggaagccaggggcagctgtcaggcctgaggaagacctgtggagctcctctccagcctcctctttccctcccctctggtctccattctcttcagctccctacatgggctggggaggagacacctggtgggcagagctcaggcagaggtttggatttcagctccctcacttccggggctgtgtggctttggcagatgtcagacttctggtcttgcttctccacgtggacagtgagtatctggctcattcttcactgggttcttctgagattgaacctacaggtgtttgccaagtgcctggcccagagcaagtggccactgcttctcccatctctctcctgcccaacctggtagagctgagggcatgagaggcagagtgcacagtggtcaagggtgcagctctgcagcacaggcagcctaggcctgcgtcccaacctgcctctcaccagctctgtgaccttgggcaagggatttatctgtctgtcccttagttttctcacctgtaaaaggaggataagtatatatatatatttcccagtgttgtgaagattaaaggagtttatcgatgtaggtcttaggatgagtcctggcatttaccaagggttggatatatgttattatcactattaagtgttgagggtccaggcatgctgggcaacagggaccccatctctacaaaaaagtttaaaaaattagccaggcgtggtggtgcacctgtcgtcttagctacttgggaggctgaggtgggaggatcacttgagcccagaagcttgaagctgcagtgagctaggatcgtgccactgcactccaacctgggtgagagagcgagaccctgtctcaagaaaaagaaaaatgcagagaaacaggagtcttggctactcctttagaggcagactcagaccctcctgcctcacagctttatctttgtatttgccccttactttatcttgtgccttgagaaattgctggggagagaggtatgtccactgggcagctgtacaggatggaggatatagggcgtttccactcccagcagccaggttccctcaccccaagctcacccactgttggggagattatctacaataacaccagaaacacattggggtggattgggggtatccttatgggttcttttcagggaaccattgctggacaaggcacaggagccacctccatttctgagctctgcaagggacaagaactagagccatcaggggctgggctcactgtggccccaccccaagccgtcagcctccagggatctacaccctgccttggctgctacagctttttcactccactgccctaggggagttcagcaacctaatgatctctatctctgaacatctcttcatcccatgctccaagtccagcaacctgcaccctggaaccaggagtggaccctacccgagctgtctgtattaatccccatcccccaccaccaatcttaaaaagccctctgtccccctaccctaaaccccagttaggtacccatgctgggcaggtcagttaacaatttatgcacaggtactagttttattgtattaccgttccagggtagctttgaaaaaagtatctcaaaaaggcaacatgggccgagcgcagtggctcacgcctgtaatcccagcactttgggaggccaaggtgggcagatcgcctgaggtctggagttcaagaccagcctggccaacagggtgaaaccccgtctctacaaaaataagaaaattagccaggtgtagtggcagacgtctgtaatcccagctattcaggaggctgaggcacgagaattccatgaacccaggatgcggaggttgcagtgagccgagattgtgccactgcgctccagcctgggcgacagagtggtattctgtttcaaaaaaaaaaaaaaaggcagtatgtagccccgaagactgttgcccaagtggtagaatgttagcacactaccagcctaggtaaaaaatacaaaaagtaactgggcatggcggcgcccatctatagtcccagctacatgggaggctgaggtgggaagataagtcacttgagcccgccaggaggcggaggttgtagtgagctgagatcgcaccactgcactccagcctgggtgaccgagtgatactctgtctcaaagaaaaaaaattataattttagcacagtaaccagccatgatgggagataccctgggtaaggcatgtagaaagggttgagggaccttcccagtcccctagccccgcctcccatcctcccatctttttcttttttcttttttttagagaatcacccagcctggagcgaagtggtgcaatcataactcactgtatccttaaactcccgggcttaagcgatcctcctgcctcagccttctgagtaactaggacttcaggtacctgtcaccatgcctggctaattaaatttttttttcttttttttttttgagatggagtcttgctctgtcacccaggctggagtgcagtggcgcgatctcagctcactgcgacctccacctcctgggttcaggccattctcccgcctcagcctccagagtagctgggactacaggcgcctgccaccacgcctggctaatttttttgcacttttagtagagacggggtttcactgtgttagccaggatggtctcgatctcctgaccttgtgatccgcccgcctcggcctcccaaagtgctgggattacaggcgtgagccaccgcgcccagccaaattaaattttttatagagatgaggtcatgctgttatgttgcccaggttggcctcatgagatcttgccttagcctcccaaagtgctgggattacagatgtgagacactgcacccaaaccccaccacttttttttttcctttttctttttttgagacagtcttactccgttgcccaggctggagtgtagtggcatgatctcagctcactgcaacctccgcctcccgggttcaagcaattctcctgcctcagcctcccgagtagctgggattacagaggcctgccaccacacccgactaattttcgtatttttagtagagacggggtttctccatgttggccaggctgttcttgaactcctgacctcaagtgctccacctgcgttggcttcccaaagtgctgggatacaggagtgagccactgcgcctggctgatcccagcacttttcaaatgatgccgctcaaagccgtgacttggcctactttgaacagcaaacttgttgctgctgttgtcaacctgaaggcctctcaaatgccagcttcaagcagggtgtgaattggccagtgtcagatctcaggagtcctgtgttgagagtgtggctttcagctgcggggagctgcacttggtggggaaagccaggcaggtcaccctcacagccagataatgtggaggtcagaacccaaggaagggagtgagacctccactcccagtgggggacctggccacccatccttggggacctgagaaagcgtacttcaccttggggtgaaggctgggtggggccagagggaccagtgccctcctcagtgcttaggggcagagccacctgcagcaatggtatctgcatattagcccctctccaccttctttctcccgctgaatcatttccctcaaagcccaagagctgtcactgcttctttctccctgggaagaatgcgtggactctgcctggtgatagactgaagccagaacagtgccacaccctcgccttaattccttgctaggtgttctcagatttatgagacttcttagtcaaatatgagggaggttggatgtggtggcttgtgcctgtaatcccagcattttgggaagccgaggtgggaggatcccttgaagccaggagtttgagacaagcctgggcaacaaagcaagaccctatctctaaaaaaaaaaaaaaaaaaaaaaaaaaaaaaaaaaaaaaaaaatctaggagatgctctttaccctgcctggcctcaaactattaatagcttcctttgagcaacattatttattatgaactttcaaacacaaaaaagtagagagagtagaataacaaatccccatgagcccatcacccaacttcagtaattatcaattcatggccatcttgttcacccctgcctgcttccctgcttcccctcattctgcagaggttcttttcttttgagacagagtgttgctctgttgcccaggctggagtgcagtggtgcaacttcggctcactgcaacctccgcctcccaggttcaagtgattctcctgcttcagcctctcaagtagctgggattacagatgcccgccaccacacctggctaattttcgtatttttgttagagatggggtttcaccatgttggccaggctggtctcgaactcctgacctcaagtgatccgcccgccttggcctcccaaaatgctgggattacaggtgtgaaccacggtgcctggccactgtacaggttatttatagaagttggagagtgaagggttgagaaagccaaggggcagatgcgggtctggaggattttgtgcctaaggccctctctttgctcccagacagcatgaagtaacaatgaggcatccacctcttggttttgtggcctctgtggatgacgtctctcaccttgaaccagttcagagttggagtagcgcaggatcctgtcttcagaggaggggccgaagcgggttcctctgttgtcaagctctttggaggtgcctggctgctactactgtcccagagaggtgatgatgaatgatgggtgtgtccagtggcagtttgccccactgaggcaggggcttccactaggccctgacagagcccttccagcaggcagaaatccctgtgctaggcaagattcaaactccgtagcatgtctcctgctcccatctcttaggaatggagtccttcaggccttgagtcccacattttccatgatgctccattaagcagctgatagcacccccacctccagggaaagtgagttcagagtccttggtctaatgcatctgtgttgaaattgaggccttcccctgtgttcacctttctgctctttttcttttagcccaaggctatgaaggcctcattcggtgctgggcatggtcactcctagcattcctcactctgttgctaacagcaacagcaataataataagggttacaacttactccataccttactgtctgccaggcattaagctaagtgctttacatatattaagtcatttaatcctcataatgaccctatgaaagagataccatctcaacccaattgacagctggtttgcaagattaggagggatgaaggacccaggggacaatgcgagggaaaactctgaccccggggccccaggctggatgttctttatgcctgtgaaccacagcttatcacatgtctggagttagggaccccacttaaagtgagattttggctggaggtggtggatcatacctataatcccagcactttgggagaccaaggcagaaggactgcttgaggccaggagttcaaaaccagtgtaggtaacagctagaccctatctctacaaaaaatttaaaaattagctgggtgtggtggtatgtgcctcaagttccagctactcaggaggctgaggtgggaggatcacttgagcacaggagtttgaagttacagtgagctatgatggcaccactgcacttcagcctaggcaacagagggagaccctgtctttaaagtacatagaggtttttcacaccaacacatctctgcccagtgtgccaacatctgccacctgctataatagtactataacactcaatatgtaattaatgtagtctcagggatgttatgacaatatgattacaactatcacgtgtgtgcccagccaggctcaatgccccaggctgggcgaggtggggcaggggacacagcctaaaatgccaggcctcaggaagccatttggtttagcagacattgtttattaaaggagttacctatgccagatcgaaggcctaagatgattaagacactatgagtgccttcaagtggttggggacgttcatgattgtggtacagacaaataggctttcacatcattcttttatgtaatcatacaacagatatttgcacctacatgtgcagagcactgtgataggcctcagtgacacagaataatacggcaaagaccccacccgatgagccccctcccaccacccaccagtacagtagggggtggtttaatggagtgttcctggaatatgaagtgggggcaggcattaggggtggcaaagggacaagtgtttatctgatcagttatgtactgtttataataagtaaatcagcagagggggaataatacttagaacctatagagagtaaatctgacaagatgaaatgctgatgaaaatatggaggaaatgaaactctcatgggttttgcagggaatctaagtcagtgctgtgttgtgaatgtaggtgtaccctttgaattcatatgttgaatcctaacccccaaagcaatggcattaagaggtggggcctttggggctgggtatggtggctcatgactgtaatcccagcactttgggatgctggcagggggcagatcacttgaagccaggagtctgagatcagcctggccaacatggtgaaaccccatctgtactaaaaatacaaaaattagccaggtgtgatggcgtacatctgtaatttcagccactcgggaggctgagacaggagaatagcttgaacccagtaggtggagatttcagtgagccgagatcgtgccactgcactccagcctgggtgacagagcgagactccatctcaaaaaaataataaagatgtggggcctgtgggaggtggttaggtcatgagggtggagatcatgaatggggttagcaccttataaaacaggcttgagggagcccttctgtcccttctaccatgtgtggatgcagtgagaaggcaccgtatctctgaagcagagagcccgccctggacactggatctgctggcaccttgatcttggacttcccagcctctagaactgtgagaaataattttttgttgtttacaaattacccaggctaaggtgtttcattgtaacctgaatggaccaagctggtgtgaccctgttggaaaactggcagtatctaccaaaagccgaacatacgtataaactgatccagcagttccactcctgggtatgtacaccacagaaagctatgtccaccgagacattggcaagaatgtttctaaccacacgctgactgtagccccaaacctgaaacaacccaaatgtccatccaccaacccaaatgtccatccacagttgaagctacagtgaagtcacagggtcgaatactactgcacagcaacgaatatgaatgaaaatatcgctatgcacagcaacatggataaatttcacagacatgaggtcaagcaaaagaggtcagagtcctcatcatcaagagagaattcattgtatgattctcttcctacaaaaagtacagaaataagcaaaactgatccatggtgttagaagccaggggaacagttaacaggggagggatactggggaggggcatcctggagtgctggtctacctcatctgggtgttgatttcacgagtattgtcagtttgtttccagactccctgttggagatgtggaaataaaaaccacctaaacaagagcagagaggccatttggtcaaagtttgcaaaggagtcagccatgattgcttgtatttggcaggggtcaaaggcaggcagggactgtgaaatgttatagtggaaaaaaagggaaggctctgggtgtgctgtgattggagattgttggcatggggacagagcggactaactggaggggcatctttggttggttgggggggtatatttggctttctctggttggtctggagttggaagagggggtgtggtggctggggattgggaagaagctggcagccactaagttcagactgttctgggtccgattgctgctgaggctgtggtttggcttccttggcttcccaggctggtcatgggtttctggccagagtctattgtcatatgtggcctggccattgtccagttgtatgttcagtctcttggaaggaagggtattgactctgagaggggccaccatcgctggaatgggggacacacagtacttcctccagctgcctacacccccctagggtcagtggcgcctgcctgtgagggtgagcccaatggctagagggctctgctccaagtcattgcttactacacccacaaacattcttcgttctttaaggcctaacttaaagcccagatcctacaggaaaccttgattagacccctctctttattaagcttcctaagatcaaaccctgcttttgtgtaaatgctgacctccttgcctacattttaaaaacctagagctgggcatgatggccccagcctgtaatcccagtgattcaggagactgaggtgggaggattgctagaagccaggagttcgagaccagcctgggtaacatagctagaccacatctcttaaaataaaatagttaatttagccaggcatgatgatatatgcctgtagtcccaactacttggaaggctgaggtgtgaggatctttgagcccgggaggtcgaggctacagtaagctatgatctcaccactgtactccagcctgggtgacagagcgagacccagactcaaaaaataaaaataaaaaccctgaatatcttccttctacttcttcagtgctgtttttatttaaaaaaaaaaaaaaccagccaaaaccacaactttttactgaagtgtaatgtaaatgctgtaaaaggcagtgaaaggcacaagggaggtggaggggtaggaagggtggaagtggcgggaggaagtggcagggcaggcaaaatgaagggaagccctgggttcttgtcctgcatccgcagccagctcccactttcctcaccctccaggacctgtaaactgtgaggctggaccagttatgtcaaatctgtcctcccccagagctcagtccctctgcccttgggtgtccttggcacaaggcaggctaggctgcaccagcttcctccatctccgtcctgcctcccccatccccaggtgccattcccacaccatctgaatcactgatttcctcgcaatcagacgctatcttccagttaatcacttcgcttgtatttaacataagaaagaaaaaccctttcattatcacatacagctggaaatcggcttcttgcaggaggcgtatccaaaggaattggagaagagataaactggtaattggtgaaagaattactttaattttttttcctacttgctgtcatgatgatgtccttagaattgtgagcccgtggacacttctgtacaataaatctgctattattacttctagaactaca

SEQ ID NO: 154220 - DNA, 3044 bp, Homo sapiens
  Payload ID: 10307
  Gene Symbol: MALSU1
  Gene Name: mitochondrial assembly of ribosomal large subunit 1
  Uniprot ID: Q96EH3
  ENST ID: ENST00000466681
  CDS Start-End: 154-858
agctcttccgggtcactgcagtcttcacgggctccagactccgcccatggtccgtccttcaggccttgactccgcccacgcatcgacgtagaatttcccggccgggctccatgaagtaccacccacccgcgacgccgacgcaaggctgctgctatggggccgggcggccgtgtggcgcggctgctcgccccactaatgtggcgcagggcggtttcctcggtggcggggtccgcggttggagccgagcccgggcttcggctgctggccgtgcagcggcttcccgtaggagcagcgttctgccgggcttgccagaccccaaactttgtccgcggcctgcacagcgagcctgggctggaggagcgggcggaggggacggtcaacgagggacgcccagaatcggacgcggcagatcatactggtcccaagtttgacatcgatatgatggtttcacttctgaggcaagaaaatgcaagagacatttgtgtgatccaggttcctccagaaatgagatatacagattactttgtgattgttagtggaacttctacccgacacttacatgccatggccttctacgttgtgaaaatgtacaaacacctgaaatgtaaacgtgaccctcatgttaagatagaagggaaggacactgatgactggctgtgcgtggattttggcagcatggtgattcatttgatgcttccagaaaccagagaaatctatgaattagagaaattatggaccctacgttcttatgatgaccagttagctcagatagcacctgagacagtacctgaagacttcattcttggaatagaagatgatacttcatctgtgactccagtggagttaaaatgtgaataaaatattttatgcactgcgttagtcatttcagatttggattgagtcacttattggaaaatacagctcctaaagtccgtctccttggttaggctgctcttaggacaaggcttgtgtacctcatgggcactcctgctaactggcatgcagagactgtcgataagtgagctatacctgcaaccaaaaatcagtacattctacccaaaacttatgacacgctgcctttatcctggaaatgtcatcagaatttcctggagttagcactggctcctgtgcttgacttctctgctcagatttttattaatttaatttagcttaaatgtaaatcttaaccctgtttgtttaatggaatggcaaaaattttaaaaaataatataaaacatagcccactggtcttatttttatactttgaggtgataatattcttctaggaggacttctgtaacccttccagaatactccagtaacacaagaaagtaaacaaagtgtttgttaggaaaaactctgaacgctctagttcttagttcatatgcaagagtattatcaaggttcacattaagtaccatggctggacatggtataacagaaatctgcgtagagtttgaaaaaaaattcagaacattcccattcaattgaaaaccaaaaataaaacatactacacaacaagctgcacctaaatgatgaaaaaatttattctgcgtcaaggtatctggaaaatgaagctgcatttggggcacattatacatgaggaatgatccatatatggtgagtacaaaactcaattatagaattatttcttagctagtaccagatactccaaattacaaatgcttaagtaaaagtaaaatatgatttgccatactaaaaggctagaagtgaaatatgacagaatttaaaccagcagatataaatgcagcacctatgtgtatatttttaaaaaatcaaatattggggaaaaaaatcaaatactgagaaaagctctggccttaaacacatcttacctgaaatccaaccagaaagccagtccatgattttagcaattttaattcattgtatgaaaaaaaaatcatgaatgctaggagaatccagtgacaaaaagggcacttttttggttaaaactacaaaagaaacttgttttcagagaacattaaggaaaacactttaaatcattttcaaaatgtctaattgatcttcagaaaaacatctagtctgtatagaaattcatcttgaaataagaatgaggcagtgattttttttttaaagggttatatatatgtcctttagatcagtgtaacatgactgtgatcatcttacaaacaaaactcaaaaaatcaattcagagagcagcgtggccttggagaccacccacacccaacacaattgtacgtactgggctttgctgtcaaggagtgagcaaatgagttcgttatcaaaggtcatatgttttcacagtcattcaaattatatcccaaaaacttttcttgtattctctatcttttgacttttttttcaaagaactgattgcacagtatacagaaatcctgttatactttactacttaaggtggagtctaattttttttttttaatttatcagtgcttaaaaatcttcaaaatagcttagtgaggctcatgacagtgctggccccatggaaatgtagccttttgttgcgtttaaacactgtcacaccatctatgactgtcccattggtctgaagtgtagtggcaaactaagcatcctataagacaagctaaagcttgctttttgccagtcagttgaaagtcttgcatctcttcactgatgcactttctttaggtattgatagtcagaagcacaaagcatttattatgcattcaatcatgtagctaaacaaaaaactgaagtctcctgaagccatttaaaccagccgttccaaaatctcctgcgaccactttgttagtaccgtcaaaaactttcccaactataaatgaaagaataaatggtagtgctgctctccagatactaggcactgctccgtatttttgaacatttgatttaactaataactgtgtcaaaagcctcaaaaaaccctgaaattaattttccagctttactgtcaccagccagaagtaaaaatcttaatttgcctgttagctgattgctgttaaattttaaatttattttttaaaaaacggttggacttctatcat

SEQ ID NO: 154221 - DNA, 2874 bp, Homo sapiens
  Payload ID: 10308
  Gene Symbol: MCU
  Gene Name: mitochondrial calcium uniporter
  Uniprot ID: Q8NE86
  ENST ID: ENST00000357157
  CDS Start-End: 10-1002
agttgagagatggcggccgccgcaggtagatcgctcctgctgctcctctcctctcggggcggcggcggcgggggcgccggcggctgcggggcgctgactgccggctgcttccctgggctgggcgtcagccgccaccggcagcagcagcaccaccggacggtacaccagaggatcgcttcctggcagaatttgggagctgtttattgcagcactgttgtgccctctgatgatgttacagtggtttatcaaaatgggttacctgtgatatctgtgaggctaccatcccggcgtgaacgctgtcagttcacactcaagcctatctctgactctgttggtgtatttttacgacaactgcaagaagaggatcggggaattgacagagttgctatctattcaccagatggtgttcgcgttgctgcttcaacaggaatagacctcctcctccttgatgactttaagctggtcattaatgacttaacataccacgtacgaccaccaaaaagagtagagatggggttttgccatgttggccagaatggttttgaactcctgacctcaagttatctacctgcctcagcctcccaaagtgccgagattatagccgtacgaattgagattagcagaaaagctgagaagaggaccactttggtgctatggggtggccttgcctacatggccacacagtttggcattttggcccggcttacctggtgggaatattcctgggacatcatggagccagtaacatacttcatcacttatggaagtgccatggcaatgtatgcatattttgtaatgacacgccaggaatatgtttatccagaagccagagacagacaatacttactatttttccataaaggagccaaaaagtcacgttttgacctagagaaatacaatcaactcaaggatgcaattgctcaggcagaaatggaccttaagagactgagagacccattacaagtacatctgcctctccgacaaattggtgaaaaagattgatctgcaaaaagcctctgaatcctggcagaaggaacacctgtttgcctttttaattaaagcattgcaggtggaagctgggagccatgtggggggtagagcgtttttacctttaattataaaacaaaaacagaaaggatctgagggaagaagggaatgttaaaacctgaggatcaggcattgtggaatataagctcaaagggcttagtgaatattgtcttaaccaagtatctcagtttctggatgaaaatgatgcagttatatagttgagagattcataaagagaaaacaatgctgggggtgttcgtttcttgcatcttctttgcagagtcagcaaaagagtaacacaccagcaccccactcgactctatttgtttttaatttaactgtccctatttttgacataggagtaaataaatatactagaaaagcaaattctcatgatatgctaaaatatcattagcatttattttaaattggacccagtctctgcagagttaccaggaatctttccttccagcatccctttactgaccacctacctgtacctcttggttacactcattttttccatttgataattggaaccaacttataactgtttaataattgacactttagattatctcttaataccttcttaaatgtctatatatcccagtgctctggatcagtgtctaaaaatcactggcaacactgcatgaggttgttggttttgttttgttttattaattagtctttcacaggaggaataattgccctcctttatatacttatctattgataatcccctctccctccagaacacaaatcagagggaaagggggtgttcagctgtactaccaaatcaggaagatgtaaggtttacaaattggctaagaatcatggctctgtagccatttcaaccagaataattttattgctaatctgctttgtgtgacagcattccaggccagccagatgggactgccttgtctggaggctttgttcatctcgaaggacacacacttccacactgtttgtgagccctcccacctccacaacttcagttgtaaatcaagtgtgtggatctcaaagggtgcaatttatctttatataggaatacatttctagggcttccttcaagcccactctcttcaccctattttttcttatcttaaattgagagaaagagaattaatcttatactttgtcaaaacattttctaccatatttccagatgacatctgcgcttgaagagtcaaaggaatctgtgtctaatatcctgtttttaactgctgtaggggcaggatggaaaggatgatgggggctgccacaccactgattggccttttctttcacgtgattcatccttcctcattgtggcaaggagtttctttctctttttcttcctcctttgggatcattgtgtatgaaaagaaaaactttaaatgacaaacccagactccaggtgccttgcaaaggttgaaggccagccaggattgctgctgctgctgctactcctgccaacacccctttcattggcatgacggaatgaaaggatgcatgtctccacttcctgaccctccgcccacttccttctccctccaccacccccagtcgtcagctccttccctcatttatttttgttaagttgtgtgaattatttttaacccatttatcctgtttgtgcatagggtttttaagaagaaacagcacagtgcaacgagcaaatctttttggggtgtgtgggaagcaagggagggaggacatggagaaaagttctttaaacaaatagcaaactattgaacatgtgtaaaatcctgtatcatttatgaaatatgtataaaaagcaatgtaccttctggaacaataaatacttattcaatttttgaa

SEQ ID NO: 154222 - DNA, 2949 bp, Homo sapiens
  Payload ID: 10308
  Gene Symbol: MCU
  Gene Name: mitochondrial calcium uniporter
  Uniprot ID: Q8NE86
  ENST ID: ENST00000373053
  CDS Start-End: 22-1077
ggcgccgtttccagttgagagatggcggccgccgcaggtagatcgctcctgctgctcctctcctctcggggcggcggcggcgggggcgccggcggctgcggggcgctgactgccggctgcttccctgggctgggcgtcagccgccaccggcagcagcagcaccaccggacggtacaccagaggatcgcttcctggcagaatttgggagctgtttattgcagcactgttgtgccctctgatgatgttacagtggtttatcaaaatgggttacctgtgatatctgtgaggctaccatcccggcgtgaacgctgtcagttcacactcaagcctatctctgactctgttggtgtatttttacgacaactgcaagaagaggatcggggaattgacagagttgctatctattcaccagatggtgttcgcgttgctgcttcaacaggaatagacctcctcctccttgatgactttaagctggtcattaatgacttaacataccacgtacgaccaccaaaaagagacctcttaagtcatgaaaatgcagcaacgctgaatgatgtaaagacattggtccagcaactatacaccacactgtgcattgagcagcaccagttaaacaaggaaagggagcttattgaaagactagaggatctcaaagagcagctggctcccctggaaaaggtacgaattgagattagcagaaaagctgagaagaggaccactttggtgctatggggtggccttgcctacatggccacacagtttggcattttggcccggcttacctggtgggaatattcctgggacatcatggagccagtaacatacttcatcacttatggaagtgccatggcaatgtatgcatattttgtaatgacacgccaggaatatgtttatccagaagccagagacagacaatacttactatttttccataaaggagccaaaaagtcacgttttgacctagagaaatacaatcaactcaaggatgcaattgctcaggcagaaatggaccttaagagactgagagacccattacaagtacatctgcctctccgacaaattggtgaaaaagattgatctgcaaaaagcctctgaatcctggcagaaggaacacctgtttgcctttttaattaaagcattgcaggtggaagctgggagccatgtggggggtagagcgtttttacctttaattataaaacaaaaacagaaaggatctgagggaagaagggaatgttaaaacctgaggatcaggcattgtggaatataagctcaaagggcttagtgaatattgtcttaaccaagtatctcagtttctggatgaaaatgatgcagttatatagttgagagattcataaagagaaaacaatgctgggggtgttcgtttcttgcatcttctttgcagagtcagcaaaagagtaacacaccagcaccccactcgactctatttgtttttaatttaactgtccctatttttgacataggagtaaataaatatactagaaaagcaaattctcatgatatgctaaaatatcattagcatttattttaaattggacccagtctctgcagagttaccaggaatctttccttccagcatccctttactgaccacctacctgtacctcttggttacactcattttttccatttgataattggaaccaacttataactgtttaataattgacactttagattatctcttaataccttcttaaatgtctatatatcccagtgctctggatcagtgtctaaaaatcactggcaacactgcatgaggttgttggttttgttttgttttattaattagtctttcacaggaggaataattgccctcctttatatacttatctattgataatcccctctccctccagaacacaaatcagagggaaagggggtgttcagctgtactaccaaatcaggaagatgtaaggtttacaaattggctaagaatcatggctctgtagccatttcaaccagaataattttattgctaatctgctttgtgtgacagcattccaggccagccagatgggactgccttgtctggaggctttgttcatctcgaaggacacacacttccacactgtttgtgagccctcccacctccacaacttcagttgtaaatcaagtgtgtggatctcaaagggtgcaatttatctttatataggaatacatttctagggcttccttcaagcccactctcttcaccctattttttcttatcttaaattgagagaaagagaattaatcttatactttgtcaaaacattttctaccatatttccagatgacatctgcgcttgaagagtcaaaggaatctgtgtctaatatcctgtttttaactgctgtaggggcaggatggaaaggatgatgggggctgccacaccactgattggccttttctttcacgtgattcatccttcctcattgtggcaaggagtttctttctctttttcttcctcctttgggatcattgtgtatgaaaagaaaaactttaaatgacaaacccagactccaggtgccttgcaaaggttgaaggccagccaggattgctgctgctgctgctactcctgccaacacccctttcattggcatgacggaatgaaaggatgcatgtctccacttcctgaccctccgcccacttccttctccctccaccacccccagtcgtcagctccttccctcatttatttttgttaagttgtgtgaattatttttaacccatttatcctgtttgtgcatagggtttttaagaagaaacagcacagtgcaacgagcaaatctttttggggtgtgtgggaagcaagggagggaggacatggagaaaagttctttaaacaaatagcaaactattgaacatgtgtaaaatcctgtatcatttatgaaatatgtataaaaagcaatgtaccttctggaacaataaatacttattcaatttttgaa

SEQ ID NO: 154223 - DNA, 3224 bp, Homo sapiens
  Payload ID: 10308
  Gene Symbol: MCU
  Gene Name: mitochondrial calcium uniporter
  Uniprot ID: Q8NE86
  ENST ID: ENST00000536019
  CDS Start-End: 446-1354
cttcgttcttaacagccctgccccaaggctccctgaacggagccagatggaagttgtcccctttccctcctcctccgggcgggttggggagttctgagttgccgcggccgccttgtgtgtgccaggagagtggcagtgccatgctgctgggagctgccccggagagcagcccaggaccccggcggggccgcccctcgtcctctctcgtccccgaggggtcgggcaggaaggaaaatcaaactttattcccctctgtgacttcctctgtgtgtgtgcatggggaaccggctccctcgagatggatgctgcattgcttcaggaggcaagcttcatcctcttgggtccttaaaggtgcttttgggggtcctttcgagggctactgtataagcgtgttcacgcgtgcctgaagcgggaagggtggtcagcaggcacaggagaagcgaatatggtacaccagaggatcgcttcctggcagaatttgggagctgtttattgcagcactgttgtgccctctgatgatgttacagtggtttatcaaaatgggttacctgtgatatctgtgaggctaccatcccggcgtgaacgctgtcagttcacactcaagcctatctctgactctgttggtgtatttttacgacaactgcaagaagaggatcggggaattgacagagttgctatctattcaccagatggtgttcgcgttgctgcttcaacaggaatagacctcctcctccttgatgactttaagctggtcattaatgacttaacataccacgtacgaccaccaaaaagagacctcttaagtcatgaaaatgcagcaacgctgaatgatgtaaagacattggtccagcaactatacaccacactgtgcattgagcagcaccagttaaacaaggaaagggagcttattgaaagactagaggatctcaaagagcagctggctcccctggaaaaggtacgaattgagattagcagaaaagctgagaagaggaccactttggtgctatggggtggccttgcctacatggccacacagtttggcattttggcccggcttacctggtgggaatattcctgggacatcatggagccagtaacatacttcatcacttatggaagtgccatggcaatgtatgcatattttgtaatgacacgccaggaatatgtttatccagaagccagagacagacaatacttactatttttccataaaggagccaaaaagtcacgttttgacctagagaaatacaatcaactcaaggatgcaattgctcaggcagaaatggaccttaagagactgagagacccattacaagtacatctgcctctccgacaaattggtgaaaaagattgatctgcaaaaagcctctgaatcctggcagaaggaacacctgtttgcctttttaattaaagcattgcaggtggaagctgggagccatgtggggggtagagcgtttttacctttaattataaaacaaaaacagaaaggatctgagggaagaagggaatgttaaaacctgaggatcaggcattgtggaatataagctcaaagggcttagtgaatattgtcttaaccaagtatctcagtttctggatgaaaatgatgcagttatatagttgagagattcataaagagaaaacaatgctgggggtgttcgtttcttgcatcttctttgcagagtcagcaaaagagtaacacaccagcaccccactcgactctatttgtttttaatttaactgtccctatttttgacataggagtaaataaatatactagaaaagcaaattctcatgatatgctaaaatatcattagcatttattttaaattggacccagtctctgcagagttaccaggaatctttccttccagcatccctttactgaccacctacctgtacctcttggttacactcattttttccatttgataattggaaccaacttataactgtttaataattgacactttagattatctcttaataccttcttaaatgtctatatatcccagtgctctggatcagtgtctaaaaatcactggcaacactgcatgaggttgttggttttgttttgttttattaattagtctttcacaggaggaataattgccctcctttatatacttatctattgataatcccctctccctccagaacacaaatcagagggaaagggggtgttcagctgtactaccaaatcaggaagatgtaaggtttacaaattggctaagaatcatggctctgtagccatttcaaccagaataattttattgctaatctgctttgtgtgacagcattccaggccagccagatgggactgccttgtctggaggctttgttcatctcgaaggacacacacttccacactgtttgtgagccctcccacctccacaacttcagttgtaaatcaagtgtgtggatctcaaagggtgcaatttatctttatataggaatacatttctagggcttccttcaagcccactctcttcaccctattttttcttatcttaaattgagagaaagagaattaatcttatactttgtcaaaacattttctaccatatttccagatgacatctgcgcttgaagagtcaaaggaatctgtgtctaatatcctgtttttaactgctgtaggggcaggatggaaaggatgatgggggctgccacaccactgattggccttttctttcacgtgattcatccttcctcattgtggcaaggagtttctttctctttttcttcctcctttgggatcattgtgtatgaaaagaaaaactttaaatgacaaacccagactccaggtgccttgcaaaggttgaaggccagccaggattgctgctgctgctgctactcctgccaacacccctttcattggcatgacggaatgaaaggatgcatgtctccacttcctgaccctccgcccacttccttctccctccaccacccccagtcgtcagctccttccctcatttatttttgttaagttgtgtgaattatttttaacccatttatcctgtttgtgcatagggtttttaagaagaaacagcacagtgcaacgagcaaatctttttggggtgtgtgggaagcaagggagggaggacatggagaaaagttctttaaacaaatagcaaactattgaacatgtgtaaaatcctgtatcatttatgaaatatgtataaaaagcaatgtaccttctggaacaataaatacttattcaatttttg

SEQ ID NO: 154224 - DNA, 1074 bp, Homo sapiens
  Payload ID: 10308
  Gene Symbol: MCU
  Gene Name: mitochondrial calcium uniporter
  ENST ID: ENST00000604679
  CDS Start-End: 10-315
agttgagagatggcggccgccgcaggtagatcgctcctgctgctcctctcctctcggggcggcggcggcgggggcgccggcggctgcggggcgctgactgccggctgcttccctgggctgggcgtcagccgccaccggcagcagcagcaccaccggacgggagtggaggaagaggtgaagatgtggaaagcccagagagttggagagttgagagaaggaagaaagcagttaaggtctttcactaccattcctacagtgattggcaagataccgtttctacctcactctccatgtaccatgccagtgacatcttagctgctagagtgtggagctggcctgtgggagtcaagtattggtgatgtgacctgttcacgcaggggaaacttgaacattcgcaggtacaccagaggatcgcttcctggcagaatttgggagctgtttattgcagcactgttgtgccctctgatgatgttacagtggtttatcaaaatgggttacctgtgatatctgtgaggctaccatcccggcgtgaacgctgtcagttcacactcaagcctatctctgactctgttggtgtatttttacgacaactgcaagaagaggatcggggaattgacagagttgctatctattcaccagatggtgttcgcgttgctgcttcaacaggaatagacctcctcctccttgatgactttaagctggtcattaatgacttaacataccacgtacgaccaccaaaaagagacctcttaagtcatgaaaatgcagcaacgctgaatgatgtaaagacattggtccagcaactatacaccacactgtgcattgagcagcaccagttaaacaaggaaagggagcttattgaaagactagaggatctcaaagagcagctggctcccctggaaaaggtacgaattgagattagcagaaaagctgagaagaggaccactttggtgctatggggtggccttgcctacatggccacacagtttggcattttggcccggcttacctggtgggaatattcctgggacatcatggagccagtaacatacttcatcacttatggaagtgcca

SEQ ID NO: 154225 - DNA, 3224 bp, Homo sapiens; identical to SEQ ID NO: 154223
  Payload ID: 10308
  Gene Symbol: MCU
  Gene Name: mitochondrial calcium uniporter
  ENST ID: ENST00000605597
  CDS Start-End: 141-407

SEQ ID NO: 154226 - DNA, 473 bp, Homo sapiens
  Payload ID: 10308
  Gene Symbol: MCU
  Gene Name: mitochondrial calcium uniporter
  ENST ID: ENST00000603649
  CDS Start-End: 10-285
agttgagagatggcggccgccgcaggtagatcgctcctgctgctcctctcctctcggggcggcggcggcgggggcgccggcggctgcggggcgctgactgccggctgcttccctgggctgggcgtcagccgccaccggcagcagcagcaccaccggacggtctttcactaccattcctacagtgattggcaagataccgtttctacctcactctccatgtaccatgccagtgacatcttagctgctagagtgtggagctggcctgtgggagtcaagtattggtgatgtgacctgttcacgcaggggaaacttgaacattcgcagatggttctgttatatcccccagagaccaagggttggccctttatgcttattaggaaagaaggattatgaccaacacttgcatcctgggtacaccagaggatcgcttcctggcagaatttgggagctgtttattgcagcactgttgtgcc

SEQ ID NO: 154227 - DNA, 894 bp, Homo sapiens
  Payload ID: 10308
  Gene Symbol: MCU
  Gene Name: mitochondrial calcium uniporter
  ENST ID: ENST00000604372
  CDS Start-End: 10-174
agttgagagatggcggccgccgcaggtagatcgctcctgctgctcctctcctctcggggcggcggcggcgggggcgccggcggctgcggggcgctgactgccggctgcttccctgggctgggcgtcagccgccaccggcagcagcagcaccaccggacggtattggtgatgtgacctgttcacgcaggggaaacttgaacattcgcagagagggtctcaccccgtcacccaggctgaagtgcggtggcatgatcttggctcactgcagcctcaaactcctgggctcaagcaatccttctttctcagcatcctgaatagctagtactacaggtacaccagaggatcgcttcctggcagaatttgggagctgtttattgcagcactgttgtgccctctgatgatgttacagtggtttatcaaaatgggttacctgtgatatctgtgaggctaccatcccggcgtgaacgctgtcagttcacactcaagcctatctctgactctgttggtgtatttttacgacaactgcaagaagaggatcggggaattgacagagttgctatctattcaccagatggtgttcgcgttgctgcttcaacaggaatagacctcctcctccttgatgactttaagctggtcattaatgacttaacataccacgtacgaccaccaaaaagagacctcttaagtcatgaaaatgcagcaacgctgaatgatgtaaagacattggtccagcaactatacaccacactgtgcattgagcagcaccagttaaacaaggaaagggagcttattgaaagactagaggatctcaaagagcagctggctcccctggaaaaggtacgaattgagattagcagaaaagctgagaagaggaccactttggtgctatggggt

SEQ ID NO: 154228 - DNA, 556 bp, Homo sapiens
  Payload ID: 10308
  Gene Symbol: MCU
  Gene Name: mitochondrial calcium uniporter
  ENST ID: ENST00000604152
  CDS Start-End: 56-556
tttgtacttcctgagagaaggcagagaagaagaatgttttattacatagatgaacatgtcttgtacaagatacagagcagcatctgccacaaaacagtacaccagaggatcgcttcctggcagaatttgggagctgtttattgcagcactgttgtgccctctgatggtgaatgttacagtggtttatcaaaatgggttacctgtgatatctgtgaggctaccatcccggcgtgaacgctgtcagttcacactcaagcctatctctgactctgttggtgtatttttacgacaactgcaagaagaggatcggggaattgacagagttgctatctattcaccagatggtgttcgcgttgctgcttcaacaggaatagacctcctcctccttgatgactttaagctggtcattaatgacttaacataccacgtacgaccaccaaaaagagacctcttaagtcatgaaaatgcagcaacgctgaatgatgtaaagacattggtccagcaactatacaccacactgtgcattgagcagcaccagttaaacaaggaaagggag

SEQ ID NO: 154229 - DNA, 5471 bp, Homo sapiens
  Payload ID: 10309
  Gene Symbol: MCUR1
  Gene Name: mitochondrial calcium uniporter regulator 1
  Uniprot ID: Q96AQ8
  ENST ID: ENST00000379170
  CDS Start-End: 140-1219
gcgcgcccggcaggaaagggcggtcctgcgctgtggcccacgctcgctcccgctgtcggactctgggcctggaccgcgcgtggccggcgccaaaagcgagaggcatgagcgcgcgcccgggccagtgaactgctcggggatggactgcggctcggtcggcggccagaggacccagcgcctgcccggccgccagcggcttctcttcttgcccgtgggcctcagcggaagaccgggcggcagcgaaacctcagcacgccgctgcctctctgcgctctccgacggtctgggggcgctgcgccctcgcgccccggcggcccgcggcggcgtgtcacgtgcctcaccgctgctcctcctcctgctagtgccctccccgcgcttggccgccgcagccccgcgccggcagctcggggactgggagcgctcgcgcctcgggtatgccgcacccccggccgggcgcagcagcgcgtggaggtgctcaccgggcgtcgccgctgccgccggcgcccttccccagtaccacggcccggcgcctgcactcgtttcctgcaggagagagctaagcttgtctgctggatccctgcagctggagcgcaaaaggagagatttcacctcttctgggagcaggaaactctacttcgacactcatgccttagtgtgcttactggaagacaatgggtttgctactcaacaagcagaaatcattgtgtctgcattggtcaagatcctggaggccaacatggacatcgtctacaaagatatggtcaccaagatgcagcaggaaatcacttttcagcaagtaatgtctcagattgcgaatgtgaaaaaggatatgattattttggagaagagtgaattttcagccctcagagcagaaaatgagaaaataaaactcgaactacatcagttaaaacaacaagtaatggatgaagtgatcaaagtccgaacagataccaaattagacttcaacctagaaaagagcagagtaaaagaattgtattcattgaacgaaaagaagctgctggaattgagaacagaaatagtggcattgcatgcccagcaagatcgggcccttacccagacagacaggaagatcgaaactgaggttgctggcctcaaaaccatgcttgagtcacacaagcttgataatattaaatatttagcagggtctatatttacgtgcctaacagtagctctgggattttatcgcctgtggatctaataaagtgtctatttaaagtgatttctactgttttgccttaagaataccagattgttggctgggtgcggtggctcacacctgtaattccagcactttgggaggctgaggcaggtggattacctgaggtcaggagttcgagaccagcctggccaacacggtgaaaccccgtctctactaaaaaattaaaacattaggcgggcgtggtggcgggcgcctgtagtcccagctactcgggaggctaaggtgtgaacctgggaggcggagcttgtagtgagccgagatcacgtcactgcactccagcctgggcaacagagcgagactccgtctcaaaaaaaaaaaaaaaaccggaataccagattgttgtccttttgttttcttgttacacatttgagcccagattttgacttaatgtgtattatttatttttatgaaaattgtggacacataaccaagataaagaagtcaggtattccatagccattccttatctcctttctgcttagttgactttctagctgagtggtgcacagtgcatggaagattccacttagccggaccaggaagcttggtctcatctgtggtgcacaccaacagcaaacattgatgtaattctctacaacttaatctttggcacatagaggatttgggggtctccatgttcagggcacaatggctttaataagtgctggaaaatcactgaagctaaaccaagagcaccagatcctctttacctaaataaccagtctttaacatgagctagtccctgtaccatagtattgtttcagctgtagttggttgtcatgttaataagacagctgcacgtctaccttcttttcttttgatttccattgtcttggtaagttattgttagggttatttttaatgtgccttccagccagaaaaatcagctgtctaaagaagcattgcaattgtaatggggactcttacctcttagaatgcaagattttccctcctccctccctcttctccatctctttccctcatgatttgagaactgtaataatcctccactggtggcattacctacctagaaaacctgctgattcttagcatggaactttgcttcagtttgcaggacaaagtctgcttccttccggtcttcatttactttttatacaagggatgcagtcagctctccatgtataagatacctagatgatggatacatatttcataaatgaaatttatgtcattaatgaatatccccttgcccacaaccagctcaggctttcaaaattcgagaatggtcatgccacacagcattctaatctagatggattaattctgttgttcaaaacattctcatacctgcctttatattgaaaacaaattctagatacaactggggttattctggaaaagcacattctcaccttttttttttttttgagacggagtctcgcactgtcgcagggctggagtgcattgtcgtgatctctgctcactgcaacctctgcctcctgggttcaagcgattctcctgcctcagtctcctgagtagctgggattacaggtgcccaccaccacgcccagctaatttttgtatttttagtagagatgaggtttcaccatgttggccaggctggtctctaactcctgacctcgtgattcacccgccttggtctcccaaagtagtgggattacaggcgtgagccgctgcgcctggcccattctcatcttattcaaattactggcacatgggcaagagagacaatgacatggatagaagcttttctgcctttctctgcacacacatacagtgaaggaaccacaggcagattttttgatcagtttggtgaatacattgctcgttgtcactgttccaaccacattggtaaaaaaaatagttaccttttgtcctttggatgtcatgtctaaactttggaaaatataagtcattgcccttttagagaatgtttgtgtagtccaaagattgtgagctccatatagtatgaaaatcaagtacttttgcatgagcaatagcagtttcaaagtgaaatattataatttaatctttttcaagtagatcaaaaattcttaactgattaataaaatattttatcaatatatcatccccctttcagagagaagtccccagaagagacagcacacttagcaattgccctcattattaaaggcctaggtgagtggcataaagggccatatgcgattatgtttcaaggtaaacattacctaaccttgtgtgggttaaaaacagtgaagtgtccttgtatcctgataaaatttttttttaaataacatggtgggttgacatttttgcatctgctataagttttctcacatgtcgttcttcctggtgagagcgggctgcatcattctggcacttaatttgggtgttcgattttgctatagagttctttgcagtacagcatagcctcttcttggccttgggaacagtgaactcttcttttgatggtgtggattgcatgcatatctggagagaggagggctcaggactgtgttcactttatttggtcagatgtattttatttgaaaaccatttgagcccaaaatacaagtgtacccttcccacttctggctcaagcacccgtgagccgactagacgtaatattaaaacttactgatgctgggtgcggtggctcatgcctataatcccagcactttgggaggccaaggcaggcagatcacctgaggtcaggagttggagaccagactggccaacatgacgaaatgctctcgctactaaaaatagaaaaattagccaggcgtggtggcacacccctgtaatcctagctactcgggaggctgagacaggaaaattgcatgaacctgggaggcagaggttgcagtgagcagagattacaccactgcaacgagactcgggcccagacgagatctgcctgggcgacacagtgagactctgtctcaaaataaataaataagtaaatagaacctcctgagctaccctggcttataaggattcagattactttaggaaattaggcattagcactaggaggggggaagatggctggcaaaacttctagctagcaacctatgtctagcacatgggtaactaaccatagcgagatcctgaacacatatcctctaggtgcaggtggagggaacgatgtccaatacctgaagcagaatctcacatggacggaacgtctgtatttccctctcctgcacgaatcactcatcattcttggagggcttctctgcattcctccttttcttctctcccctcccctgccttttgtcttttctaaagagtctgaactccgatttccatgctctcctgctacattaataagcaaaacctgcttgtgtgtacggttctttactggaaacatgactttttgtttctgtattggttttactgtcatccagttttctagtttaatatctagcaaaactaaatctgaatgtactcgctttttccgttaagtatgccaagcacctcggttgaaaggcttgactcaaaccagaagtcttgctggaattcgtctctgaacacttgaaaaacagaaaccctgagccgcaacaaacatgcctctgtgtgtcgggattgcctttgtctctgcttccatgtggcttttccttttgtagctatgcttagtgacataatcttccctcttctagccttctcctttcaagcctgtctgttaattaaccatgtcagtattggcaagcatttatcttcccccaccctaacatgcaatcttctaagaattttgcaaaattctaaacaaatatagagatggtatatagaattcatatctagaaaactttgattttaatgtgagcttatcaaatttgttctggcttttttggcactaaggcaaaaacatgttaaccagaaataatttattcttcatgtatgtaaaatatttgagaatgtttagccttttattagaattttatttggaaaatatttatctttctacacattttacacttatgttcctttgcttataacccaatttcttaacttttttgttacttaagcaaatatcaattatgttttattatctaataaagtgtaagattcttactatctaaaatatttaattctgtgtgactaatatacttttctgatcattcaaattgaatatgaaaagctagaataactgtattgcaactgttaattccagccaattgtataatgataacactggtgaatttctaagtaaatctaatacttgaaaatttgggtatacatagaaaataaattttaatataatgta

SEQ ID NO: 154230 - DNA, 622 bp, Homo sapiens
  Payload ID: 10309
  Gene Symbol: MCUR1
  Gene Name: mitochondrial calcium uniporter regulator 1
  ENST ID: ENST00000607303
  CDS Start-End: 1-373
aaaggatatgattattttggagaagagtgaattttcagccctcagagcagaaaatgagaaaataaaactcgaactacatcagttaaaacaacaagtaatggatgaagtgatcaaagtccgaacagataccaaattagacttcaacctagaaaagagcagagtaaaagaattgtattcattgaacgaaaagaagctgctggaattgagaacagaaatagtggcattgcatgcccagcaagatcgggcccttacccagacagacaggaagatcgaaactgaggttgctggcctcaaaaccatgcttgagtcacacaagcttgataatattaaatatttagcagagagaagtccccagaagagacagcacacttagcaattgccctcattattaaaggcctagtatgccaagcacctcggttgaaaggcttgactcaaaccagaagtcttgctggaattcgtctctgaacacttgaaaaacagaaaccctgagccgcaacaaacatgcctctgtgtgtcgggattgcctttgtctctgcttccatgtggcttttccttttgtagctatgcttagtgacataatcttccctcttctagccttctcctttcaagcctgtctgttaat

SEQ ID NO: 154231 - DNA, 1826 bp, Homo sapiens
  Payload ID: 10309
  Gene Symbol: MCUR1
  Gene Name: mitochondrial calcium uniporter regulator 1
  Uniprot ID: Q96AQ8
  ENST ID: ENST00000488770
  CDS Start-End: 140-913
gcgcgcccggcaggaaagggcggtcctgcgctgtggcccacgctcgctcccgctgtcggactctgggcctggaccgcgcgtggccggcgccaaaagcgagaggcatgagcgcgcgcccgggccagtgaactgctcggggatggactgcggctcggtcggcggccagaggacccagcgcctgcccggccgccagcggcttctcttcttgcccgtgggcctcagcggaagaccgggcggcagcgaaacctcagcacgccgctgcctctctgcgctctccgacggtctgggggcgctgcgccctcgcgccccggcggcccgcggcggcgtgtcacgtgcctcaccgctgctcctcctcctgctagtgccctccccgcgcttggccgccgcagccccgcgccggcagctcggggactgggagcgctcgcgcctcgggtatgccgcacccccggccgggcgcagcagcgcgtggaggtgctcaccgggcgtcgccgctgccgccggcgcccttccccagtaccacggcccggcgcctgcactcgtttcctgcaggagagagctaagcttgtctgctggatccctgcagctggagcgcaaaaggagagatttcacctcttctgggagcaggaaactctacttcgacactcatgccttagtgtgcttactggaagacaatgaatctcactctttcatccaggctggagtgcagtggcacagtcttggcctactgcaacccccacctcccggtttcaagcgatcctcccacctcatcctcctgagtagctgggattacaggcatgcaccaccacacctggataatttttctgtatttttactagagacggggtttcaccatgttggccaggctggtctcaaactgctgacctcaagtgatccacccaccttggcctcctaaagtgctgggattacaggcgtgaaccactgtgtccagttgccaaacctaattatgtttaaacatgaactctttttttaattaaaattttttaaaattttatttacattaaaatggagatgggatcactatgttgcccatgctggttctgaactcctgggctcaaagatcctcccgccttggtctcccagagtgttaggattacaggcgtgagccaccacacccagccagtgaactcttcttaataaaactttaaaatttggcaaaagtttagtttgagtttttaaaaactaggaagacagacgagaaaaaagaaaacagagtcagagctaaacaatgttaacattttgggtttgctactcaacaagcagaaatcattgtgtctgcattggtcaagatcctggaggccaacatggacatcgtctacaaagatatggtcaccaagatgcagcaggaaatcacttttcagcaagtaatgtctcagattgcgaatgtgaaaaaggatatgattattttggagaagagtgaattttcagccctcagagcagaaaatgagaaaataaaactcgaactacatcagttaaaacaacaagtaatggatgaagtgatcaaagtccgaacagataccaaattagacttcaacctagaaaagagcagagtaaaagaattgtattcattgaacgaaaagaagctgctggaattgagaacagaaatagtggcattgcatgcccagcaagatcgggcccttacccagacagacaggaagatcgaaactgaggttgctggcctcaaaaccatgcttgagtcacacaagcttgataatattaaatatttagcagggtctatatttacgtgcctaacagtagctctgggattttatcgcctgtggatctaataaagtgtctatttaaagtga

SEQ ID NO: 154232 - DNA, 2383 bp, Homo sapiens
  Payload ID: 10310
  Gene Symbol: MICU1
  Gene Name: mitochondrial calcium uptake 1
  Uniprot ID: Q9BPX6
  ENST ID: ENST00000361114
  CDS Start-End: 98-1528
ggagggggtggaggtttgtctccgctgtttcatctctatggctgtcagaggtgggcggctttgaccgagaggctgctggagctcgtgtttggacgcgatgtttcgtctgaactcactttctgctttggcagaactggctgtgggttctcgatggtaccatggaggatcacagcccatccagatccggcgaagactaatgatggtggctttcctgggagcatctgcagtaactgcaagtactggtcttttgtggaagagggcccatgcagaatctccaccatgtgtagacaacctaaaaagtgacatcggtgataaagggaagaataaagatgaaggggatgtttgtaaccatgagaaaaagactgcagatcttgcccctcacccagaagagaaaaagaagaaacgttctggattcagagacagaaaagtgatggaatatgagaataggattcgagcctactccacgccagacaaaatcttccgatattttgccaccttgaaagtcatcagtgagcctggtgaagcagaagtgtttatgacaccagaagattttgtgcgatccataacacccaatgaaaaacaaccagaacacttgggtctggatcaatatataataaaacgctttgatggaaagaaaatttcccaggaacgagaaaaatttgctgatgaaggcagtatattttacacccttggagaatgtgggctcatatccttttcagactacattttcctcacaactgttctttccactcctcagagaaattttgaaattgccttcaagatgtttgatttgaatggagatggagaagtagatatggaagaatttgaacaggttcagagcatcattcgctcccaaaccagtatgggtatgcgccacagagatcgtccaactactggcaacaccctcaagtctggcttgtgttcagccctcacaacctacttttttggagctgatctgaagggaaagctgacaatcaaaaacttcctcgaatttcagcgtaaactgcagcatgatgttctgaagcttgagtttgaacgccatgaccctgtggatgggagaattactgagaggcagtttggtggcatgctacttgcctacagtggggtgcagtccaagaagctgaccgccatgcagaggcagctcaagaagcacttcaaagaaggaaagggtctgacatttcaggaggtggagaacttctttactttcctaaagaacattaatgatgtggacactgcattgagtttttaccatatggctggagcatctcttgataaagtgaccatgcagcaggtggccaggacagtggctaaagtggagctctcagaccacgtgtgtgatgtggtgtttgcactctttgactgtgatggcaatggcgaactgagcaataaggaatttgtttccatcatgaagcaacggctgatgagaggcctggaaaagcccaaagacatgggtttcactcgcctcatgcaggccatgtggaaatgtgcacaggaaactgcctgggacttcgctttacccaaacagtaaccccacactgcaagaggggacccctccacccccagtaccctggaccccctccgcagagtctcggcagagccctttgtgctgctgcttctggaagtagtcccccttcctcccgggatgacctcaggactctgtcggtttcccctctttacccttccccgtccccgtgttctgctgggctctgattctgcccaatgagtatccccataggttctcaaaaacatgaacaagtctgtaaagctcagacatttgtcagcctcaacagcaccacccattcaagcatcctgtggataaagaattcagggaaccatccacacacctgccaaccctgggaagcatccagttctcaaatcgtttttgctatggatttatactaacaagaacattccttgacttccctcctgctggtgttttaaagccacaagtagggaagatatctggcaggcagaaagaagtctgtgatgataaacaatgatgaggatgacctaggcaccctacgctagtgtgagaagcctgcgccccaggaaggatctgtgttagtccctgggatggctccaaggcctgctctaggaaggcagcatgctcagtgggaacacagcaagattcagaatttaaagtagttgcttcatggctctgtgcactcccttttcttcctcgcagcctccctaagatgactccagtgtgaccctgtgcttagtgagcaatagtgattgagctcatgttccctgcaagtgccatttcctctccaggatgggcctctaaagctgaggcctggctcagagcctgtttgccctctgtcttaaacaattgtaaatatcacttaaattataaccatttgcaataaacatccccaaagtt

SEQ ID NO: 154233 - DNA, 2488 bp, Homo sapiens
  Payload ID: 10310
  Gene Symbol: MICU1
  Gene Name: mitochondrial calcium uptake 1
  ENST ID: ENST00000398761
  CDS Start-End: 184-1620
gttccttttcctctgtgcccctcccacacgcctgtctccacgatcccgacaggcccagcggctaggagagtcacgtgagagtgggcggagggggtggaggtttgtctccgctgtttcatctctatggctgtcagaggtgggcggctttgaccgagaggctgctggagctcgtgtttggacgcgatgtttcgtctgaactcactttctgctttggcagaactggctgtgggttctcgatggtaccatggaggatcacagcccatccagatccggcgaagactaatgatggtggctttcctgggagcatctgcagtaactgcaagtactggtcttttgtggaagagggcccatgcagaatctccaccatgtgtagacaacctaaaaagtgacatcggtgataaagggaagaataaagatgaaggggatgtttgtaaccatgagaaaaagactgcagatcttgcccctcacccagaagagaaaaagaagaaacgttctggattcagagacagaaaagtgatggaatatgagaataggattcgagcctactccacgccagacaaaatcttccgatattttgccaccttgaaagtcatcagtgagcctggtgaagcagaagtgtttatgacaccagaagattttgtgcgatccataacacccaatgaaaaacaaccagaacacttgggtctggatcaatatataataaaacgctttgatggaaaggtgaagaaaatttcccaggaacgagaaaaatttgctgatgaaggcagtatattttacacccttggagaatgtgggctcatatccttttcagactacattttcctcacaactgttctttccactcctcagagaaattttgaaattgccttcaagatgtttgatttgaatggagatggagaagtagatatggaagaatttgaacaggttcagagcatcattcgctcccaaaccagtatgggtatgcgccacagagatcgtccaactactggcaacaccctcaagtctggcttgtgttcagccctcacaacctacttttttggagctgatctgaagggaaagctgacaatcaaaaacttcctcgaatttcagcgtaaactgcagcatgatgttctgaagcttgagtttgaacgccatgaccctgtggatgggagaattactgagaggcagtttggtggcatgctacttgcctacagtggggtgcagtccaagaagctgaccgccatgcagaggcagctcaagaagcacttcaaagaaggaaagggtctgacatttcaggaggtggagaacttctttactttcctaaagaacattaatgatgtggacactgcattgagtttttaccatatggctggagcatctcttgataaagtgaccatgcagcaggtggccaggacagtggctaaagtggagctctcagaccacgtgtgtgatgtggtgtttgcactctttgactgtgatggcaatggcgaactgagcaataaggaatttgtttccatcatgaagcaacggctgatgagaggcctggaaaagcccaaagacatgggtttcactcgcctcatgcaggccatgtggaaatgtgcacaggaaactgcctgggacttcgctttacccaaacagtaaccccacactgcaagaggggacccctccacccccagtaccctggaccccctccgcagagtctcggcagagccctttgtgctgctgcttctggaagtagtcccccttcctcccgggatgacctcaggactctgtcggtttcccctctttacccttccccgtccccgtgttctgctgggctctgattctgcccaatgagtatccccataggttctcaaaaacatgaacaagtctgtaaagctcagacatttgtcagcctcaacagcaccacccattcaagcatcctgtggataaagaattcagggaaccatccacacacctgccaaccctgggaagcatccagttctcaaatcgtttttgctatggatttatactaacaagaacattccttgacttccctcctgctggtgttttaaagccacaagtagggaagatatctggcaggcagaaagaagtctgtgatgataaacaatgatgaggatgacctaggcaccctacgctagtgtgagaagcctgcgccccaggaaggatctgtgttagtccctgggatggctccaaggcctgctctaggaaggcagcatgctcagtgggaacacagcaagattcagaatttaaagtagttgcttcatggctctgtgcactcccttttcttcctcgcagcctccctaagatgactccagtgtgaccctgtgcttagtgagcaatagtgattgagctcatgttccctgcaagtgccatttcctctccaggatgggcctctaaagctgaggcctggctcagagcctgtttgccctctgtcttaaacaattgtaaatatcacttaaattataaccatttgcaataaacatccccaaagttccctgtctccttt

SEQ ID NO: 154234 - DNA, 1224 bp, Homo sapiens
  Payload ID: 10310
  Gene Symbol: MICU1
  Gene Name: mitochondrial calcium uptake 1
  Uniprot ID: Q9BPX6
  ENST ID: ENST00000398763
  CDS Start-End: 304-1140
aagactttattattttgcttttctgagctaatcaatgactttaatttggaaaagcaactaaatatttggagaaaaccatgaaaagaatatatacttacagacgggccaaggagatcttcaaggacactcctaaagaaaatttcccaggaacgagaaaaatttgctgatgaaggcagtatattttacacccttggagaatgtgggctcatatccttttcagactacattttcctcacaactgttctttccaataagtaataccatattgaagcaacagaacgttaatattactaagctaagaagatggtgtctctgaaagcaaagctaaatcatttaaggcaaagcatgttgaaacaaaaagctcctcagagaaattttgaaattgccttcaagatgtttgatttgaatggagatggagaagtagatatggaagaatttgaacaggttcagagcatcattcgctcccaaaccagtatgggtatgcgccacagagatcgtccaactactggcaacaccctcaagtctggcttgtgttcagccctcacaacctacttttttggagctgatctgaagggaaagctgacaatcaaaaacttcctcgaatttcagcgtaaactgcagcatgatgttctgaagcttgagtttgaacgccatgaccctgtggatgggagaattactgagaggcagtttggtggcatgctacttgcctacagtggggtgcagtccaagaagctgaccgccatgcagaggcagctcaagaagcacttcaaagaaggaaagggtctgacatttcaggaggtggagaacttctttactttcctaaagaacattaatgatgtggacactgcattgagtttttaccatatggctggagcatctcttgataaagtgaccatgcagcaggtggccaggacagtggctaaagtggagctctcagaccacgtgtgtgatgtggtgtttgcactctttgactgtgatggcaatggcgaactgagcaataaggaatttgtttccatcatgaagcaacggctgatgagaggcctggaaaagcccaaagacatgggtttcactcgcctcatgcaggccatgtggaaatgtgcacaggaaactgcctgggacttcgctttacccaaacagtaaccccacactgcaagaggggacccctccacccccagtaccctggaccccctccgcagagtctcggcagagccctttgtgctgctg

SEQ ID NO: 154235 - DNA, 1212 bp, Homo sapiens
  Payload ID: 10310
  Gene Symbol: MICU1
  Gene Name: mitochondrial calcium uptake 1
  Uniprot ID: Q9BPX6
  ENST ID: ENST00000418483
  CDS Start-End: 95-931
caaatgggacacctagaaagactttattattttgcttttctgagctaatcaatgactttaatttggaaaagcaactaaatatttggagaaaaccatgaaaagaatatatacttacagacgggccaaggagatcttcaaggacactcctaaagctcctcagagaaattttgaaattgccttcaagatgtttgatttgaatggagatggagaagtagatatggaagaatttgaacaggttcagagcatcattcgctcccaaaccagtatgggtatgcgccacagagatcgtccaactactggcaacaccctcaagtctggcttgtgttcagccctcacaacctacttttttggagctgatctgaagggaaagctgacaatcaaaaacttcctcgaatttcagcgtaaactgcagcatgatgttctgaagcttgagtttgaacgccatgaccctgtggatgggagaattactgagaggcagtttggtggcatgctacttgcctacagtggggtgcagtccaagaagctgaccgccatgcagaggcagctcaagaagcacttcaaagaaggaaagggtctgacatttcaggaggtggagaacttctttactttcctaaagaacattaatgatgtggacactgcattgagtttttaccatatggctggagcatctcttgataaagtgaccatgcagcaggtggccaggacagtggctaaagtggagctctcagaccacgtgtgtgatgtggtgtttgcactctttgactgtgatggcaatggcgaactgagcaataaggaatttgtttccatcatgaagcaacggctgatgagaggcctggaaaagcccaaagacatgggtttcactcgcctcatgcaggccatgtggaaatgtgcacaggaaactgcctgggacttcgctttacccaaacagtaaccccacactgcaagaggggacccctccacccccagtaccctggaccccctccgcagagtctcggcagagccctttgtgctgctgcttctggaagtagtcccccttcctcccgggatgacctcaggactctgtcggtttcccctctttacccttccccgtccccgtgttctgctgggctctgattctgcccaatgagtatccccataggttctcaaaaacatgaacaagtctgtaaagctcagacatttgtcagcctcaacagcaccacccattcaagcatc

SEQ ID NO: 154236 - DNA, 1933 bp, Homo sapiens
  Payload ID: 10310
  Gene Symbol: MICU1
  Gene Name: mitochondrial calcium uptake 1
  ENST ID: ENST00000476605
  CDS Start-End: 1-739
caatgaaaaacaaccagaacacttgggtctggatcaatatataataaaacgctttgatggaaagaaaatttcccaggaacgagaaaaatttgctgatgaaggcagtatattttacacccttggagaatgtgggctcatatccttttcagactacattttcctcacaactgttctttccactcctcagagaaattttgaaattgccttcaagatgtttgatttgaatggagatggagaagtagatatggaagaatttgaacaggttcagagcatcattcgctcccaaaccagtatgggtatgcgccacagagatcgtccaactactggcaacaccctcaagtctggcttgtgttcagccctcacaacctacttttttggagctgatctgaagggaaagctgacaatcaaaaacttcctcgaatttcagcgtaaactgcagcatgatgttctgaagcttgagtttgaacgccatgaccctgtggatgggagaattactgagaggcagtttggtggcatgctacttgcctacagtggggtgcagtccaagaagctgaccgccatgcagaggcagctcaagaagcacttcaaagaaggaaagggtctgacatttcaggaggtggagaacttctttactttcctaaagaacattaatgatgtggacactgcattgagtttttaccatatggctggagcatctcttgataaaggaaagggcaccatcttcatggggagaagatgagtacttgaaatatcaagacaattgcagaaggctgtgccctgagagaatggaagaactgggaaagagaaaaggaagtcagaagcttaagtgaccatgcagcaggtggccaggacagtggctaaagtggagctctcagaccacgtgtgtgatgtggtgtttgcactctttgactgtgatggcaatggcgaactgagcaataaggaatttgtttccatcatgaagcaacggctgatgagaggcctggaaaagcccaaagacatgggtttcactcgcctcatgcaggccatgtggaaatgtgcacaggaaactgcctgggacttcgctttacccaaacagtaaccccacactgcaagaggggacccctccacccccagtaccctggaccccctccgcagagtctcggcagagccctttgtgctgctgcttctggaagtagtcccccttcctcccgggatgacctcaggactctgtcggtttcccctctttacccttccccgtccccgtgttctgctgggctctgattctgcccaatgagtatccccataggttctcaaaaacatgaacaagtctgtaaagctcagacatttgtcagcctcaacagcaccacccattcaagcatcctgtggataaagaattcagggaaccatccacacacctgccaaccctgggaagcatccagttctcaaatcgtttttgctatggatttatactaacaagaacattccttgacttccctcctgctggtgttttaaagccacaagtagggaagatatctggcaggcagaaagaagtctgtgatgataaacaatgatgaggatgacctaggcaccctacgctagtgtgagaagcctgcgccccaggaaggatctgtgttagtccctgggatggctccaaggcctgctctaggaaggcagcatgctcagtgggaacacagcaagattcagaatttaaagtagttgcttcatggctctgtgcactcccttttcttcctcgcagcctccctaagatgactccagtgtgaccctgtgcttagtgagcaatagtgattgagctcatgttccctgcaagtgccatttcctctccaggatgggcctctaaagctgaggcctggctcagagcctgtttgccctctgtcttaaacaattgtaaatatcacttaaattataaccatttgcaataaacatccccaaagtt

SEQ ID NO: 154237 - DNA, 774 bp, Homo sapiens
  Payload ID: 10310
  Gene Symbol: MICU1
  Gene Name: mitochondrial calcium uptake 1
  ENST ID: ENST00000603011
  CDS Start-End: 138-774
tttcatctctatggctgtcagaggtgggcggctttgaccgagaggctgctggagctcgtgtttggacgcaactggctgtgggttctcgatggtaccatggaggatcacagcccatccagatccggcgaagactaatgatggtggctttcctgggagcatctgcagtaactgcaagtactggtcttttgtggaagagggcccatgcagaatctccaccatgtgtagacaacctaaaaagtgacatcggtgataaagggaagaataaagatgaaggggatgtttgtaaccatgagaaaaagactgcagatcttgcccctcacccagaagagaaaaagaagaaacgttctggattcagagacagaaaagtgatggaatatgagaataggattcgagcctactccacgccagacaaaatcttccgatattttgccaccttgaaagtcatcagtgagcctggtgaagcagaagtgtttatgacaccagaagattttgtgcgatccataacacccaatgaaaaacaaccagaacacttgggtctggatcaatatataataaaacgctttgatggaaagaaaatttcccaggaacgagaaaaatttgctgatgaaggcagtatattttacacccttggagaatgtgggctcatatccttttcagactacattttcctcacaactgttctttccactcctcagagaaattttgaaattgccttcaagatgtttgatttgaatggagatggagaagtagatatggaagaatttgaacaggcaa

SEQ ID NO: 154238 - DNA, 1268 bp, Homo sapiens
  Payload ID: 10310
  Gene Symbol: MICU1
  Gene Name: mitochondrial calcium uptake 1
  ENST ID: ENST00000604238
  CDS Start-End: 104-1268
gtgggcggagggggtggaggtttgtctccgctgtttcatctctatggctgtcagaggtgggcggctttgaccgagaggctgctggagctcgtgtttggacgcgatgtttcgtctgaactcactttctgctttggcagaactggctgtgggttctcgatggtaccatggaggatcacagcccatccagatccggcgaagactaatgatggtggctttcctgggagcatctgcagtaactgcaagtactggtcttttgtggaagagggcccatgcagaatctccaccatgtgtagacaacctaaaaagtgacatcggtgataaagggaagaataaagatgaaggggatgtttgtaaccatgagaaaaagactgcagatcttgcccctcacccagaagagaaaaagaagaaacgttctggattcagagacagaaaagtgatggaatatgagaataggattcgagcctactccacgccagacaaaatcttccgatattttgccaccttgaaagtcatcagtgagcctggtgaagcagaagtgtttatgacaccagaagattttgtgcgatccataacacccaatgaaaaacaaccagaacacttgggtctggatcaatatataataaaacgctttgatggaaaggccagattctccaaaaagaaaatattacacagggtcagaaagaaaagtaaagggtcaattttacagaggaggaagaaagcacttcagaaagaagaaagaaccaggcatggttctacaaagcacaatgaacaggaagtcagaaggacaatcatggagtggctggaaaaggctggagtgcagtggcaccatctcagctcactgcaacctccgactccctggttcaagcgattcttctgcctcagcctcttaagtagctgggattacaggcacacaccaccatgcccagctaatttttttatttttagtagagacagggtttcaccatgttggccaggatggtctcgatatcctgacctcatgatccgcccgccttggcttcgcaaagtgctgggattacagaaaatttcccaggaacgagaaaaatttgctgatgaaggcagtatattttacacccttggagaatgtgggctcatatccttttcagactacattttcctcacaactgttctttccactcctcagagaaattttgaaattgccttcaagatgtttgatttgaatggagatggagaagtagatatggaagaatttgaacaggttcagagcatcattcgctcccaaaccagta

SEQ ID NO: 154239 - DNA, 579 bp, Homo sapiens
  Payload ID: 10310
  Gene Symbol: MICU1
  Gene Name: mitochondrial calcium uptake 1
  ENST ID: ENST00000489666
  CDS Start-End: 117-579
agtaaaatggcttaaggggaaacaaatgggacacctagaaagactttattattttgcttttctgagctaatcaatgactttaatttggaaaagcaactaaatatttggagaaaaccatgaaaagaatatatacttacagacgggccaaggagatcttcaaggacactcctaaagctcctcagagaaattttgaaattgccttcaagatgtttgatttgaatggagatggagaagtagatatggaagaatttgaacaggttcagagcatcattcgctcccaaaccagtatgggtatgcgccacagagatcgtccaactactggcaacaccctcaagtctggcttgtgttcagccctcacaacctacttttttggagctgatctgaagggaaagctgacaatcaaaaacttcctcgaatttcagcgtaaactgcagcatgatgttctgaagcttgagtttgaacgccatgaccctgtggatgggagaattactgagaggcagtttggtggcatgctacttgcctacagtggggtgcagtccaagaagctgaccgccatgcagaggcagctcaagaagcact

SEQ ID NO: 154240 - DNA, 2215 bp, Homo sapiens
  Payload ID: 10310
  Gene Symbol: MICU1
  Gene Name: mitochondrial calcium uptake 1
  ENST ID: ENST00000635239
  CDS Start-End: 124-1566
gctaggagagtcacgtgagagtgggcggagggggtggaggtttgtctccgctgtttcatctctatggctgtcagaggtgggcggctttgaccgagaggctgctggagctcgtgtttggacgcgatgtttcgtctgaactcactttctgctttggcagaactggctgtgggttctcgatggtaccatggaggatcacagcccatccagatccggcgaagactaatgatggtggctttcctgggagcatctgcagtaactgcaagtactggtcttttgtggaagagggcccatgcagaatctccaccatgtgtagacaacctaaaaagtgacatcggtgataaagggaagaataaagatgaaggggatgtttgtaaccatgagaaaaagactgcagatcttgcccctcacccagaagagaaaaagaagaaacgttctggattcagagacagaaaagtgatggaatatgagaataggattcgagcctactccacgccagacaaaatcttccgatattttgccaccttgaaagtcatcagtgagcctggtgaagcagaagtgtttatgacaccagaagattttgtgcgatccataacacccaatgaaaaacaaccagaacacttgggtctggatcaatatataataaaacgctttgatggaaaggatttctggcagaaaatttcccaggaacgagaaaaatttgctgatgaaggcagtatattttacacccttggagaatgtgggctcatatccttttcagactacattttcctcacaactgttctttccactcctcagagaaattttgaaattgccttcaagatgtttgatttgaatggagatggagaagtagatatggaagaatttgaacaggttcagagcatcattcgctcccaaaccagtatgggtatgcgccacagagatcgtccaactactggcaacaccctcaagtctggcttgtgttcagccctcacaacctacttttttggagctgatctgaagggaaagctgacaatcaaaaacttcctcgaatttcagcgtaaactgcagcatgatgttctgaagcttgagtttgaacgccatgaccctgtggatgggagaattactgagaggcagtttggtggcatgctacttgcctacagtggggtgcagtccaagaagctgaccgccatgcagaggcagctcaagaagcacttcaaagaaggaaagggtctgacatttcaggaggtggagaacttctttactttcctaaagaacattaatgatgtggacactgcattgagtttttaccatatggctggagcatctcttgataaagtgaccatgcagcaggtggccaggacagtggctaaagtggagctctcagaccacgtgtgtgatgtggtgtttgcactctttgactgtgatggcaatggcgaactgagcaataaggaatttgtttccatcatgaagcaacggctgatgagaggcctggaaaagcccaaagacatgggtttcactcgcctcatgcaggccatgtggaaatgtgcacaggaaactgcctgggacttcgctttacccaaacagtaaccccacactgcaagaggggacccctccacccccagtaccctggaccccctccgcagagtctcggcagagccctttgtgctgctgcttctggaagtagtcccccttcctcccgggatgacctcaggactctgtcggtttcccctctttacccttccccgtccccgtgttctgctgggctctgattctgcccaatgagtatccccataggttctcaaaaacatgaacaagtctgtaaagctcagacatttgtcagcctcaacagcaccacccattcaagcatcctgtggataaagaattcagggaaccatccacacacctgccaaccctgggaagcatccagttctcaaatcgtttttgctatggatttatactaacaagaacattccttgacttccctcctgctggtgttttaaagccacaagtagggaagatatctggcaggcagaaagaagtctgtgatgataaacaatgatgaggatgacctaggcaccctacgctagtgtgagaagcctgcgccccaggaaggatctgtgttagtccctgggatggctccaaggcctgctctaggaaggcagcatgctcagtgggaacacagcaagattcagaatttaaagtagttgcttcatggctctgtgcactcccttttctt

SEQ ID NO: 154241 - DNA, 1920 bp, Homo sapiens
  Payload ID: 10311
  Gene Symbol: MICU2
  Gene Name: mitochondrial calcium uptake 2
  Uniprot ID: Q8IYU8
  ENST ID: ENST00000382374
  CDS Start-End: 67-1371
gagagttcccaagcggtaggcggcggcgccgggagagaagcgccgcctagctgcgcttccgcaaagatggcggcggctgcgggtagctgcgcgcgggtggcggcctggggcggaaaactgcgacgggggctcgctgtcagccgacaggctgtgcggagtcccggccccttggcagcggcagtggccggcgcggccctggcaggagcaggagcggcctggcaccacagccgcgtcagtgttgcggcgcgggatggcagttttacagtctccgcacagaaaaatgttgaacatggaataatatatattgggaaaccgtctcttcgtaagcagcgcttcatgcagttttcttcactcgaacatgaaggagaatattatatgacaccacgagacttcctcttctcagtgatgtttgagcaaatggaacgtaaaacttcagtcaagaagctgacaaaaaaggacatcgaggatacactgtcagggatccaaacagctggctgtggatcaacttttttcagagaccttggcgataaagggctaatttcatataccgagtatcttttcttgcttacaatcctcactaaaccccattctggatttcatgttgcttttaaaatgctggatacagatggtaatgagatgattgaaaaaagggaattttttaagctgcagaagatcataagtaaacaagatgacttgatgacagtgaaaactaatgaaactggatatcaggaagcaatagtgaaagaacctgaaattaacacaactcttcagatgcgtttctttggaaaaagaggacaaagaaaacttcattataaagaatttcgaagatttatggaaaatttacaaacagagattcaagaaatggaattccttcagttttctaaaggtttgagtttcatgagaaaagaagactttgcagagtggctactttttttcactaacactgaaaataaagatatttattggaaaaatgtgagagagaagttgtcagcaggagagagcattagtttggatgaattcaagtcattttgccattttacaacccacttggaagactttgctattgccatgcagatgttcagtttagctcatcgtcctgtcagactagcggagtttaagagagctgtgaaagtagcaacaggacaagaactctcaaacaatattttggacactgtctttaagatctttgatttggatggtgatgaatgtcttagtcatgaagagtttcttggggtgttaaaaaacagaatgcatcgaggtttatgggtaccacaacatcagagtatacaagaatactggaagtgtgtgaagaaagaaagcattaaaggagtaaaagaagtctggaaacaagctggaaaaggtcttttttaataaaagatataatagtatggcaattatattgttccaaatgtcaaaatttgtgattttttagaagtacttgctatttatcttcttaagtcttcattgatattctgtgtgaaataagcatgtcttgtacttgctttctgattcataattttattaaagaacttagtagaaagaaaagtaagtataaaaatagatattggattctgtcagaaggcctagatttgaaataatgttttgtacttcggtaagatggaaaacttagtgattcactgatttcttagacactctaatatgatatgctttctggaaggataaaacaaatacatatgggaaaaagtacttgagaccaaggccagcatcaattccagacatcttcatgttcctaataggctaaatgaagttaaaaacttatttcagatttttctcatctgtaccttatatctcataaatttattgcatattttatgtcagtagcttagctgtttattgtctttaaaataacatgtaaacttcaatgttctatctggaagcagaataaaatatttacataga

SEQ ID NO: 154242 - DNA, 742 bp, Homo sapiens
  Payload ID: 10311
  Gene Symbol: MICU2
  Gene Name: mitochondrial calcium uptake 2
  ENST ID: ENST00000468222
  CDS Start-End: 34-742
agagaagcgccgcctagctgcgcttccgcaaagatggcggcggctgcgggtagctgcgcgcgggtggcggcctggggcggaaaactgcgacgggggctcgctgtcagccgacaggctgtgcggagtcccggccccttggcagcggcagtggccggcgcggccctggcaggagcaggagcggcctggcaccacagccgcgtcagtgttgcggcgcgggatggcagttttacagtctccgcacagaaaaatgttgaacatggaataatatatattgggaaaccgtctcttcgtaagcagcgcttcatgcagttttcttcactcgaacatgaaggagaatattatatgacaccacgagacttcctcttctcagtgatgtttgagcaaatggaacgtaaaacttcagtcaagaagctgacaaaaaaggacatcgaggatacactgtcagggatccaaacagctggctgtggatcaacttttttcagagaccttggcgataaagggctaatttcatataccgagtatcttttcttgcttacaatcctcactaaaccccattctggatttcatgttgcttttaaaatgctggatacagatggtaatgagatgattgaaaaaagggaattttttaagattgatacaattgattctgaaaggcagctgcagaagatcataagtaaacaagatgacttgatgacagtgaaaactaatgaaactggatatcaggaagcaatagtgaaagaac

SEQ ID NO: 154243 - DNA, 3992 bp, Homo sapiens
  Payload ID: 10312
  Gene Symbol: MICU3
  Gene Name: mitochondrial calcium uptake family, member 3
  Uniprot ID: Q86XE3
  ENST ID: ENST00000318063
  CDS Start-End: 43-1635
gttctctgccccctcccagctctggtgtgggcggcctccgctatggctgcgctgcgaaggctcttgtggccgccaccccgggtgtctcctccactctgcgctcaccagcccctccttgggccgtgggggcggcctgcggtgaccaccctgggccttcctggccggcccttctcctcccgagaggatgaggagagggctgtggcggaggcggcatggaggcggcggcggcgctggggggagctgagcgtggcggcggcggccggcggggggctggtcggcctggtatgctaccagctgtacggggaccccagggccggctcgccggcgaccgggcgaccctcaaagagcgcggccacggagcccgaggacccgccccgcggccgggggatgctgcccatcccagtggcggctgccaaggagacggttgctattggcagaacagacattgaagacttagacctttatgccacatctcgggagaggcgatttcgtttatttgcttctatagaatgtgaagggcagttattcatgactccgtatgattttattttggctgttacaacagatgagcccaaagttgccaaaacttggaagtcactttccaaacaggaattaaatcaaatgctcgcagaaacaccaccagtttggaaaggctcatcgaagctatttcgaaatcttaaagaaaaaggtgtgatttcttacacagaatatctttttcttttatgtattttaacaaagccacatgcagggttcagaatagctttcaacatgtttgacactgatggcaatgagatggtggataaaaaagagtttttggtgcttcaagagatattcaggaaaaaaaatgaaaagagagaaattaaaggagatgaagaaaagcgtgcaatgctgcgtcttcaactttatggataccattctcctactaatagtgtacttaaaacagatgctgaggaacttgtctccagaagctattgggatacactgagacgtaacacaagccaagcactgttttcagacctcgcagagcgtgctgatgacatcacaagtttagtaacagatactacacttcttgtacacttttttggaaagaaaggaaaagctgagctcaactttgaagatttttatagattcatggataatctccaaacagaagttctagaaatagaattcctttcctactcaaatggaatgaataccatcagtgaagaagattttgctcatattcttttacgatatacaaatgtggaaaatacatcagtatttttagaaaatgtgcgttacagtatacctgaagaaaagggcatcacatttgatgaattcaggtcatttttccagtttttaaacaacctagaagactttgcaatagccctgaatatgtataactttgcaagtcgttctatagggcaagatgaatttaaacgtgccgtctatgtagctactggactcaaattttcaccacatttagtgaacactgtcttcaagatttttgatgttgacaaagatgatcaattaagttataaagaatttattggaattatgaaagacagactccatagaggattccggggttataaaacagtccagaagtaccccactttcaaatcctgcctgaagaaagaacttcacagcagataaatactcctaaaacaaagtttaaaggattactatctgtgtgacaaataacaagaagcaacattttgagaatggaagcaggtctgaggtcagaagaagtagagaatgaaggaaaaggtgaatgctatgaaattgatattttttctggaactgaattcttaaacataaaacagataaaatgcatcttgttactacaaatgttatatatataaaatcaagttgagctttgccttgatttgctgaactctctgcactttttcattcccttcagaagtatatagatacttccggtgactacatatgaatgtactttcaatattatttttttatttattcattagaaattttcctcatttcaaaataatttatgactcatggaatgttgatcgcctaaaaatgaacatcgcattttctttgattttggactgtgaacttattttcagagatgaatattgcttgagatttataatacccttagaattaaattcctgttatttgcccagtttttaattacactgagataattttgaaaagaaatagaaattaagctactatataaaacaattgtttacgtgtacttttaacttttaaaagtacttaattaacatatgttgtttgacttgtataaagtttttaaaaattgttgtttatttgccaaagtcaacagaatgtctgttattgttttatgtatacggtaaagaaatttaaagtgtagaattttcctcccccaaaaagtcatgtgttgatagtagaagcagtggtagttgttgtaacagtaatcattgtcattgtcattatcttcttaaacatgaagctgctcctgatcataggtggtacacgttaataacactagtaaaaataacgtcttacactctgtaacttactgcatattgttaatgtatgtctagcatcaaatgagtattgtaaaagactaatataaaatggtttataagactgatgtatatattaagtagaagctaatatttttgtttcttgcaaaaggaccacttgaaaagtgatgctaaacagccagtaataataatttaaatataatttattatttcaaaagaatatgtcttaaaagggaaaataaaaactttctgttgaatcacaacaaaattagatttgtacatagagaaacaatttgataatacttaatagaaatctgttcaattaaaaatgcttagtttatacaaagatactacacaaaaatagaacaattagtctgaattaacgtatttacatattgcatatggaagataagttcatttatcttcctttctaagacatatttaatgtaggttacatacactccaactattactttgcttttgcatatgaaactagaaaacactgactttgtttttataagttattaaatgtgaaattgatctgcatcagcttatttataaaagtaatgttatttccaagaaaatgttactcttagcattgattttgtatgttagactttttacattgtttatctaatattatttatgacagtaattttaaaatatattattcataagttcaaggatcccatatagtataagaatataatttcacttgctttgaaagttgatttaattgactgactaaatgaaaatgcctacccactcatataacatacctcaggtctattttaccttacactgaatgttcttaatatgatttggtacctaaagtaattgaaaaaaatgcagtttcctttaatccttgactataagttatactatgttgcgtacatggcaaatcctgcaaatatagattaaaaattaaattagcccattgaaatcctttataattctgtcattttcccaaggaagaatagcattgtacatatgcaatctttattttattctttattgcttatcagagtgagtggatgaaaacatttgtaaggctgcaacataatattaaaatgtgaataaataaatgttctgataaaatagaaaagaaagtaaattacagtgatttccatcatattatcactcttgaattttatcatctataaaatgagagataaaaatatctcactgaattgttacttatatcaatttaaaatttgctagtggtttgaaaataataatgtactgactacatgtatgctgttattgtcagtgtttccttctataaactgttctttggaaaaattaagttatacataaaattcatattaaactttttacagaaagcatacatgataaacagtttatggtacttctcagaatcatttcataataagcaatttatttagcttaagttccaacttactgttcttattataaattgcaaagcaacctgtcttacattcttacattatcttaaaataaatatttctgcccttgaatcaagaaaca

SEQ ID NO: 154244 - DNA, 1130 bp, Homo sapiens
  Payload ID: 10312
  Gene Symbol: MICU3
  Gene Name: mitochondrial calcium uptake family, member 3
  ENST ID: ENST00000519044
  CDS Start-End: 1-1127
catctcgggagaggcgatttcgtttatttgcttctatagaatgtgaagggcagttattcatgactccgtatgattttattttggctgttacaacagatgagcccaaagttgccaaaacttggaagtcactttccaaacaggaattaaatcaaatgctcgcagaaacaccaccagtttggaaaggctcatcgaagctatttcgaaatcttaaagaaaaaggtgtgatttcttacacagaatatctttttcttttatgtattttaacaaagccacatgcagggttcagaatagctttcaacatgtttgacactgatggcaatgagatggtggataaaaaagagtttttggtgcttcaagagatattcaggaaaaaaaatgaaaagagagaaattaaaggagatgaagaaaagcgtgcaatgctggtacttaaaacagatgctgaggaacttgtctccagaagctattgggatacactgagacgtaacacaagccaagcactgttttcagacctcgcagagcgtgctgatgacatcacaagtttagtaacagatactacacttcttgtacacttttttggaaagaaaggaaaagctgagctcaactttgaagatttttatagattcatggataatctccaaacagaagttctagaaatagaattcctttcctactcaaatggaatgaataccatcagtgaagaagattttgctcatattcttttacgatatacaaatgtggaaaatacatcagtatttttagaaaatgtgcgttacagtatacctgaagaaaagggcatcacatttgatgaattcaggtcatttttccagtttttaaacaacctagaagactttgcaatagccctgaatatgtataactttgcaagtcgttctatagggcaagatgaatttaaacgtgccgtctatgtagctactggactcaaattttcaccacatttagtgaacactgtcttcaagatttttgatgttgacaaagatgatcaattaagttataaagaatttattggaattatgaaagacagactccatagaggattccggggttataaaacagtccagaagtaccccactttcaaatcctgcctgaagaaagaacttcacagcagataaata

SEQ ID NO: 154245 - DNA, 439 bp, Homo sapiens
  Payload ID: 10312
  Gene Symbol: MICU3
  Gene Name: mitochondrial calcium uptake family, member 3
  ENST ID: ENST00000517398
  CDS Start-End: 1-301
attcatgactccgtatgattttattttggctgttacaacagatgagcccaaagttgccaaaacttggaagtcactttccaaacaggaattaaatcaaatgctcgcagaaacaccaccagtttggaaaggctcatcgaagctatttcgaaatcttaaagaaaaaggtgtgatttcttacacagaatatctttttcttttatgtattttaacaagtaagtatacttattgcttttatttctggatgcagctttattttttaaacgaatcttggaaagcagatcttaggttctcttactcttgaaaatcaatatccatgctgttctgcaaaattcatgtttaatgctacagaaaaatgctaagcatagcactgtaaagagtcaaaaacataaatgctacagcttatggtatagtaataaatgctcataaattataaatttaa

SEQ ID NO: 154246 - DNA, 2006 bp, Homo sapiens
  Payload ID: 10313
  Gene Symbol: MTCH1
  Gene Name: mitochondrial carrier 1
  Uniprot ID: Q9NZJ7
  ENST ID: ENST00000373616
  CDS Start-End: 126-1244
cccgccgcaccacgctcccgagctcccccgcggcctggagtggtgcgccccggccccgccccctgacgccggtgagggggcgtggccccgtcacgtgacggggagtgacctcgccgccgggcgccatgggagcttcggacccggaagtggcgccctgggctcgcggcggtgccgcggggatggcgggagccggagctggagccggagctcgcggcggagcggcggcgggggtcgaggctcgagctcgcgatccaccgcccgcgcaccgcgcacatcctcgccaccctcggcctgcggctcagccctcggcccgcaggatggatggcgggtcagggggcctggggtctggggacaacgccccgaccactgaggctcttttcgtggcactgggcgcgggcgtgacggcgctcagccatcccctgctctacgtgaagctgctcatccaggtgggtcatgagccgatgccccccacccttgggaccaatgtgctggggaggaaggtcctctatctgccgagcttcttcacctacgccaagtacatcgtgcaagtggatggtaagatagggctgttccgaggcctgagtccccggctgatgtccaacgccctctctactgtgactcggggtagcatgaagaaggttttccctccagatgagattgagcaggtttccaacaaggatgatatgaagacttccctgaagaaagttgtgaaggagacctcctacgagatgatgatgcagtgtgtgtcccgcatgttggcccaccccctgcatgtcatctcaatgcgctgcatggtccagtttgtgggacgggaggccaagtacagtggtgtgctgagctccattgggaagattttcaaagaggaagggctgctgggattcttcgttggattaatccctcacctcctgggcgatgtggttttcttgtggggctgtaacctgctggcccacttcatcaatgcctacctggtggatgacagcttcagccaggccctggccatccggagctataccaagttcgtgatggggattgcagtgagcatgctgacctaccccttcctgctagttggcgacctcatggctgtgaacaactgcgggctgcaagctgggctccccccttactccccagtgttcaaatcctggattcactgctggaagtacctgagtgtgcagggccagctcttccgaggctccagcctgcttttccgccgggtgtcatcaggatcatgctttgccctggagtaacctgaatcatctaaaaaacacggtctcaacctggccaccgtgggtgaggcctgaccaccttgggacacctgcaagacgactccaacccaacaacaaccagatgtgctccagcccagccgggcttcagttccatatttgccatgtgtctgtccagatgtggggttgagcgggggtggggctgcacccagtggattgggtcacccggcagacctagggaaggtgaggcgaggtggggagttggcagaatccccatacctcgcagatttgctgagtctgtcttgtgcagagggccagagaatggcttatgggggcccaggttggatggggaaaggctaatggggtcagaccccaccccgtctacccctccagtcagcccagcgcccatcctgcagctcagctgggagcatcattctcctgctttgtacatagggtgtggtcccctggcacgtggccaccatcatgtctaggcctatgctaggaggcaaatggccaggctctgcctgtgtttttctcaacactacttttctgatatgagggcagcacctgcctctgaatgggaaatcatgcaactactcagaatgtgtcctcctcatctaatgctcatctgtttaatggtgatgcctcgcgtacaggatctggttacctgtgcagttgtgaatacccagaggttgggcagatcagtgtctctagtcctacccagttttaaagttcatggtaagatttgacctcatctcccgcaaataaatgtattggtgatttgga

SEQ ID NO: 154247 - DNA, 2057 bp, Homo sapiens
  Payload ID: 10313
  Gene Symbol: MTCH1
  Gene Name: mitochondrial carrier 1
  Uniprot ID: Q9NZJ7
  ENST ID: ENST00000373627
  CDS Start-End: 126-1295
cccgccgcaccacgctcccgagctcccccgcggcctggagtggtgcgccccggccccgccccctgacgccggtgagggggcgtggccccgtcacgtgacggggagtgacctcgccgccgggcgccatgggagcttcggacccggaagtggcgccctgggctcgcggcggtgccgcggggatggcgggagccggagctggagccggagctcgcggcggagcggcggcgggggtcgaggctcgagctcgcgatccaccgcccgcgcaccgcgcacatcctcgccaccctcggcctgcggctcagccctcggcccgcaggatggatggcgggtcagggggcctggggtctggggacaacgccccgaccactgaggctcttttcgtggcactgggcgcgggcgtgacggcgctcagccatcccctgctctacgtgaagctgctcatccaggtgggtcatgagccgatgccccccacccttgggaccaatgtgctggggaggaaggtcctctatctgccgagcttcttcacctacgccaagtacatcgtgcaagtggatggtaagatagggctgttccgaggcctgagtccccggctgatgtccaacgccctctctactgtgactcggggtagcatgaagaaggttttccctccagatgagattgagcaggtttccaacaaggatgatatgaagacttccctgaagaaagttgtgaaggagacctcctacgagatgatgatgcagtgtgtgtcccgcatgttggcccaccccctgcatgtcatctcaatgcgctgcatggtccagtttgtgggacgggaggccaagtacagtggtgtgctgagctccattgggaagattttcaaagaggaagggctgctgggattcttcgttggattaatccctcacctcctgggcgatgtggttttcttgtggggctgtaacctgctggcccacttcatcaatgcctacctggtggatgacagcgtgagtgacaccccaggggggctgggaaacgaccagaatccaggttcccagttcagccaggccctggccatccggagctataccaagttcgtgatggggattgcagtgagcatgctgacctaccccttcctgctagttggcgacctcatggctgtgaacaactgcgggctgcaagctgggctccccccttactccccagtgttcaaatcctggattcactgctggaagtacctgagtgtgcagggccagctcttccgaggctccagcctgcttttccgccgggtgtcatcaggatcatgctttgccctggagtaacctgaatcatctaaaaaacacggtctcaacctggccaccgtgggtgaggcctgaccaccttgggacacctgcaagacgactccaacccaacaacaaccagatgtgctccagcccagccgggcttcagttccatatttgccatgtgtctgtccagatgtggggttgagcgggggtggggctgcacccagtggattgggtcacccggcagacctagggaaggtgaggcgaggtggggagttggcagaatccccatacctcgcagatttgctgagtctgtcttgtgcagagggccagagaatggcttatgggggcccaggttggatggggaaaggctaatggggtcagaccccaccccgtctacccctccagtcagcccagcgcccatcctgcagctcagctgggagcatcattctcctgctttgtacatagggtgtggtcccctggcacgtggccaccatcatgtctaggcctatgctaggaggcaaatggccaggctctgcctgtgtttttctcaacactacttttctgatatgagggcagcacctgcctctgaatgggaaatcatgcaactactcagaatgtgtcctcctcatctaatgctcatctgtttaatggtgatgcctcgcgtacaggatctggttacctgtgcagttgtgaatacccagaggttgggcagatcagtgtctctagtcctacccagttttaaagttcatggtaagatttgacctcatctcccgcaaataaatgtattggtgatttgga

SEQ ID NO: 154248 - DNA, 602 bp, Homo sapiens
  Payload ID: 10313
  Gene Symbol: MTCH1
  Gene Name: mitochondrial carrier 1
  ENST ID: ENST00000418541
  CDS Start-End: 1-602
atgcagtgtgtgtcccgcatgttggcccaccccctgcatgtcatctcaatgcgctgcatggtccagtttgtgggacgggaggccaagtacagctgtcctgcggggccaccatcccaggaagctcagctgccatggtgcctcattttggggtcattaatgggaaattggcccattcccctagactgattatgagtggtgtgctgagctccattgggaagattttcaaagaggaagggctgctgggattcttcgttggattaatccctcacctcctgggcgatgtggttttcttgtggggctgtaacctgctggcccacttcatcaatgcctacctggtggatgacagcttcagccaggccctggccatccggagctataccaagttcgtgatggggattgcagtgagcatgctgacctaccccttcctgctagttggcgacctcatggctgtgaacaactgcgggctgcaagctgggctccccccttactccccagtgttcaaatcctggattcactgctggaagtacctgagtgtgcagggccagctcttccgaggctccagcctgcttttccgccgggtgtcatcaggatcatgctttgcc

SEQ ID NO: 154249 - DNA, 1572 bp, Homo sapiens
  Payload ID: 10313
  Gene Symbol: MTCH1
  Gene Name: mitochondrial carrier 1
  ENST ID: ENST00000460219
  CDS Start-End: 1-1185
gcggggatggcgggagccggagctggagccggagctcgcggcggagcggcggcgggggtcgaggctcgagctcgcgatccaccgcccgcgcaccgcgcacatcctcgccaccctcggcctgcggctcagccctcggcccgcaggatggatggcgggtcagggggcctggggtctggggacaacgccccgaccactgaggctcttttcgtggcactgggcgcgggcgtgacggcgctcagccatcccctgctctacgtgaagctgctcatccaggtgggtcatgagccgatgccccccacccttgggaccaatgtgctggggaggaaggtcctctatctgccgagcttcttcacctacgccaagtacatcgtgcaagtggatggtaagatagggctgttccgaggcctgagtccccggctgatgtccaacgccctctctactgtgactcggggtagcatgaagaaggttttccctccagatgagattgagcaggtttccaacaaggatgatatgaagacttccctgaagaaagttgtgaaggagacctcctacgagatgatgatgcagtgtgtgtcccgcatgttggcccaccccctgcatgtcatctcaatgcgctgcatggtccagtttgtgggacgggaggccaagtacagtggtgtgctgagctccattgggaagattttcaaagaggaagggctgctgggattcttcgttggattaatccctcacctcctgggcgatgtggttttcttgtggggctgtaacctgctggcccacttcatcaatgcctacctggtggatgacagcttcagccaggccctggccatccggagctataccaagttcgtgatggggattgcagtgagcatgctgacctaccccttcctgctagttggcgacctcatggctgtgaacaactgcgggctgcaagctgggctccccccttactccccagtgttcaaatcctggattcactgctggaagtacctgagtgtgcaggtgagcaagcactggacggcggaggcctttcctgttctttgctacatccttcagctgaaatggttttgtggatgcttcattgcatgcaaagataagtggtttcatggaattcaatattgtgaggagatacttggtatctataaggcatttaagttttcatcttacataatttcagaaaggatttgaggtggctaagtgtgggtttattttaagattatacatcagacaagaccttttcttctttgagtcttaaagactcttaggataaggataagagaactctggcccaggtggcaggtggtaaagcccaagaactgcttctccttcaagtaacatgggctgaaaattcgaggtctgtaaccagttgagctgagttcctgggttgttagggcggctggcattggaaaccgactcctccctcctgcaggacattcctgggcccaggagagcctgtgggtggggctgggccacgtggggaactggcagcagtaccaaccttgggttctcgtgttctgtaccgaagctacctctccgtagctggagctcttgggcccagcagtcaggggtccaggc

SEQ ID NO: 154250 - DNA, 1732 bp, Homo sapiens
  Payload ID: 10313
  Gene Symbol: MTCH1
  Gene Name: mitochondrial carrier 1
  ENST ID: ENST00000538808
  CDS Start-End: 45-1136
atcctcgccaccctcggcctgcggctcagccctcggcccgcaggatggatggcgggtcagggggcctggggtctggggacaacgccccgaccactgaggctcttttcgtggcactgggcgcgggcgtgacggcgctcagccatcccctgctctacgtgaagctgctcatccaggtgggtcatgagccgatgccccccacccttgggaccaatgtgctggggaggaaggtcctctatctgccgagcttcttcacctacgccaagtacatcgtgcaagtggatggtaagatagggctgttccgaggcctgagtccccggctgatgtccaacgccctctctactgtgactcggggtagcatgaagaaggttttccctccagatgagattgagcaggtttccaacaaggatgatatgaagacttccctgaagaaagttgtgaaggagacctcctacgagatgatgatgcagtgtgtgtcccgcatgttggcccaccccctgcatgtcatctcaatgcgctgcatggtccagtttgtgggacgggaggccaagtacagtggtgtgctgagctccattgggaagattttcaaagaggaagggctgctgggattcttcgttggattaatccctcacctcctgggcgatgtggttttcttgtggggctgtaacctgctggcccacttcatcaatgcctacctggtggatgacagcttcagccaggccctggccatccggagctataccaagttcgtgatggggattgcagtgagcatgctgacctaccccttcctgctagttggcgacctcatggctgtgaacaactgcgggctgcaagctgggctccccccttactccccagtgttcaaatcctggattcactgctggaagtacctgagtgtgcagggccagctcttccgaggctccagctgcttttccgccgggtgtcatcaggatcatgctttgccctggagtaacctgaatcatctaaaaaacacggtctcaacctggccaccgtgggtgaggcctgaccaccttgggacacctgcaagacgactccaacccaacaacaaccagatgtgctccagcccagccgggcttcagttccatatttgccatgtgtctgtccagatgtggggttgagcgggggtggggctgcacccagtggattgggtcacccggcagacctagggaaggtgaggcgaggtggggagttggcagaatccccatacctcgcagatttgctgagtctgtcttgtgcagagggccagagaatggcttatgggggcccaggttggatggggaaaggctaatggggtcagaccccaccccgtctacccctccagtcagcccagcgcccatcctgcagctcagctgggagcatcattctcctgctttgtacatagggtgtggtcccctggcacgtggccaccatcatgtctaggcctatgctaggaggcaaatggccaggctctgcctgtgtttttctcaacactacttttctgatatgagggcagcacctgcctctgaatgggaaatcatgcaactactcagaatgtgtcctcctcatctaatgctcatctgtttaatggtgatgcctcgcgtacaggatctggttacctgtgcagttgtgaatacccagaggttgggcagatcagtgtctctagtcctacccagttttaaagttcatggtaagatttgacctcatctcccgcaaataaatgtattggtgatttgga

SEQ ID NO: 154251 - DNA, 2587 bp, Homo sapiens
  Payload ID: 10314
  Gene Symbol: MTCH2
  Gene Name: mitochondrial carrier 2
  Uniprot ID: Q9Y6C9
  ENST ID: ENST00000302503
  CDS Start-End: 159-1070
ggggcggggactgggcggagaggcgcgtgctgctgcgtgcgtgcgcgcgcgccgcgggcgggccagtgaaaccggcggccctggcacgtgacctaggaccggctcaccgggtcgcttggtggctccgtctgtctgtccgtccgcccgcgggtgccatcatggcggacgcggccagtcaggtgctcctgggctccggtctcaccatcctgtcccagccgctcatgtacgtgaaagtgctcatccaggtgggatatgagcctcttcctccaacaataggacgaaatatttttgggcggcaagtgtgtcagcttcctggtctctttagttatgctcagcacattgccagtatcgatgggaggcgcgggttgttcacaggcttaactccaagactgtgttcgggagtccttggaactgtggtccatggtaaagttttacagcattaccaggagagtgacaagggtgaggagttaggacctggaaatgtacagaaagaagtctcatcttcctttgaccacgttatcaaggagacaactcgagagatgatcgctcgttctgctgctaccctcatcacacatcccttccatgtgatcactctgagatctatggtacagttcattggcagagaatccaagtactgtggactttgtgattccataataaccatctatcgggaagagggcattctaggatttttcgcgggtcttgttcctcgccttctaggtgacatcctttctttgtggctgtgtaactcactggcctacctcgtcaatacctatgcactggacagtggggtttctaccatgaatgaaatgaagagttattctcaagctgtcacaggattttttgcgagtatgttgacctatccctttgtgcttgtctccaatcttatggctgtcaacaactgtggtcttgctggtggatgccctccttactccccaatatatacgtcttggatagactgttggtgcatgctacaaaaagaggggaatatgagccgaggaaatagcttatttttccggaaggtcccctttgggaagacttattgttgtgacctgaaaatgttaatttgaagatgtggggcagggacagtgacatttctgtagtcccagatgcacagaattatgggagagaatgttgatttctatacagtgtggcgcgcttttttaataatcatttaatcttgggaaaattcaggtgtttggtgtctgccttttttgttcttttttccagcacaacataacttaccactgatactccccctttagttattctgaattaggatatttttgctccaaattcttattttacttaaccagaagggaaaaaaagttgtattttcctgaagctacaggcactttgtcatgtgatttttgagtctcaatttaaggctttgtaaaatgaagagtagaattccaagaaaaatgagaaataattttgtaaaacttaacaaaatcactaaattaaactatatgggaggttatgaattactttttcttgggtagaccctaaaatgtcagtagcatgcaccagaatctgactcccattatgcttctaagcacatttcattgaccttgtctctcatacttcaagaaaaggacagtacattgctacattaccctagaaagtctgtgtgaggatctgccccttcagtctgttattgcaaagtaataaaatgtcacctacagggagcctctgagcctactctagttcaagaggctacctgaaaaaaaataaataagataaagggtcagcaacaacaaagaaaaagacaattacagaaaataagcaagatttggaaaggaagtataatggcacttttttcctcaaaggaagttcttgttttcacataaaatatgaaaagcagatcctgcaggagtaacccccttctttaagagccaagtatttgccagtgcttaaattacaccatacagttctaattatatataatcttttgttcttcagttttttgttttgtttcctttttgttattgttgccgaaggtgagtagttttgcatttctgatgacagccttggaaagtatatttgtaactccatgtctggtaatgccaacccaagtcgacatgggtcttaggacactgaccacctcacatgccataccctcagttaagcatgttaacatttataggaggaaaaaaatcactttgggagaaaataaaattcaactcaagcataaagcttctgtttactcaggccttctaaaaagcaggttaaaatgctctaaaatgagaaagcctgtggtttcacttatttatataactcactgggacattgccaaatgagtaagcacttaattcgctgcttctgagacttctctgtcaaaacagccccactgataatattagacagaacgagaatgcaggggtctcttccctcccctggggtttaggaagctcatgaggagctcggcttaaaatgtctttgatgtctcttcctttgtctcaaaaagtaatgtcaattttatatactatttcaatattactatctgcatttgttttaatataaaaatgtttgctgcctacctttttctcccaaaaaatctttaagtaaagatgatctgggaaaatgt

SEQ ID NO: 154252 - DNA, 930 bp, Homo sapiens
  Payload ID: 10314
  Gene Symbol: MTCH2
  Gene Name: mitochondrial carrier 2
  ENST ID: ENST00000530428
  CDS Start-End: 143-930
ggagaggcgcgtgctgctgcgtgcgtgcgcgcgcgccgcgggcgggccagtgaaaccggcggccctggcacgtgacctaggaccggctcaccgggtcgcttggtggctccgtctgtctgtccgtccgcccgcgggtgccatcatggcggacgcggccagtcaggtgctcctgggctccggtctcaccatcctgtcccagccgctcatgtacgtgaaagtgctcatccaggtgggatatgagcctcttcctccaacaataggacgaaatatttttgggcggcaagtgtgtcagcttcctggtctctttagttatgctcagcacattgccagtatcgatgggaggcgcgggttgttcacaggcttaactccaagactgtgttcgggagtccttggaactgtggtccatggtaaagttttacaggagttaggacctggaaatgtacagaaagaagtctcatcttcctttgaccacgttatcaaggagacaactcgagagatgatcgctcgttctgctgctaccctcatcacacatcccttccatgtgatcactctgagatctatggtacagttcattggcagagaatccaagtactgtggactttgtgattccataataaccatctatcgggaagagggcattctaggatttttcgcgggtcttgttcctcgccttctaggtgacatcctttctttgtggctgtgtaactcactggcctacctcgtcaatacctatgcactggacagtggggtttctaccatgaatgaaatgaagagttattctcaagctgtcacaggattttttgcgagtatgttgacctatccctttgtgcttgtctccaatcttatggctgtcaacaactgtggtcttgctggtggatgccctccttactccccaatatatacgtcttggatagactgttggtgcatgct

SEQ ID NO: 154253 - DNA, 955 bp, Homo sapiens
  Payload ID: 10315
  Gene Symbol: MCCD1
  Gene Name: mitochondrial coiled-coil domain 1
  Uniprot ID: P59942
  ENST ID: ENST00000376191
  CDS Start-End: 299-658
aaacactagatcaaaaaaaaaaaatcacagacctgtggtaggctgggcaccagtgctctaaagcaagttctgcctaaactggcagggacatttttcacatcaggaacaggagttgttcctggactctgtctggggccaggctgggagagacgtggggcagagtggggcaggggcaggggcagggctgggggctggggcctgggcagggccaggcactcaagtgaggccaagtcctggagcgaaccagttcctggtggccgttggacagctcacacagctccctgccaggtcacccgccatggtcctccctctgccctggctctctcggtaccatttccttcgcctccttctgccctcctggtccttggcaccccagggctcccatgggtgctgctcccaaaaccccaaagcaagcatggaagagcagaccagctccagaggaaatgggaagatgacgtcccctcccaggggccctgggacccaccgcacagctgagctggcccgagctgaagagttgttggagcagcagctggagctgtaccaggccctccttgaagggcaggagggagcctgggaggcccaagccctggtgctcaagatccagaagctgaaggaacagatgaggaggcaccaagagagccttggaggaggcgcctaagtttcccccagtgcccacagcaccctccggcgctgaaaatacacgcaccacccaccaggagccttgggatcataaacaccccagcgtcttcccaggccagagaaagtggaagagaccacaaagcgcaggcaattggcaggcagtgggggagccagggctctgcagtcttagtcccattcccctttgatctcacagcaggcagggcacccaggccttataggaattcaccctggaccatgccctaaaataacctcaccccaaatacaataaagggacgaagcacttatagataccaca

SEQ ID NO: 154254 - DNA, 955 bp, Homo sapiens
  Payload ID: 10315
  Gene Symbol: MCCD1
  Gene Name: mitochondrial coiled-coil domain 1
  Uniprot ID: P59942
  ENST ID: ENST00000383512
  CDS Start-End: 299-658
aaacactagatcaaaaaaaaaaaatcacagacctgtggtaggctgggcaccagtgctctaaagcaagttctgcctaaactggcagggacatttttcacatcaggaacaggagttgttcctggactctgtctggggccaggctgggagagacgtggggcagagtggggcaggggcaggggcagggctgggggctggggcctgggcagggccaggcactcaagtgaggccaagtcctggagcgaaccagttcctggtggccgttggacagctcacacagctcccggccaggtcacccgccatggtcctccctctgccctggctctctcggtaccatttccttcgcctccttctgccctcctggtccttggcaccccagggctcccatgggtgctgctcccaaaaccccaaagcaagcatggaagagcagaccaactccagaggaaatgggaagatgacgtcccctcccaggggccctgggacccaccgcacagctgagctggcccgagctgaagagttgttggagcagcagctggagctgtaccaggccctccttgaagggcaggagggagcctgggaggcccaagccctggtgctcaagatccagaagctgaaggaacagatgaggaggcaccaagagagccttggaggaggtgcctaagtttcccccagtgcccacagcaccctccggcactgaaaatacacgcaccacccaccaggagccttgggatcataaacaccccagcgtcttcccaggccagagaaagtggaagagaccacaaaccgcaggcaattggcaggcagtgggggagccagggctctgcagtcttagtcccattcccctttgatctcacagcaggcagggcacccaggccttataggaattcaccctggaccatgccctaaaataacctcaccccaaatacaataaagggacgaagcacttatagataccaca

SEQ ID NO: 154255 - DNA, 955 bp, Homo sapiens
  Payload ID: 10315
  Gene Symbol: MCCD1
  Gene Name: mitochondrial coiled-coil domain 1
  Uniprot ID: P59942
  ENST ID: ENST00000421209
  CDS Start-End: 299-658
aaacactagatcaaaaaaaaaaaatcacagacctgtggtaggctgggcaccagtgctctaaagcaagttctgcctgaactggcagggacatttttcacatcaggaacaggagttgttcctggactctgtctggggccaggctgggagagacgtggggcagagtggggcaggggcaggggcagggctgggggctggggcctgggcagggccaggcactcaagtgaggccaagtcctggagcgaaccagttcctggtggccgttggacagctcacacagctcccggccaggtcacccgccatggtcctccctctgccctggctctctcggtaccatttccttcgcctccttctgccctcctggtccttggcaccccagggctcccatgggtgctgctcccaaaaccccaaagcaagcatggaagagcagaccaactccagaggaaatgggaagatgacgtcccctcccaggggccctgggacccaccgcacagctgagctggcccgagctgaagagttgttggagcagcagctggagctgtaccaggccctccttgaagggcaggagggagcctgggaggcccaagccctggtgctcaagatccagaagctgaaggaacagatgaggaggcaccaagagagccttggaggaggtgcctaagtttcccccagtgcccacagcaccctccggcactgaaaatacacgcaccacccaccaggagccttgggatcataaacaccccagcgtcttcccaggccagagaaagtggaagagaccacaaaccgcaggcaattggcaggcagtgggggagccagggctctgcagtcttagtcccattcccctttgatctcacagcaggcagggcacccaggccttataggaattcaccctggaccatgccctaaaataacctcaccccaaatacaataaagggacgaagcacttatagataccaca

SEQ ID NO: 154256 - DNA, 955 bp, Homo sapiens; identical to SEQ ID NO: 154254
  Payload ID: 10315
  Gene Symbol: MCCD1
  Gene Name: mitochondrial coiled-coil domain 1
  Uniprot ID: P59942
  ENST ID: ENST00000452195
  CDS Start-End: 299-658

SEQ ID NO: 154257 - DNA, 955 bp, Homo sapiens; identical to SEQ ID NO: 154253
  Payload ID: 10315
  Gene Symbol: MCCD1
  Gene Name: mitochondrial coiled-coil domain 1
  Uniprot ID: P59942
  ENST ID: ENST00000424816
  CDS Start-End: 299-658

SEQ ID NO: 154258 - DNA, 955 bp, Homo sapiens; identical to SEQ ID NO: 154254
  Payload ID: 10315
  Gene Symbol: MCCD1
  Gene Name: mitochondrial coiled-coil domain 1
  Uniprot ID: P59942
  ENST ID: ENST00000443405
  CDS Start-End: 299-658

SEQ ID NO: 154259 - DNA, 955 bp, Homo sapiens
  Payload ID: 10315
  Gene Symbol: MCCD1
  Gene Name: mitochondrial coiled-coil domain 1
  Uniprot ID: P59942
  ENST ID: ENST00000422733
  CDS Start-End: 299-658
aaacactagatcaaaaaaaaaaaatcacagacctgtggtaggctgggcaccagtgctctaaagcaagttctgcctaaactggcagggacatttttcacatcaggaacaggagttgttcctggactctgtctggggccaggctgggagagacgtggggcagagtggggcaggggcaggggcagggctgggggctggggcctgggcagggccaggcactcaagtgaggccaagtcctggagcgaaccagttcctggtggccgttggacagctcacacagctccctgccaggtcacccgccatggtcctccctctgccctggctctctcggtaccatttccttcgcctccttctgccctcctggtccttggcaccccagggctcccatgggtgctgctcccaaaaccccaaagcaagcatggaagagcagaccagctccagaggaaatgggaagatgacgtcccctcccaggggccctgggacccaccgcacagctgagctggcccgagctgaagagttgttggagcagcagctggagctgtaccaggccctccttgaagggcaggagggggcctgggaggcccaagccctggtgctcaagatccagaagctgaaggaacagatgaggaggcaccaagagagccttggaggaggcgcctaagtttcccccagtgcccacagcaccctccggcgctgaaaatacacgcaccacccaccaggagccttgggatcataaacaccccagcgtcttcccaggccagagaaagtggaagagaccacaaagcgcaggcaattggcaggcagtgggggagccagggctctgcagtcttagtcccattcccctttgatctcacagcaggcagggcacccaggccttataggaattcaccctggaccatgccctaaaataacctcaccccaaatacaataaagggacgaagcacttatagataccaca

SEQ ID NO: 154260 - DNA, 955 bp, Homo sapiens
  Payload ID: 10315
  Gene Symbol: MCCD1
  Gene Name: mitochondrial coiled-coil domain 1
  Uniprot ID: P59942
  ENST ID: ENST00000430073
  CDS Start-End: 299-658
aaacactagatcaaaaaaaaaaaatcacagacctgtggtaggctgggcaccagtgctctaaagcaagttctgcctaaactggcagggacatttttcacatcaggaacaggagttgttcctggactctgtctggggccaggctgggagagacgtggggcagagtggggcaggggcaggggcagggctgggggctggggcctgggcagggccaggcactcaagtgaggccaagtcctggagcgaaccagttcctggtggccgttggacagctcacacagctcccggccaggtcacccgcgatggtcctccctctgccctggctctctcggtaccatttccttcgcctccttctgccctcctggtccttggcaccccagggctcccatgggtgctgctcccaaaaccccaaagcaagcatggaaaagcagaccaactccagaggaaatgggaagatgacgtcccctcccaggggccctgggacccaccgcacagctgagctggcccgagctgaagagttgttggagcagcagctggagctgtaccaggccctccttgaagggcaggagggagcctgggaggcccaagccctggtgctcaagatccagaagctgaaggaacagatgaggaggcaccaagagagccttggaggaggtgcctaagtttcccccagtgcccacagcaccctccggcactgaaaatacacgcaccacccaccaggagccttgggatcataaacaccccagcgtcttcccaggccagagaaagtggaagagaccacaaaccgcaggcaattggcaggcagtgggggagccagggctctgcagtcttagtcccattcccctttgatctcacagcaggcagggcacccaggccttataggaattcaccctggaccatgccctaaaataacctcaccccaaatacaataaagggacgaagcacttatagataccaca

SEQ ID NO: 154261 - DNA, 2438 bp, Homo sapiens
  Payload ID: 10316
  Gene Symbol: MUL1
  Gene Name: mitochondrial E3 ubiquitin protein ligase 1
  Uniprot ID: Q969V5
  ENST ID: ENST00000264198
  CDS Start-End: 138-1196
atcgctgggcgactgatttcgagtttccggtcaggttaggccgggggggtgcggtcctggtcggaaggaggtggagagtcgggggtcaccaggcctatccttggcgccacagtcggccaccggggctcgccgccgtcatggagagcggagggcggccctcgctgtgccagttcatcctcctgggcaccacctctgtggtcaccgccgccctgtactccgtgtaccggcagaaggcccgggtctcccaagagctcaagggagctaaaaaagttcatttgggtgaagatttaaagagtattctttcagaagctccaggaaaatgcgtgccttatgctgttatagaaggagctgtgcggtctgttaaagaaacgcttaacagccagtttgtggaaaactgcaagggggtaattcagcggctgacacttcaggagcacaagatggtgtggaatcgaaccacccacctttggaatgattgctcaaagatcattcatcagaggaccaacacagtgccctttgacctggtgccccacgaggatggcgtggatgtggctgtgcgagtgctgaagcccctggactcagtggatctgggtctagagactgtgtatgagaagttccacccctcgattcagtccttcaccgatgtcatcggccactacatcagcggtgagcggcccaaaggcatccaagagaccgaggagatgctgaaggtgggggccaccctcacaggggttggcgaactggtcctggacaacaactctgtccgcctgcagccgcccaaacaaggcatgcagtactatctaagcagccaggacttcgacagcctgctgcagaggcaggagtcgagcgtcaggctctggaaggtgctggcgctggtttttggctttgccacatgtgccaccctcttcttcattctccggaagcagtatctgcagcggcaggagcgcctgcgcctcaagcagatgcaggaggagttccaggagcatgaggcccagctgctgagccgagccaagcctgaggacagggagagtctgaagagcgcctgtgtagtgtgtctgagcagcttcaagtcctgcgtctttctggagtgtgggcacgtttgttcctgcaccgagtgctaccgcgccttgccagagcccaagaagtgccctatctgcagacaggcgatcacccgggtgatacccctgtacaacagctaatagtttggaagccgcacagcttgacctggaagcacccctgcccccttttcagggatttttatctcgaggcctttggaggagcagtggtgggggtagctgtcacctccaggtatgattgagggaggaattgggtagaaactctccagacccatgcctccaatggcaggatgctgcctttcccacctgagaggggaccctgtccatgtgcagcctcatcagagcctcaccctgggaggatgccgtggcgtctcctcccaggagccagatcagtgcgagtgtgactgaaaatgcctcatcacttaagcaccaaagccagtgatcagcagctcttctgttcctgtgtcttctgtttttttctggtgaatcgttgcttgctgtggacttggtggaggactcagaggggaggaaaggctgggccccgagtacaacggatgccttgggtgctgcctccgaagagactctgccgcagcttttcttctttttcctcatgccccgggaaacagtctttcttcagaattgtcaggctgggcaggtcaacttgtgttcctttcccctcacctgcttgcctccttaacgcctgcacgtgtgtgtagaggacaaaagaaagtgaagtcagcacatccgcttctgcccagatggtcggggccccgggcaacagattgaagagagatcatgtgaagggcagttggtcaggcaggcctcctggtttcgccactggccctgatttgaactcctgccacttgggagagctcggggtggtccctggttttccctcctggagaatgaggcgcagaggcctcgcctcctgaaggacgcagtgtggatgccactggcctagtgtcctggcctcacagcttccttgcaaggctgtcacaaggaaaagcagccggctggcaccctgagcatatgccctcttggggctccctcatccagcccgtcgcagctttgacatcttggtgtactcatgtcgcttctccttgtgttaccccctcccagtattaccatttgcccctcacctgcccttggtgagccttttagtgcaagacagatggggctgttttcccccacctctgagtagttggaggtcacatacacagctctttttttattgcccttttctgcctctgaatgttcatctctcgtcctcctttgtgcaggcgaggaaggggtgccctcaggggccgacactagtatgatgcagtgtccagtgtgaacagcagaaattaaacatgttgcaaccaa

SEQ ID NO: 154262 - DNA, 5625 bp, Homo sapiens
  Payload ID: 10317
  Gene Symbol: MIEF1
  Gene Name: mitochondrial elongation factor 1
  Uniprot ID: Q9NQG6
  ENST ID: ENST00000325301
  CDS Start-End: 425-1816
gaaggggccatgttgatgggtgacccggggagaggtacccggccagaggcgagtcctgcggagtggtagcgcgcacggcctgcggtgtgacacccagcccctgccagtcccccatggccccgtggagccgagaggcggtgctgagtctctatcgggctctgttgcgccagggccgacagcttcgctacactgatcgagacttctactttgcctccatccgccgtgaattccgaaaaaatcagaagctagaggacgctgaggcccgggagaggcagctggagaagggcctggtctttctcaacggcaaattggggaggatcatttaggatcctccaagggaaagaggacaaaggtgccttctgtagacactcctgctctcttccatccccatcttacagatgtattaagaagcctcagatgagcaatggcaggcgctggtgagcgcaaaggcaagaaggatgacaatggcattggcacggccattgactttgtgctctccaatgcccggctggtgctgggggtgggtggagcggccatgctgggcatcgccacgctggcagttaagcggatgtacgatcgggcgatcagtgcccctaccagccccacccgcctgagccattcggggaaaaggagctgggaagaacccaactggatgggctccccacgactgctgaacagggacatgaagacgggcctgagccggtccttgcagacccttcccacagactcctccaccttcgacacagatacattctgcccgccccggcccaagccagtggccaggaagggccaggtagacttgaagaagtcacgactccgcatgtccctgcaggagaaacttcttacttactaccggaaccgggcagccatccctgctggagagcaggctcgggccaagcaagctgctgtggacatatgtgccgagctccggagcttcctgcgggccaagttgcctgacatgccgcttcgggacatgtacttgagtggcagcctctacgatgacctgcaggtggtgacagctgaccacatccaactcattgtgccccttgtgctggagcagaacctgtggtcatgtattcctggtgaagacaccatcatgaatgtccctggcttcttcctggtgcgtcgtgagaatccagagtactttcctcgtgggagcagttactgggaccgctgtgtagtagggggctacctctctccaaagacagtcgcagatacatttgagaaggtagtggctggctccatcaattggccagccatagggtccctcttggactatgtgatccgcccggccccacccccagaagccctcacactggaggtgcagtatgagcgtgacaaacatctcttcattgacttcctgccatcagtgaccctcggtgacacagtcttggtggccaaaccacaccggctagcccagtatgacaacctgtggcggctgagcctgcgtcccgcggagacggcacgcctgcgggctctggaccaggctgactcgggctgccgatctctgtgcctcaagatcctcaaggccatatgcaagtccaccccggctctgggccacctcactgccagccagctaaccaatgtcatcctccacttggcccaggaggaggctgactggtctccggatatgctggccgaccgtttcctgcaggccttgaggggacttatcagctacttagaggctggagtcctgcccagtgccctaaaccccaaggtgaacttatttgcagagctcacccctgaagaaatagacgaattaggatacactctgtattgctcattgtctgagccagaggtgctgctgcagacgtagggcaggtgaaggccaaagcgggtgttggtggtcaggccctggattctccgttagatacacttggctacctagttggtgcctcacagggttcctgctgcctggtgtcttgctgatcatcaccctggtcacttcatgctgattagaatgacatctctttcgtctcctattttgttacccaactcttcctatttttgttaccaatcactgtgctctctgccgccccctggctccaggctaatttttctggaatgaattgagaaggtggcgtgctggcctgagctgatggaccacttggtgttttgcgttttggcccatgtttgctgcctctatctggtctgccttgcccgtttgcctgttcctattcagtgtcttttctattttttcctctctcgttcatgccttctgttttgctcttgtccctggagcatatctgcctaattaagatgttgccttttagttgaatgccactgaagagctgtgatagcatgtttcaaagctgaactctacagagcgagtgctgagacagtatttagggtttctgggagtgaggctggtagaagagttggcctttgaccacggttcctggagtagaagtccatcctccccccaacctcctgacccattcataaatgctgagaatgtctctcatgggaacactgttaatgacccacacaggataagctgaatgcaaagttatttgcaggttgaatttcttggtggctattagcagaagtgcagagtagggaaccagagctggttaagggcctagtgaagggtttgtgtgcccagtgtctgctcgtcatctgtggctgcaggggtcagacagacaaggatggggactgccagggcaccacttcatcatgaatgctggttttcacaccttttccttattttattgccaatcaggacaaggccttgaaggaacgcagccttagacatcaggtgaggatgatggaggtagacagtcgactgaatgtcagctggaaaatccagtcactagttggggtttggtggccatgttttctacccagacaggccctgcttttctaggatgtggccttagagcaagaacagacccaacagccagcccttcatcctccagcgtctgccataggaatgtgagaggggtgtttgctgagcgctccgggcacggccagagggcaagtgagcatgcacggacctcttccccctgtcctgtttctcacccagcacctggggagatcggtgctaccaaggaagagagcacacagataagacagaggggaggaggtgggcatttcctacattcctccttgtttgccgctgctgagattgcagtatttattgcaatgtaaatgtatcctgaaggtggggaggaatgtttaatctaccatgtccgtgtgtcatcttggtttgtgtttttccctgtttgtagcaagactctgatgataattctgtttctcatctgcccattcagtattttgttttccttccgtcaagttgtcttattttttcaatgactacctctccatcattgaggttctggtgaagctctctgcagctgtctcattccttcccaacgatagtaacaggaaatgactctttagcatcgatacctcaacatcaatttagggtagagattcctgcccctcttttgtcacagattaggaaattgagaactagggttaaccttgactatatttagaggtctttttgcctcttttccccttaacaaggatttcttatggtggtttcagtttcatttgcataaaggtattgagagggaacaaaaaacataaagctgagaatcttgagagagctcatctaccctgtctgttggtcagactcaaatgagagttaaaaaaaaaaaaaaaaatctgtatgcctgagtaccatcctggatgaatctagaaggtatggggtagagcttgacagggttcctgtgtacccactgggtatccgttagaggtaagggagaggagaggattgatagagtgttgcaaaagtatagattattcattgagataaaggatttggtttccctgccatgagtattaaaaaaatttaagttttcccaagcttgcatctctgaccaaatttcacataaaacattggaaggaggctgggtgcggtggctcatgcttgtaatcccagcactgggaagctaaggcgggtggatcacttgaggtcaggagttcgagaccagcctggccaacatggtgaaaccccgtctccacgaaaaagataaaaataagctgggcgtggtggcaggcgcctataatcccagctactcgggaggctgaggcaggagaataacttaaacccgggaggcggaggttacagtgagctgagatcgtgccactgcactccagcctgggtgacagagtgagaccctatttcaaaaaaataaaaattggaagaagagcttaaaaaagataagattttaaagagtcccaagttatttaagttgagtgtaattgtcatttaaggaaggcaaatgagtttatcatccttcttaaagagcatctcttttaactgttggacaaaaccataactttgtcattttacaaggaagaacctcttaagaagtcctcagaaccagaagcaatgtgaactctcagcgctggtcctggtgggtttgctgaccatgactgggcaagccgttctttttgctgccatcttcctcatcataaagtgtggaacataggcaattgctttgagattcttggatagaagaggacaacattctgcacctgcccccttttttaaatctttggggaaagatgagtaactttccccactactctgccttcctgttcagtaactcttacttttgcctgaagtaacagcatcttctacttctccatctagagatttttgtgtgtgtgccatcaaggttagcaaactttatacgtagcctaacacttaaaaaatgcactcattatcttaaacctaataaattccagagtttattttggttctcctctgttgcccttcctaaaaaatgagctgaagatgacagtatttttctttacatgcttggttatgacttttaaagttttatttaaataaatgttgaagctcaagtttaaagaagcgttgcagaggcccacggtctcctgggtcccggccacctgtccatattccacatttgctgactgtgctccctgcactccactcaagttgagagttcaaatagtcttgaaggggaatcagcttcaggatggaaggacccaggagaggccccgaggtgggagggttctgtaaatacagactactgcgagtgtccagagctctctgccatgatacttccttgggactgacttggctgagaacgtgttctgtcagaggatttgttagaactctgcccttttgtctgaaactcaaggccaaggagaatgataggagacttaggacagagctgacccttgcaccaggctgggaggctgcagcccttttagatgccacttactgtaagtggccagaataccagagaggtgggttccatggtcaaatgcacagtaggtgtttacctttacatttggatcaccttgtagtctttaaattcttggtccctgaggccaagtccacaacttgccttctagtcacttgcctgcccgcagtggtggtggatgtgttagctggtagatttggaatcagtcaccagtctttctgtactgtcttggttagctctatataagtaggggcagcttagccctgaggcccagagacctgctgtcctttttctccttgagggaggaaataaaactgcggaatacaatgtccttccatagcatgggaagaagaaaataaacatctcctttccaaca

SEQ ID NO: 154263 - DNA, 2269 bp, Homo sapiens
  Payload ID: 10317
  Gene Symbol: MIEF1
  Gene Name: mitochondrial elongation factor 1
  ENST ID: ENST00000402881
  CDS Start-End: 498-1934
ctccatctcaaaacaaacaaacaaacaaacaaacaaacaccctgcaatatcaatccaagagatcctggaatgcctcttgccctgtgaaacctggcagagccctgaggtttgggtcagtgccccctgccgtgggtctctggcctacaaaggcaccatggtgtgacacccagcccctgccagtcccccatggccccgtggagccgagaggcggtgctgagtctctatcgggctctgttgcgccagggccgacagcttcgctacactgatcgagacttctactttgcctccatccgccgtgaattccgaaaaaatcagaagctagaggacgctgaggcccgggagaggcagctggagaagggcctggtctttctcaacggcaaattggggaggatcatttaggatcctccaagggaaagaggacaaaggtgccttctgtagacactcctgctctcttccatccccatcttacagatgtattaagaagcctcagatgagcaatggcaggcgctggtgagcgcaaaggcaagaaggatgacaatggcattggcacggccattgactttgtgctctccaatgcccggctggtgctgggggtgggtggagcggccatgctgggcatcgccacgctggcagttaagcggatgtacgatcgggcgatcagtgcccctaccagccccacccgcctgagccattcggggaaaaggagctgggaagaacccaactggatgggctccccacgactgctgaacagggacatgaagacgggcctgagccggtccttgcagacccttcccacagactcctccaccttcgacacagatacattctgcccgccccggcccaagccagtggccaggaagggccaggtagacttgaagaagtcacgactccgcatgtccctgcaggagaaacttcttacttactaccggaaccgggcagccatccctgctggagagcaggctcgggccaagcaagctgctgtggacatatgtgccgagctccggagcttcctgcgggccaagttgcctgacatgccgcttcgggacatgtacttgagtggcagcctctacgatgacctgcaggtggtgacagctgaccacatccaactcattgtgccccttgtgctggagcagaacctgtggtcatgtattcctggtgaagacaccatcatgaatgtccctggcttcttcctggtgcgtcgtgagaatccagagtactttcctcgtgggagcagttactgggaccgctgtgtagtagggggctacctctctccaaagacagtcgcagatacatttgagaaggtagtggctggctccatcaattggccagccatagggtccctcttggactatgtgatccgcccggccccacccccagaagccctcacactggaggtgcagtatgagcgtgacaaacatctcttcattgacttcctgccatcagtgaccctcggtgacacagtcttggtggccaaaccacaccggctagcccagtatgacaacctgtggcggctgagcctgcgtcccgcggagacggcacgcctgcgggctctggaccaggctgactcgggctgccgatctctgtgcctcaagatcctcaaggccatatgcaagtccaccccggctctgggccacctcactgccagccagctaaccaatgtcatcctccacttggcccaggaggaggctgactggtctccggatatgctggccgaccgtttcctgcaggccttgaggggacttatcagctacttagaggctggagtcctgcccagtgccctaaaccccaaggacaaggccttgaaggaacgcagccttagacatcaggtgaggatgatggaggtagacagtcgactgaatgtcagctggaaaatccagtcactagttggggtttggtggccatgttttctacccagacaggccctgcttttctaggatgtggccttagagcaagaacagacccaacagccagcccttcatcctccagcgtctgccataggaatgtgagaggggtgtttgctgagcgctccgggcacggccagagggcaagtgagcatgcacggacctcttccccctgtcctgtttctcacccagcacctggggagatcggtgctaccaaggaagagagcacacagataagacagaggggaggaggtgggcatttcctacattcctccttgtttgccgctgctgagattgcagtatttattgcaatgtaaatgtatcctgaaggtggggaggaatgtttaatctaccatgtccgtgtgtca

SEQ ID NO: 154264 - DNA, 3797 bp, Homo sapiens
  Payload ID: 10317
  Gene Symbol: MIEF1
  Gene Name: mitochondrial elongation factor 1
  Uniprot ID: Q9NQG6
  ENST ID: ENST00000404569
  CDS Start-End: 551-1942
ccggggagaggtacccggccagaggcgagtcctgcggagtggtagcgcgcacggcctgcggtgtgacacccagcccctgccagtcccccatggccccgtggagccgagaggcggtgctgagtctctatcgggctctgttgcgccagggccgacagcttcgctacactgatcgagacttctactttgcctccatccgccgtgaattccgaaaaaatcagaagctagaggacgctgaggcccgggagaggcagctggagaagggcctggtctttctcaacggcaaattggggaggatcatttaggatcctccaagggaaagaggacaaaggtgccttctgtagacactcctgctctcttccatccccatcttacagatgtattaagaagcctcaggcccagggttctaactccacaggaatgggcttatctggggactgctgctgctgcagtcaggaagactccactgtagtcgggagcagcactggcctgagcactgcactggaggccagcctcttcgctgtggtgcccaagtacttctttcagatgagcaatggcaggcgctggtgagcgcaaaggcaagaaggatgacaatggcattggcacggccattgactttgtgctctccaatgcccggctggtgctgggggtgggtggagcggccatgctgggcatcgccacgctggcagttaagcggatgtacgatcgggcgatcagtgcccctaccagccccacccgcctgagccattcggggaaaaggagctgggaagaacccaactggatgggctccccacgactgctgaacagggacatgaagacgggcctgagccggtccttgcagacccttcccacagactcctccaccttcgacacagatacattctgcccgccccggcccaagccagtggccaggaagggccaggtagacttgaagaagtcacgactccgcatgtccctgcaggagaaacttcttacttactaccggaaccgggcagccatccctgctggagagcaggctcgggccaagcaagctgctgtggacatatgtgccgagctccggagcttcctgcgggccaagttgcctgacatgccgcttcgggacatgtacttgagtggcagcctctacgatgacctgcaggtggtgacagctgaccacatccaactcattgtgccccttgtgctggagcagaacctgtggtcatgtattcctggtgaagacaccatcatgaatgtccctggcttcttcctggtgcgtcgtgagaatccagagtactttcctcgtgggagcagttactgggaccgctgtgtagtagggggctacctctctccaaagacagtcgcagatacatttgagaaggtagtggctggctccatcaattggccagccatagggtccctcttggactatgtgatccgcccggccccacccccagaagccctcacactggaggtgcagtatgagcgtgacaaacatctcttcattgacttcctgccatcagtgaccctcggtgacacagtcttggtggccaaaccacaccggctagcccagtatgacaacctgtggcggctgagcctgcgtcccgcggagacggcacgcctgcgggctctggaccaggctgactcgggctgccgatctctgtgcctcaagatcctcaaggccatatgcaagtccaccccggctctgggccacctcactgccagccagctaaccaatgtcatcctccacttggcccaggaggaggctgactggtctccggatatgctggccgaccgtttcctgcaggccttgaggggacttatcagctacttagaggctggagtcctgcccagtgccctaaaccccaaggtgaacttatttgcagagctcacccctgaagaaatagacgaattaggatacactctgtattgctcattgtctgagccagaggtgctgctgcagacgtagggcaggtgaaggccaaagcgggtgttggtggtcaggccctggattctccgttagatacacttggctacctagttggtgcctcacagggttcctgctgcctggtgtcttgctgatcatcaccctggtcacttcatgctgattagaatgacatctctttcgtctcctattttgttacccaactcttcctatttttgttaccaatcactgtgctctctgccgccccctggctccaggctaatttttctggaatgaattgagaaggtggcgtgctggcctgagctgatggaccacttggtgttttgcgttttggcccatgtttgctgcctctatctggtctgccttgcccgtttgcctgttcctattcagtgtcttttctattttttcctctctcgttcatgccttctgttttgctcttgtccctggagcatatctgcctaattaagatgttgccttttagttgaatgccactgaagagctgtgatagcatgtttcaaagctgaactctacagagcgagtgctgagacagtatttagggtttctgggagtgaggctggtagaagagttggcctttgaccacggttcctggagtagaagtccatcctccccccaacctcctgacccattcataaatgctgagaatgtctctcatgggaacactgttaatgacccacacaggataagctgaatgcaaagttatttgcaggttgaatttcttggtggctattagcagaagtgcagagtagggaaccagagctggttaagggcctagtgaagggtttgtgtgcccagtgtctgctcgtcatctgtggctgcaggggtcagacagacaaggatggggactgccagggcaccacttcatcatgaatgctggttttcacaccttttccttattttattgccaatcaggacaaggccttgaaggaacgcagccttagacatcaggtgaggatgatggaggtagacagtcgactgaatgtcagctggaaaatccagtcactagttggggtttggtggccatgttttctacccagacaggccctgcttttctaggatgtggccttagagcaagaacagacccaacagccagcccttcatcctccagcgtctgccataggaatgtgagaggggtgtttgctgagcgctccgggcacggccagagggcaagtgagcatgcacggacctcttccccctgtcctgtttctcacccagcacctggggagatcggtgctaccaaggaagagagcacacagataagacagaggggaggaggtgggcatttcctacattcctccttgtttgccgctgctgagattgcagtatttattgcaatgtaaatgtatcctgaaggtggggaggaatgtttaatctaccatgtccgtgtgtcatcttggtttgtgtttttccctgtttgtagcaagactctgatgataattctgtttctcatctgcccattcagtattttgttttccttccgtcaagttgtcttattttttcaatgactacctctccatcattgaggttctggtgaagctctctgcagctgtctcattccttcccaacgatagtaacaggaaatgactctttagcatcgatacctcaacatcaatttagggtagagattcctgcccctcttttgtcacagattaggaaattgagaactagggttaaccttgactatatttagaggtctttttgcctcttttccccttaacaaggatttcttatggtggtttcagtttcatttgcataaaggtattgagagggaacaaaaaacataaagctgagaatcttgagagagctcatctaccctgtctgttggtcagactcaaatgagagttaaaaaaaaaaaaaaaaa

SEQ ID NO: 154265 - DNA, 744 bp, Homo sapiens
  Payload ID: 10317
  Gene Symbol: MIEF1
  Gene Name: mitochondrial elongation factor 1
  ENST ID: ENST00000434364
  CDS Start-End: 617-744
ccagaggcgagtcctgcggagtggtagcgcgcacggcctgcggtgtgacacccagcccctgccagtcccccatggccccgtggagccgagaggcggtgctgagtctctatcgggctctgttgcgccagggccgacagcttcgctacactgatcgagacttctactttgcctccatccgccgtgaattccgaaaaaatcagaagctagaggacgctgaggcccgggagaggcagctggagaagggcctggtctttctcaacggcaaattggggaggatcatttaggatcctccaagggaaagaggacaaaggtgccttctgtagacactcctgctctcttccatccccatcttacagatgtattaagaagcctcaggacacgggatattatagaggagagtggcagcatgctgagtggtattccgatctgaatcacactgtcatcctttatccggctcaggcccagggttctaactccacaggaatgggcttatctggggactgctgctgctgcagtcaggaagactccactgtagtcgggagcagcactggcctgagcactgcactggaggccagcctcttcgctgtggtgcccaagtacttctttcagatgagcaatggcaggcgctggtgagcgcaaaggcaagaaggatgacaatggcattggcacggccattgactttgtgctctccaatgcccggctggtgctgggggtgggtggagcggccatgctgggcatcgccac

SEQ ID NO: 154266 - DNA, 3838 bp, Homo sapiens
  Payload ID: 10317
  Gene Symbol: MIEF1
  Gene Name: mitochondrial elongation factor 1
  Uniprot ID: Q9NQG6
  ENST ID: ENST00000433117
  CDS Start-End: 476-922
gctcccttcagccccttcgcagctccgtgcgcaaggtcgtgtcccggaagtgaaggggccatgttgatgggtgacccggggagaggtacccggccagaggcgagtcctgcggagtggtagcgcgcacggcctgcggtgtgacacccagcccctgccagtcccccatggccccgtggagccgagaggcggtgctgagtctctatcgggctctgttgcgccagggccgacagcttcgctacactgatcgagacttctactttgcctccatccgccgtgaattccgaaaaaatcagaagctagaggacgctgaggcccgggagaggcagctggagaagggcctggtctttctcaacggcaaattggggaggatcatttaggatcctccaagggaaagaggacaaaggtgccttctgtagacactcctgctctcttccatccccatcttacagatgtattaagaagcctcagatgagcaatggcaggcgctggtgagcgcaaaggcaagaaggatgacaatggcattggcacggccattgactttgtgctctccaatgcccggctggtgctgggggtgggtggagcggccatgctgggcatcgccacgctggcagttaagcggatgtacgatcgggcgatcagtgcccctaccagccccacccgcctgagccattcggggaaaaggagctgggaagaacccaactggatgggctccccacgactgctgaacagggacatgaagacgggcctgagccggtccttgcagacccttcccacagactcctccaccttcgacacaggagaaacttcttacttactaccggaaccgggcagccatccctgctggagagcaggctcgggccaagcaagctgctgtggacatatgtgccgagctccggagcttcctgcgggccaagttgcctgacatgccgcttcgggacatgtacttgagtggcagcctctacgatgacctgcaggtggtgacagctgaccacatccaactcattgtgccccttgtgctggagcagaacctgtggtcatgtattcctggtgaagacaccatcatgaatgtccctggcttcttcctggtgcgtcgtgagaatccagagtactttcctcgtgggagcagttactgggaccgctgtgtagtagggggctacctctctccaaagacagtcgcagatacatttgagaaggtagtggctggctccatcaattggccagccatagggtccctcttggactatgtgatccgcccggccccacccccagaagccctcacactggaggtgcagtatgagcgtgacaaacatctcttcattgacttcctgccatcagtgaccctcggtgacacagtcttggtggccaaaccacaccggctagcccagtatgacaacctgtggcggctgagcctgcgtcccgcggagacggcacgcctgcgggctctggaccaggctgactcgggctgccgatctctgtgcctcaagatcctcaaggccatatgcaagtccaccccggctctgggccacctcactgccagccagctaaccaatgtcatcctccacttggcccaggaggaggctgactggtctccggatatgctggccgaccgtttcctgcaggccttgaggggacttatcagctacttagaggctggagtcctgcccagtgccctaaaccccaaggtgaacttatttgcagagctcacccctgaagaaatagacgaattaggatacactctgtattgctcattgtctgagccagaggtgctgctgcagacgtagggcaggtgaaggccaaagcgggtgttggtggtcaggccctggattctccgttagatacacttggctacctagttggtgcctcacagggttcctgctgcctggtgtcttgctgatcatcaccctggtcacttcatgctgattagaatgacatctctttcgtctcctattttgttacccaactcttcctatttttgttaccaatcactgtgctctctgccgccccctggctccaggctaatttttctggaatgaattgagaaggtggcgtgctggcctgagctgatggaccacttggtgttttgcgttttggcccatgtttgctgcctctatctggtctgccttgcccgtttgcctgttcctattcagtgtcttttctattttttcctctctcgttcatgccttctgttttgctcttgtccctggagcatatctgcctaattaagatgttgccttttagttgaatgccactgaagagctgtgatagcatgtttcaaagctgaactctacagagcgagtgctgagacagtatttagggtttctgggagtgaggctggtagaagagttggcctttgaccacggttcctggagtagaagtccatcctccccccaacctcctgacccattcataaatgctgagaatgtctctcatgggaacactgttaatgacccacacaggataagctgaatgcaaagttatttgcaggttgaatttcttggtggctattagcagaagtgcagagtagggaaccagagctggttaagggcctagtgaagggtttgtgtgcccagtgtctgctcgtcatctgtggctgcaggggtcagacagacaaggatggggactgccagggcaccacttcatcatgaatgctggttttcacaccttttccttattttattgccaatcaggacaaggccttgaaggaacgcagccttagacatcaggtgaggatgatggaggtagacagtcgactgaatgtcagctggaaaatccagtcactagttggggtttggtggccatgttttctacccagacaggccctgcttttctaggatgtggccttagagcaagaacagacccaacagccagcccttcatcctccagcgtctgccataggaatgtgagaggggtgtttgctgagcgctccgggcacggccagagggcaagtgagcatgcacggacctcttccccctgtcctgtttctcacccagcacctggggagatcggtgctaccaaggaagagagcacacagataagacagaggggaggaggtgggcatttcctacattcctccttgtttgccgctgctgagattgcagtatttattgcaatgtaaatgtatcctgaaggtggggaggaatgtttaatctaccatgtccgtgtgtcatcttggtttgtgtttttccctgtttgtagcaagactctgatgataattctgtttctcatctgcccattcagtattttgttttccttccgtcaagttgtcttattttttcaatgactacctctccatcattgaggttctggtgaagctctctgcagctgtctcattccttcccaacgatagtaacaggaaatgactctttagcatcgatacctcaacatcaatttagggtagagattcctgcccctcttttgtcacagattaggaaattgagaactagggttaaccttgactatatttagaggtctttttgcctcttttccccttaacaaggatttcttatggtggtttcagtttcatttgcataaaggtattgagagggaacaaaaaacataaagctgagaatcttgagagagctcatctaccctgtctgttggtcagactcaaatgagagttaaaaaaaaaaaaaaaaatctgtatgcctgagtaccatcctggatgaatctagaaggtatggggtagagcttgacagggttcctgtgtacccactgggtatccgttagaggtaagggagaggagaggattgatagagtgttgcaaaagtatagattattcattgagataaaggatttggtttccctgccatgagtattaaaaaaatttaagttttcccaa

SEQ ID NO: 154267 - DNA, 1379 bp, Homo sapiens
  Payload ID: 10317
  Gene Symbol: MIEF1
  Gene Name: mitochondrial elongation factor 1
  Uniprot ID: Q9NQG6
  ENST ID: ENST00000428069
  CDS Start-End: 531-977
agaggcgagtcctgcggagtggtagcgcgcacggcctgcggtgtgacacccagcccctgccagtcccccatggccccgtggagccgagaggcggtgctgagtctctatcgggctctgttgcgccagggccgacagcttcgctacactgatcgagacttctactttgcctccatccgccgtgaattccgaaaaaatcagaagctagaggacgctgaggcccgggagaggcagctggagaagggcctggtctttctcaacggcaaattggggaggatcatttaggatcctccaagggaaagaggacaaaggtgccttctgtagacactcctgctctcttccatccccatcttacagatgtattaagaagcctcaggcccagggttctaactccacaggaatgggcttatctggggactgctgctgctgcagtcaggaagactccactgtagtcgggagcagcactggcctgagcactgcactggaggccagcctcttcgctgtggtgcccaagtacttctttcagatgagcaatggcaggcgctggtgagcgcaaaggcaagaaggatgacaatggcattggcacggccattgactttgtgctctccaatgcccggctggtgctgggggtgggtggagcggccatgctgggcatcgccacgctggcagttaagcggatgtacgatcgggcgatcagtgcccctaccagccccacccgcctgagccattcggggaaaaggagctgggaagaacccaactggatgggctccccacgactgctgaacagggacatgaagacgggcctgagccggtccttgcagacccttcccacagactcctccaccttcgacacaggagaaacttcttacttactaccggaaccgggcagccatccctgctggagagcaggctcgggccaagcaagctgctgtggacatatgtgccgagctccggagcttcctgcgggccaagttgcctgacatgccgcttcgggacatgtacttgagtggcagcctctacgatgacctgcaggtggtgacagctgaccacatccaactcattgtgccccttgtgctggagcagaacctgtggtcatgtattcctggtgaagacaccatcatgaatgtccctggcttcttcctggtgcgtcgtgagaatccagagtactttcctcgtgggagcagttactgggaccgctgtgtagtagggggctacctctctccaaagacagtcgcagatacatttgagaaggtagtggctggctccatcaattggccagccatagggtccctcttggactatgtgatccgcccggccccacccccagaagccctcacactggaggtgcagtatgagcgtgacaaacatctcttcattgactt

SEQ ID NO: 154268 - DNA, 3364 bp, Homo sapiens
  Payload ID: 10318
  Gene Symbol: MIEF2
  Gene Name: mitochondrial elongation factor 2
  Uniprot ID: Q96C03
  ENST ID: ENST00000323019
  CDS Start-End: 212-1576
gtattttggcacctgtgcgctggactcgagcgctccgattggagttagggcctgcttgtctgcgtgctgcgaagtccgcggctgcccccggggccctagtcgttgggttccagggtccttcacgttccattcccaggctggtctgagctccggggccgtggtcccgctgcctcctccggtcgtcgtgcggaagctgcgacgcaggcagaccatggcagagttctcccagaaacgggggaagcggcgtagcgacgaagggctgggcagcatggtggacttcctcctggccaatgcccgcctggtgctgggcgtgggcggggctgctgtgctgggcattgccaccctggccgtgaagcggttcattgacagggccactagcccgcgggatgaggatgacaccaaggcagacagctggaaggaactgagcctgctcaaggccacaccacacctgcagccccggcctccacctgctgcccttagccagccagtgttgcccttggccccctcgtcgtctgccccagaagggcctgcagaaactgatcctgaggtgacaccacagctcagctccccagcaccgctgtgtctgacactgcaggagaggctgctggccttcgagcgggaccgtgtgaccatcccagcagcccaggtggctttggccaaacagctggctggcgacatcgccctggagctgcaggcctactttcggagcaagttcccggaactgccctttggggcattcgtgcctggggggccgctctacgacgggctgcaggcgggggctgcggaccatgtgcgtctcctggtgccactggtgctggagccgggcctgtggagcctggtgccgggcgtggacactgtggcgagggaccctcgctgctgggccgtgcgcaggacgcagcttgagttctgcccccgtgggagcagcccctgggaccgcttcctggtcgggggctacctctcctcccgcgtcctgctggagctactccgcaaggcgctggctgcttctgtcaactggccggccattggcagccttctcgggtgcctgatccggcccagcatggcctcggaggagctgctgctcgaggtgcagcacgaacgcctggagctcactgtggctgtgcttgtggcagtccctggggtcgatgctgacgaccgcctcctcttggcctggcccctggaggggctggcggggaacctctggctgcaggacctgtatccagtggaggctgctaggctgcgagccctggacgaccatgacgctgggactcgccggcggctgctgctgctgctgtgtgctgtctgccgtggttgctcggctctggggcagctaggccggggtcacctgacccaggtggtcctgcgtctgggggaggacaacgtggattggacggaggaggccttgggtgagcgcttcctgcaagccctggagctgctcatcggcagcctggagcaggccagcctgccctgccacttcaaccccagcgtgaacctcttcagcagcttgcgtgaggaggagattgacgacattggctatgcgctatacagtggcctacaggagcccgaggggctgctctaggtgggtggaaacgggtggttgccatgttttctaatgctggggagctgcacccacctcccttccagggatttgaatagtggtttttctctagctttttgccagaacaaaggagggtacattacttaaacccagggcatcaggatgtgcttgggctatggtggccataaaccctgagcccagagagcttgggtcactgtcacctgagtgcagctgggctgcctcaggcagcttggagtgccagccattcctgcaagcaccgtttcagctcttggggccaaccccaggacctttggctctgtccatcaccagcaaccaatccaccaacagaatgtggtttctgccatcctgggcagaagctgaaggccagcttcacatttctgctgagagaaggtgacttaacgccttttccggccctagctccaggcgttttgaggcgtctggtgcctgatggtaggtatggtgtgtttgttctgtcccccaggggctggagtcacctggtgcccctgaaggacagatttttggctgttaaaggatggcattttcctgctgtcttctgtgcgtttagttttcttgctgagcgggagctcagtatgacttgccacccacctgatacctcagggcaaggccctttttccctccagccaggtgagtgttttcttcaggcagctgagggtcctgggggagctgaggctctgtgctgcacccccagcccacagctggggcatctcactggagctgttccaggccccactggagagcagaggacctgatcccccactagagaggtccggtgtgcacagccggcctcccagtgtgccaaaatgaactgctctcagctgatggctgtattctgactttgaagcctgttaagaggtagcaagggggctagaggagggagattccacctcccctcccaagtgaccctcctcctgcctctggtatccttccttttgaaacgaagctcagcttcgaagatgtgaacaagaataaaaggaaaaaattctaatgtatatataactcaggctggataagggagtcttggtgctttcatacgcagctgttgagggttttctgtaagtcctgtggcttgtcctggcactttggcaagagtgcttgaggtcaattggaggtggtagagtttactttaaaaagtagcatcttggccgggtgtggtggctcgcatctgtaatcccagcacatcgggaggccgaggcgggcggatcacgaggtcaagagatcgagaccatcctgaccaacatgatgaaaccccaactctactaaaaagacaaaaattagctgggcgtggtggcacgcacctatagtcccagctactcgggaggccgaggcaggagaattgcttgaacccgggaggtagaggttgcaatgagctgaaattgcaccactgcactccagactggcgacagagcaagactctgtctcaaaaaaataaataaataagcatcttggccccgcgctgtggctcacgcctataatcccagcactttgggaagccgaggccggtagatcacctgaggttgggaattcaagaccaggctgaccaacgtggagaaactccatctctggtaaaaattcaaaaaaattagctgggcatggtggcacatgcctgtaatcccagctacttgggaggctgaggcaggagaattgcttgaacccgggaggcggaggttgtggtgagctgagatcgtgccagtgcactccagcctaggcaacaagagtgaaactctgtctcaaaataaaataaaataaaataataatagtaataataaa

SEQ ID NO: 154269 - DNA, 718 bp, Homo sapiens
  Payload ID: 10318
  Gene Symbol: MIEF2
  Gene Name: mitochondrial elongation factor 2
  ENST ID: ENST00000395703
  CDS Start-End: 142-633
gaagtccgcggctgcccccggggccctagtcgttgggttccagggtccttcacgttccattcccaggctggtctgagctccggggccgtggtcccgctgcctcctccggtcgtcgtgcggaagctgcgacgcaggcagaccatggcagagttctcccagaaacgggggaagcggcgtagcgacgaagggctgggcagcatggtggacttcctcctggccaatgcccgcctggtgctgggcgtgggcggggctgctgtgctgggcattgccaccctggccgtgaagcggttcattgacagggccactagcccgcgggatgaggatgacaccaaggcagacagctggaaggaactgagcctgctcaaggccacaccacacctgcagccccggcctccacctgctgcccttagccagccagtgttgcccttggccccctcgtcgtctgccccaggtgagtggcactccttcccctcttttggtgtcacattcaagagacgcagcccaggctttgccctgactgactgtgtgaccctgcgcgagtccctgcttctctctcggttgtgggctcctcagatatttaatgggggtggtgtttctttgccctgttcctggagcaaggtggtagcgttgtgatggtggggagctttagatggggaaactgaggtccagaggggcgtgacatacctacctactctgcatgaagctgttgtcgccaggg

SEQ ID NO: 154270 - DNA, 2879 bp, Homo sapiens
  Payload ID: 10318
  Gene Symbol: MIEF2
  Gene Name: mitochondrial elongation factor 2
  Uniprot ID: Q96C03
  ENST ID: ENST00000395704
  CDS Start-End: 149-766
gtgctgcgaagtccgcggctgcccccggggccctagtcgttgggttccagggtccttcacgttccattcccaggctggtctgagctccggggccgtggtcccgctgcctcctccggtcgtcgtgcggaagctgcgacgcaggcagaccatggcagagttctcccagaaacgggggaagcggcgtagcgacgaagggctgggcagcatggtggacttcctcctggccaatgcccgcctggtgctgggcgtgggcggggctgctgtgctgggcattgccaccctggccgtgaagcggttcattgacagggccactagcccgcgggatgaggatgacaccaaggcagacagctggaaggaactgagcctgctcaaggccacaccacacctgcagccccggcctccacctgctgcccttagccagccagtgttgcccttggccccctcgtcgtctgccccaggagaggctgctggccttcgagcgggaccgtgtgaccatcccagcagcccaggtggctttggccaaacagctggctggcgacatcgccctggagctgcaggcctactttcggagcaagttcccggaactgccctttggggcattcgtgcctggggggccgctctacgacgggctgcaggcgggggctgcggaccatgtgcgtctcctggtgccactggtgctggagccgggcctgtggagcctggtgccgggcgtggacactgtggcgagggaccctcgctgctgggccgtgcgcaggacgcagcttgagttctgcccccgtgggagcagcccctgggaccgcttcctggtcgggggctacctctcctcccgcgtcctgctggagctactccgcaaggcgctggctgcttctgtcaactggccggccattggcagccttctcgggtgcctgatccggcccagcatggcctcggaggagctgctgctcgaggtgcagcacgaacgcctggagctcactgtggctgtgcttgtggcagtccctggggtcgatgctgacgaccgcctcctcttggcctggcccctggaggggctggcggggaacctctggctgcaggacctgtatccagtggaggctgctaggctgcgagccctggacgaccatgacgctgggactcgccggcggctgctgctgctgctgtgtgctgtctgccgtggttgctcggctctggggcagctaggccggggtcacctgacccaggtggtcctgcgtctgggggaggacaacgtggattggacggaggaggccttgggtgagcgcttcctgcaagccctggagctgctcatcggcagcctggagcaggccagcctgccctgccacttcaaccccagcgtgaacctcttcagcagcttgcgtgaggaggagattgacgacattggctatgcgctatacagtggcctacaggagcccgaggggctgctctaggtgggtggaaacgggtggttgccatgttttctaatgctggggagctgcacccacctcccttccagggatttgaatagtggtttttctctagctttttgccagaacaaaggagggtacattacttaaacccagggcatcaggatgtgcttgggctatggtggccataaaccctgagcccagagagcttgggtcactgtcacctgagtgcagctgggctgcctcaggcagcttggagtgccagccattcctgcaagcaccgtttcagctcttggggccaaccccaggacctttggctctgtccatcaccagcaaccaatccaccaacagaatgtggtttctgccatcctgggcagaagctgaaggccagcttcacatttctgctgagagaaggtgacttaacgccttttccggccctagctccaggcgttttgaggcgtctggtgcctgatggtaggtatggtgtgtttgttctgtcccccaggggctggagtcacctggtgcccctgaaggacagatttttggctgttaaaggatggcattttcctgctgtcttctgtgcgtttagttttcttgctgagcgggagctcagtatgacttgccacccacctgatacctcagggcaaggccctttttccctccagccaggtgagtgttttcttcaggcagctgagggtcctgggggagctgaggctctgtgctgcacccccagcccacagctggggcatctcactggagctgttccaggccccactggagagcagaggacctgatcccccactagagaggtccggtgtgcacagccggcctcccagtgtgccaaaatgaactgctctcagctgatggctgtattctgactttgaagcctgttaagaggtagcaagggggctagaggagggagattccacctcccctcccaagtgaccctcctcctgcctctggtatccttccttttgaaacgaagctcagcttcgaagatgtgaacaagaataaaaggaaaaaattctaatgtatatataactcaggctggataagggagtcttggtgctttcatacgcagctgttgagggttttctgtaagtcctgtggcttgtcctggcactttggcaagagtgcttgaggtcaattggaggtggtagagtttactttaaaaagtagcatcttggccgggtgtggtggctcgcatctgtaatcccagcacatcgggaggccgaggcgggcggatcacgaggtcaagagatcgagaccatcctgaccaacatgatgaaaccccaactctactaaaaagacaaaaattagctgggcgtggtggcacgcacctatagtcccagctactcgggaggccgaggcaggagaattgcttgaacccgggaggtagaggttgcaatgagctgaaattgcaccactgcactccagactggcgacagagcaagactctgtctc

SEQ ID NO: 154271 - DNA, 2441 bp, Homo sapiens
  Payload ID: 10318
  Gene Symbol: MIEF2
  Gene Name: mitochondrial elongation factor 2
  Uniprot ID: Q96C03
  ENST ID: ENST00000395706
  CDS Start-End: 27-1424
ctgaggcctgcgcgaccccgccagagatggggctgagtcccaatttagacaggcagaccatggcagagttctcccagaaacgggggaagcggcgtagcgacgaagggctgggcagcatggtggacttcctcctggccaatgcccgcctggtgctgggcgtgggcggggctgctgtgctgggcattgccaccctggccgtgaagcggttcattgacagggccactagcccgcgggatgaggatgacaccaaggcagacagctggaaggaactgagcctgctcaaggccacaccacacctgcagccccggcctccacctgctgcccttagccagccagtgttgcccttggccccctcgtcgtctgccccagaagggcctgcagaaactgatcctgaggtgacaccacagctcagctccccagcaccgctgtgtctgacactgcaggagaggctgctggccttcgagcgggaccgtgtgaccatcccagcagcccaggtggctttggccaaacagctggctggcgacatcgccctggagctgcaggcctactttcggagcaagttcccggaactgccctttggggcattcgtgcctggggggccgctctacgacgggctgcaggcgggggctgcggaccatgtgcgtctcctggtgccactggtgctggagccgggcctgtggagcctggtgccgggcgtggacactgtggcgagggaccctcgctgctgggccgtgcgcaggacgcagcttgagttctgcccccgtgggagcagcccctgggaccgcttcctggtcgggggctacctctcctcccgcgtcctgctggagctactccgcaaggcgctggctgcttctgtcaactggccggccattggcagccttctcgggtgcctgatccggcccagcatggcctcggaggagctgctgctcgaggtgcagcacgaacgcctggagctcactgtggctgtgcttgtggcagtccctggggtcgatgctgacgaccgcctcctcttggcctggcccctggaggggctggcggggaacctctggctgcaggacctgtatccagtggaggctgctaggctgcgagccctggacgaccatgacgctgggactcgccggcggctgctgctgctgctgtgtgctgtctgccgtggttgctcggctctggggcagctaggccggggtcacctgacccaggtggtcctgcgtctgggggaggacaacgtggattggacggaggaggccttgggtgagcgcttcctgcaagccctggagctgctcatcggcagcctggagcaggccagcctgccctgccacttcaaccccagcgtgaacctcttcagcagcttgcgtgaggaggagattgacgacattggctatgcgctatacagtggcctacaggagcccgaggggctgctctaggtgggtggaaacgggtggttgccatgttttctaatgctggggagctgcacccacctcccttccagggatttgaatagtggtttttctctagctttttgccagaacaaaggagggtacattacttaaacccagggcatcaggatgtgcttgggctatggtggccataaaccctgagcccagagagcttgggtcactgtcacctgagtgcagctgggctgcctcaggcagcttggagtgccagccattcctgcaagcaccgtttcagctcttggggccaaccccaggacctttggctctgtccatcaccagcaaccaatccaccaacagaatgtggtttctgccatcctgggcagaagctgaaggccagcttcacatttctgctgagagaaggtgacttaacgccttttccggccctagctccaggcgttttgaggcgtctggtgcctgatggtaggtatggtgtgtttgttctgtcccccaggggctggagtcacctggtgcccctgaaggacagatttttggctgttaaaggatggcattttcctgctgtcttctgtgcgtttagttttcttgctgagcgggagctcagtatgacttgccacccacctgatacctcagggcaaggccctttttccctccagccaggtgagtgttttcttcaggcagctgagggtcctgggggagctgaggctctgtgctgcacccccagcccacagctggggcatctcactggagctgttccaggccccactggagagcagaggacctgatcccccactagagaggtccggtgtgcacagccggcctcccagtgtgccaaaatgaactgctctcagctgatggctgtattctgactttgaagcctgttaagaggtagcaagggggctagaggagggagattccacctcccctcccaagtgaccctcctcctgcctctggtatccttccttttgaaacgaagctcagcttcgaagatgtgaacaagaataaaaggaaaaaattctaatgtatatataa

SEQ ID NO: 154272 - DNA, 589 bp, Homo sapiens
  Payload ID: 10318
  Gene Symbol: MIEF2
  Gene Name: mitochondrial elongation factor 2
  ENST ID: ENST00000578174
  CDS Start-End: 149-502
gtgctgcgaagtccgcggctgcccccggggccctagtcgttgggttccagggtccttcacgttccattcccaggctggtctgagctccggggccgtggtcccgctgcctcctccggtcgtcgtgcggaagctgcgacgcaggcagaccatggcagagttctcccagaaacgggggaagcggcgtagcgacgaagggctgggcagcatggtggacttcctcctggccaatgcccgcctggtgctgggcgtgggcggggctgctgtgctgggcattgccaccctggccgtgaagcggttcattgacagggccactagcccgcgggatgaggatgacaccaaggcagacagctggaaggaactgagcctgctcaaggccacaccacacctgcagccccggcctccacctgctgcccttagccagccagtgttgcccttggccccctcgtcgtctgccccaggtggtagcgttgtgatggtggggagctttagatggggaaactgaggtccagaggggcgtgacatacctacctactctgcatgaagctgttgtcgccagggtgttggactctggggcaatgagaactcgtca

SEQ ID NO: 154273 - DNA, 540 bp, Homo sapiens
  Payload ID: 10318
  Gene Symbol: MIEF2
  Gene Name: mitochondrial elongation factor 2
  ENST ID: ENST00000578621
  CDS Start-End: 101-466
agggtccttcacgttccattcccaggctggtctgagctccggggccgtggtcccgctgcctcctccggtcgtcgtgcggaagctgcgacgcaggcagaccatggcagagttctcccagaaacgggggaagcggcgtagcgacgaagggctgggcagcatggtggacttcctcctggccaatgcccgcctggtgctgggcgtgggcggggctgctgtgctgggcattgccaccctggccgtgaagcggttcattgacagggccactagcccgcgggatgaggatgacaccaaggcagacagctggaaggaactgagcctgctcaaggccacaccacacctgcagccccggcctccacctgctgcccttagccagccagtgttgcccttggccccctcgtcgtctgccccaggctgttccgacatgttccccgccccttcactctgcagaagggcctgcagaaactgatcctgaggtgacaccacagctcagctccccagcaccgctgtgtctgacactgcaggagaggctgctggccttcg

SEQ ID NO: 154274 - DNA, 563 bp, Homo sapiens
  Payload ID: 10318
  Gene Symbol: MIEF2
  Gene Name: mitochondrial elongation factor 2
  ENST ID: ENST00000579341
  CDS Start-End: 85-563
cattcccaggctggtctgagctccggggccgtggtcccgctgcctcctccggtcgtcgtgcggaagctgcgacgcaggcagaccatggcagagttctcccagaaacgggggaagcggcgtagcgacgaagggctgggcagcatggtggacttcctcctggccaatgcccgcctggtgctgggcgtgggcggggctgctgtgctgggcattgccaccctggccgtgaagcggttcattgacagggccactagcccgcgggatgaggatgacaccaaggcagacagctggaaggaactgagcctgctcaaggccacaccacacctgcagccccggcctccacctgctgcccttagccagccagtgttgcccttggccccctcgtcgtctgccccagggcctgcagaaactgatcctgaggtgacaccacagctcagctccccagcaccgctgtgtctgacactgcaggagaggctgctggccttcgagcgggaccgtgtgaccatcccagcagcccaggtggctttggccaaacagctggctggcgacatcgccctggagctgca

SEQ ID NO: 154275 - DNA, 2186 bp, Homo sapiens
  Payload ID: 10319
  Gene Symbol: MFF
  Gene Name: mitochondrial fission factor
  Uniprot ID: Q9GZY8
  ENST ID: ENST00000353339
  CDS Start-End: 442-1470
gctacggctcccagaaggggccagcccgcgcctttcgcgcttctgccctggccctctgcgggccgctccgccggtgctgtccctgggcgcctccgtgctctcagccaaccacctctgagagcgcccactcgagcgccccgggagccagagggcgggggtcctcgccgggaccctcctgtgggcccagggggacaaaagtggctctcaatccagcacatgcacattgaagcaagttaaaggatttaatatgaagcacagaagcagatagtgccaaatagcaagcagtagttgttacacatttctggaaaagcagtgtccgtgttgttatgtacacctccaaaaaaagttcaaatgtgtaggggaattgttgtgtaaagtaaactgaactgcagggtagcagtattttaatagctattatagacctgtatttactgtatttaaatgagtaaaggaacaagcagtgacacatcactaggaagggtgagcagggcagcatttccttctcccactgctgctgagatggcagaaattagtcgaattcagtacgaaatggaatatactgaaggcattagtcagcgaatgagggtcccagaaaagttaaaagtagcaccgccaaacgctgacctggaacaaggattccaagaaggagttccaaatgctagtgtgataatgcaagttccggagaggattgttgtagcaggaaataatgaagatgtttcattttcaagaccagcagatcttgaccttattcagtcaactccctttaaacccctggcactgaaaacaccacctcgtgtacttacgctgagtgaaagaccactagattttctggatttagaaagacctcctacaacccctcaaaatgaagaaatccgagcagttggcagactaaaaagagagcggtctatgagtgaaaatgctgttcgccaaaatggacagctggtcagaaatgattctctgtggcacagatcagattctgccccaagaaataaaatttcaaggttccaggcaccgatttctgcaccggagtacactgtgacaccatcgccacaacaggctcgggtctgtcctccccatatgttacctgaagatggagctaatctttcctctgctcgtggcattttgtcgcttatccagtcttctactcgtagggcataccagcagatcttggatgtgctggatgaaaatcgcagacctgtgttgcgtggtgggtctgctgccgccacttctaatcctcatcatgacaacgtcaggtatggcatttcaaatatagatacaaccattgaaggaacgtcagatgacctgactgttgtagatgcagcttcactaagacgacagataatcaaactaaatagacgtctacaacttctggaagaggagaacaaagaacgtgctaaaagagaaatggtcatgtattcaattactgtagctttctggctgcttaatagctggctctggtttcgccgctagaggtaacatcagccctcaaaaatactgtctcaacagctggaaatataaaagatttgcaaacttctttgtttctgtctctgcattgtatgccattttatagtccacaccctgaaaatgtatttcttccagaaagtctggaggaaggacctatatttgtagaagtaaaggtatattctgtcactcagctgtattcacgtctgagcagttctgcagtaacacctgcttaaaattctccctttgcatgttttgtaaataggctccagttttgttttttaaaaggaatttattttttgcctcatcagtccacccaactgattctgaatgggagagagtctgtagagaattgattcagaaaagtgtctgtgaaagaaaaacaattattttgtcctgtttctcaaacagtgttaagcagttttgttaatagacatttttgcatcgacacttcaacattaacactttcaaagtcatggtctggtgccagatttaagaaactcgaaccacctaatatttcataaccttcttcattaggtacttgtacagattaatttctaacattgcagcagtttcatatgtgtgcaatatgtgcattctttcattttagttttgcacttggttttctataaagtacgtttttactcagttcatgcgtgaacaatttaaaaaacgacagaataaggtacaaatgtagtgtatttaataaactgtcaaccaaagaa

SEQ ID NO: 154276 - DNA, 1716 bp, Homo sapiens
  Payload ID: 10319
  Gene Symbol: MFF
  Gene Name: mitochondrial fission factor
  Uniprot ID: Q9GZY8
  ENST ID: ENST00000349901
  CDS Start-End: 305-1021
cgcttctgccctggccctctgcgggccgctccgccggtgctgtccctgggcgcctccgtgctctcagccaaccacctctgagagcgcccactcgagcgccccgggagccagagggcgggggtcctcgccgggaccctcctgtgggcccagggggacaaaagtggctctcaatccagcacatgcacattgaagcaagttaaaggatttaatatgaagcacagaagcagatagtgccaaatagcaagcagtagttgttacacatttggtgagcagggcagcatttccttctcccactgctgctgagatggcagaaattagtcgaattcagtacgaaatggaatatactgaaggcattagtcagcgaatgagggtcccagaaaagttaaaagtagcaccgccaaacgctgacctggaacaaggattccaagaaggagttccaaatgctagtgtgataatgcaagttccggagaggattgttgtagcaggaaataatgaagatgtttcattttcaagaccagcagatcttgaccttattcagtcaactccctttaaacccctggcactgaaaacaccacctcgtgtacttacgctgagtgaaagaccactagattttctggatttagaaagacctcctacaacccctcaaaatgaagaaatccgagcagttggcagactaaaaagagagcggtctatgagtgaaaatgctgttcgccaaaatggacagctggtcagaaatgattctctacctgtgttgcgtggtgggtctgctgccgccacttctaatcctcatcatgacaacgtcaggtatggcatttcaaatatagatacaaccattgaaggaacgtcagatgacctgactgttgtagatgcagcttcactaagacgacagataatcaaactaaatagacgtctacaacttctggaagaggagaacaaagaacgtgctaaaagagaaatggtcatgtattcaattactgtagctttctggctgcttaatagctggctctggtttcgccgctagaggtaacatcagccctcaaaaatactgtctcaacagctggaaatataaaagatttgcaaacttctttgtttctgtctctgcattgtatgccattttatagtccacaccctgaaaatgtatttcttccagaaagtctggaggaaggacctatatttgtagaagtaaaggtatattctgtcactcagctgtattcacgtctgagcagttctgcagtaacacctgcttaaaattctccctttgcatgttttgtaaataggctccagttttgttttttaaaaggaatttattttttgcctcatcagtccacccaactgattctgaatgggagagagtctgtagagaattgattcagaaaagtgtctgtgaaagaaaaacaattattttgtcctgtttctcaaacagtgttaagcagttttgttaatagacatttttgcatcgacacttcaacattaacactttcaaagtcatggtctggtgccagatttaagaaactcgaaccacctaatatttcataaccttcttcattaggtacttgtacagattaatttctaacattgcagcagtttcatatgtgtgcaatatgtgcattctttcattttagttttgcacttggttttctataaagtacgtttttactcagttcatgcgtgaacaatttaaaaaacgacagaataaggtacaaatgtagtgtattt

SEQ ID NO: 154277 - DNA, 2004 bp, Homo sapiens
  Payload ID: 10319
  Gene Symbol: MFF
  Gene Name: mitochondrial fission factor
  Uniprot ID: Q9GZY8
  ENST ID: ENST00000304593
  CDS Start-End: 412-1287
gtggagccgttccagtgcgtgggccacgcgtccgcccttttccgcgtcacatgaccacgaacactcttccgctacggctcccagaaggggccagcccgcgcctttcgcgcttctgccctggccctctgcgggccgctccgccggtgctgtccctgggcgcctccgtgctctcagccaaccacctctgagagcgcccactcgagcgccccgggagccagagggcgggggtcctcgccgggaccctcctgtgggcccagggggacaaaagtggctctcaatccagcacatgcacattgaagcaagttaaaggatttaatatgaagcacagaagcagatagtgccaaatagcaagcagtagttgttacacatttggtgagcagggcagcatttccttctcccactgctgctgagatggcagaaattagtcgaattcagtacgaaatggaatatactgaaggcattagtcagcgaatgagggtcccagaaaagttaaaagtagcaccgccaaacgctgacctggaacaaggattccaagaaggagttccaaatgctagtgtgataatgcaagttccggagaggattgttgtagcaggaaataatgaagatgtttcattttcaagaccagcagatcttgaccttattcagtcaactccctttaaacccctggcactgaaaacaccacctcgtgtacttacgctgagtgaaagaccactagattttctggatttagaaagacctcctacaacccctcaaaatgaagaaatccgagcagttggcagactaaaaagagagcggtctatgagtgaaaatgctgttcgccaaaatggacagctggtcagaaatgattctcttgtgacaccatcgccacaacaggctcgggtctgtcctccccatatgttacctgaagatggagctaatctttcctctgctcgtggcattttgtcgcttatccagtcttctactcgtagggcataccagcagatcttggatgtgctggatgaaaatcgcagacctgtgttgcgtggtgggtctgctgccgccacttctaatcctcatcatgacaacgtcaggtatggcatttcaaatatagatacaaccattgaaggaacgtcagatgacctgactgttgtagatgcagcttcactaagacgacagataatcaaactaaatagacgtctacaacttctggaagaggagaacaaagaacgtgctaaaagagaaatggtcatgtattcaattactgtagctttctggctgcttaatagctggctctggtttcgccgctagaggtaacatcagccctcaaaaatactgtctcaacagctggaaatataaaagatttgcaaacttctttgtttctgtctctgcattgtatgccattttatagtccacaccctgaaaatgtatttcttccagaaagtctggaggaaggacctatatttgtagaagtaaaggtatattctgtcactcagctgtattcacgtctgagcagttctgcagtaacacctgcttaaaattctccctttgcatgttttgtaaataggctccagttttgttttttaaaaggaatttattttttgcctcatcagtccacccaactgattctgaatgggagagagtctgtagagaattgattcagaaaagtgtctgtgaaagaaaaacaattattttgtcctgtttctcaaacagtgttaagcagttttgttaatagacatttttgcatcgacacttcaacattaacactttcaaagtcatggtctggtgccagatttaagaaactcgaaccacctaatatttcataaccttcttcattaggtacttgtacagattaatttctaacattgcagcagtttcatatgtgtgcaatatgtgcattctttcattttagttttgcacttggttttctataaagtacgtttttactcagttcatgcgtgaacaatttaaaaaacgacagaataaggtacaaatgtagtgtatttaataaactgtcaaccaaagaag

SEQ ID NO: 154278 - DNA, 1760 bp, Homo sapiens
  Payload ID: 10319
  Gene Symbol: MFF
  Gene Name: mitochondrial fission factor
  Uniprot ID: Q9GZY8
  ENST ID: ENST00000337110
  CDS Start-End: 313-1044
gcctttcgcgcttctgccctggccctctgcgggccgctccgccggtgctgtccctgggcgcctccgtgctctcagccaaccacctctgagagcgcccactcgagcgccccgggagccagagggcgggggtcctcgccgggaccctcctgtgggcccagggggacaaaagtggctctcaatccagcacatgcacattgaagcaagttaaaggatttaatatgaagcacagaagcagatagtgccaaatagcaagcagtagttgttacacatttggtgagcagggcagcatttccttctcccactgctgctgagatggcagaaattagtcgaattcagtacgaaatggaatatactgaaggcattagtcagcgaatgagggtcccagaaaagttaaaagtagcaccgccaaacgctgacctggaacaaggattccaagaaggagttccaaatgctagtgtgataatgcaagttccggagaggattgttgtagcaggaaataatgaagatgtttcattttcaagaccagcagatcttgaccttattcagtcaactccctttaaacccctggcactgaaaacaccacctcgtgtacttacgctgagtgaaagaccactagattttctggatttagaaagacctcctacaacccctcaaaatgaagaaatccgagcagttggcagactaaaaagagagcggtctatgagtgaaaatgctgttcgccaaaatggacagctggtcagaaatgattctctgtggcacagatcagattctgccccaagaaataaaatttcaaggttccaggcaccgatttctgcaccggagtacacgtatggcatttcaaatatagatacaaccattgaaggaacgtcagatgacctgactgttgtagatgcagcttcactaagacgacagataatcaaactaaatagacgtctacaacttctggaagaggagaacaaagaacgtgctaaaagagaaatggtcatgtattcaattactgtagctttctggctgcttaatagctggctctggtttcgccgctagaggtaacatcagccctcaaaaatactgtctcaacagctggaaatataaaagatttgcaaacttctttgtttctgtctctgcattgtatgccattttatagtccacaccctgaaaatgtatttcttccagaaagtctggaggaaggacctatatttgtagaagtaaaggtatattctgtcactcagctgtattcacgtctgagcagttctgcagtaacacctgcttaaaattctccctttgcatgttttgtaaataggctccagttttgttttttaaaaggaatttattttttgcctcatcagtccacccaactgattctgaatgggagagagtctgtagagaattgattcagaaaagtgtctgtgaaagaaaaacaattattttgtcctgtttctcaaacagtgttaagcagttttgttaatagacatttttgcatcgacacttcaacattaacactttcaaagtcatggtctggtgccagatttaagaaactcgaaccacctaatatttcataaccttcttcattaggtacttgtacagattaatttctaacattgcagcagtttcatatgtgtgcaatatgtgcattctttcattttagttttgcacttggttttctataaagtacgtttttactcagttcatgcgtgaacaatttaaaaaacgacagaataaggtacaaatgtagtgtatttaataaactgtcaaccaaagaa

SEQ ID NO: 154279 - DNA, 1085 bp, Homo sapiens
  Payload ID: 10319
  Gene Symbol: MFF
  Gene Name: mitochondrial fission factor
  Uniprot ID: Q9GZY8
  ENST ID: ENST00000354503
  CDS Start-End: 331-987
cagaaggggccagcccgcgcctttcgcgcttctgccctggccctctgcgggccgctccgccggtgctgtccctgggcgcctccgtgctctcagccaaccacctctgagagcgcccactcgagcgccccgggagccagagggcgggggtcctcgccgggaccctcctgtgggcccagggggacaaaagtggctctcaatccagcacatgcacattgaagcaagttaaaggatttaatatgaagcacagaagcagatagtgccaaatagcaagcagtagttgttacacatttggtgagcagggcagcatttccttctcccactgctgctgagatggcagaaattagtcgaattcagtacgaaatggaatatactgaaggcattagtcagcgaatgagggtcccagaaaagttaaaagtagcaccgccaaacgctgacctggaacaaggattccaagaaggagttccaaatgctagtgtgataatgcaagttccggagaggattgttgtagcaggaaataatgaagatgtttcattttcaagaccagcagatcttgaccttattcagtcaactccctttaaacccctggcactgaaaacaccacctcgtgtacttacgctgagtgaaagaccactagattttctggatttagaaagacctcctacaacccctcaaaatgaagaaatccgagcagttggcagactaaaaagagagcggtctatgagtgaaaatgctgttcgccaaaatggacagctggtcagaaatgattctctgtatggcatttcaaatatagatacaaccattgaaggaacgtcagatgacctgactgttgtagatgcagcttcactaagacgacagataatcaaactaaatagacgtctacaacttctggaagaggagaacaaagaacgtgctaaaagagaaatggtcatgtattcaattactgtagctttctggctgcttaatagctggctctggtttcgccgctagaggtaacatcagccctcaaaaatactgtctcaacagctggaaatataaaagatttgcaaacttctttgtttctgtctctgcattgtatgccattttat
